United States Patent Application Publication US 2014/0199313 A1 - sequence listing, part 8

SEQ ID NO: 28474 - DNA, 1326 bp, Burkholderia cenocepacia AU 1054
  CDS (1)..(1326): transl_table=11
atgaccgacaaagctacccgtatcgatctcttcagcctccgcaccgcgccgatgcgcgcgttccatctgacgtggatggcgttcttcgtttgcttcttcgcgtggttcgcgtgcgcgccgctgatgccgctgatcgcgcgcgaattccatctcacggcggcgcaagtcgccaacatcaacatcgccgcggtggccgcgacgatcgccgtgcggctgctggtcggcccgctgtgcgaccgcttcggcccgcgccgcgtgtacgcgggcctgctgctgctcggcgcgatccccgtgttcgccgtgtcgttcacgcacgactacctgtggttcctgatctgccggctcggcatcggcgcgatcggtgcgggcttcgtgatcacgcaataccacacgtcggtgatgttcgcgccgaatgtggtcggcaccgcgaacgcgacgacggccggctggggcaatgccggcgcgggcgcgacgcaggcgctgatgccgttgctcgtcgccgccgggctgatgctcggcttcggcgaggattcgtcgtggcgcatcgcgctggtcgtgccgggcgtggcgatgctcgcgatggcatgggcgtactggcgcttcacgcaggactgcccgcaaggcgatttcgtcgcgttgcgcaagcagggcgtgacggtcgacagcggcaagaagggcggctgggcgagcttcttcagggcctgcggcaactaccgcgtatggatgctgttcgtcacgtacggcgcgtgcttcggcgtcgaggtgttcatccacaacatcgccgcgctgtactacgtcgatcacttcaagctgtcgctgaaggacgccggtttcgcggtcgggatgttcgggctgctcgccctgttcgcgcgcgcgctcggcggctggctgtccgacaagatcgctgcccgccgcagcctcgacgtgcgcgcgacgctgctgtgcgcgctgatcatcggcgaagggctcgggctgatctggttctcgcacgcgcaaggcatcggcatggccctcgtcgcgatgctgaccttcggcctgttcacgcacatggcgtgcggcgcgacctacgcgctcgtgccgttcatcgaccgcaaggcgctcggcggcgtcgcggggatcgtcggcgcgggcggcaacgtcggcgcggtggccgcggctttcctgctgaagggtgtcggcgacgtgcagcagacgctgagcctgctcggcctcgcggtgaccgcgaccgcgttgtgcgcgatggccgtgcgcttcagcgaagaacacaaggcgcgcgaagccgagctgcgcgatcgcgcgctggccgccgccggcgccgcgaactga

SEQ ID NO: 28475 - protein, 441 aa, Burkholderia cenocepacia AU 1054
MTDKATRIDLFSLRTAPMRAFHLTWMAFFVCFFAWFACAPLMPLIAREFHLTAAQVANINIAAVAATIAVRLLVGPLCDRFGPRRVYAGLLLLGAIPVFAVSFTHDYLWFLICRLGIGAIGAGFVITQYHTSVMFAPNVVGTANATTAGWGNAGAGATQALMPLLVAAGLMLGFGEDSSWRIALVVPGVAMLAMAWAYWRFTQDCPQGDFVALRKQGVTVDSGKKGGWASFFRACGNYRVWMLFVTYGACFGVEVFIHNIAALYYVDHFKLSLKDAGFAVGMFGLLALFARALGGWLSDKIAARRSLDVRATLLCALIIGEGLGLIWFSHAQGIGMALVAMLTFGLFTHMACGATYALVPFIDRKALGGVAGIVGAGGNVGAVAAAFLLKGVGDVQQTLSLLGLAVTATALCAMAVRFSEEHKAREAELRDRALAAAGAAN

SEQ ID NO: 28476 - DNA, 1407 bp, Burkholderia pseudomallei S13
  CDS (1)..(1407)
atggatactctgcgcacctccctccgaagcggcaactggcgctcgcttctcgcgtgtttcctttatttcgatacgggcttcaccgtctgggtgctgtacgggccgctcgcgccgttcatcagcaaggacatcgcgatgacggccgcgcagcaaggctttctcgtcgcggtgccggtgctcgcggcggccatcctgcgcgtgacgctcggcaacctttaccagtccgccgacggccggcgcatcgcgctgatgggcgtactgctgtccgcgctgcccgccgccgtgctgccgttcgtgcccggcacgccgtcgtacacgctgctcctcgtgctcggcgtgttcctcgggatcggcggcgcgagcttcgcggtcgcgctgccgatggcgggcagcagctatccgccgaaggtgcagggcctcgtgctcggcctcgccgccgcgggcaacatcggcgcggtgctcgacggcttcatgttcccgcacatcgcggccgcgctcgactggaagttctcgacggccgccgcgctgccgctgctcgcgatcgcgggcttcgcgctcttcgcgtgggccgacgaccgcgcagagaaatcgggcagcgcggcgcgcgcgttcggcgcgttcgtgatcacgctcggcggtctcgtcgcgctcgtgctcgccgtgcacgcgggcctgttcggcgcgggcaaggcaggcgtgctgctgctgcccgtgatgggcgcgctgctcgcgatcgccgtgctgcccggccgctatcgcgcggtgctcgccgagcgcgacacgtgggtcatcatgctgatctacagcatcacgttcggcggcttcgtcggcatgtcgtcgtacgtgacgctgctgctgacgacgctctaccagatgccgaagatcgaagcgggcctgttcatgtcgctgctcgcgtttctcggcgcgatcgtgcgcccgttcggcggccacctcgccgaccgcatcaccggcgtgcgcgcgctcatggcgatcctcgccgcgatcgccgcggccgacttcgcgttcgcggccgtgatgccgccgctcgcgggcggcatcgcgctgctcgtgtgcctgtacgtcgcgttcggcctcggcaacggctcgacgttccagctcgtcccgcaccgctggcagggcaagacgggcctgctgtccggcatcgtcggcgcggcgggcggcatcggcggcttctatctgcccgtcgtgatgggcatcgcgaaggaaagcacgggcagctatcagctcggcttcgcgacgttcggcgcgctcgcgacctgcgcgctcgtcgcgctcgcgatgctgcgcgcgcagtggctgcgctgggcggcgcccgagctcgccgcggccgagccgtcggcgggcgccgggatgccgatcggcggcgcggcgcgcgtcggcgactga

SEQ ID NO: 28477 - protein, 468 aa, Burkholderia pseudomallei S13
MDTLRTSLRSGNWRSLLACFLYFDTGFTVWVLYGPLAPFISKDIAMTAAQQGFLVAVPVLAAAILRVTLGNLYQSADGRRIALMGVLLSALPAAVLPFVPGTPSYTLLLVLGVFLGIGGASFAVALPMAGSSYPPKVQGLVLGLAAAGNIGAVLDGFMFPHIAAALDWKFSTAAALPLLAIAGFALFAWADDRAEKSGSAARAFGAFVITLGGLVALVLAVHAGLFGAGKAGVLLLPVMGALLAIAVLPGRYRAVLAERDTWVIMLIYSITFGGFVGMSSYVTLLLTTLYQMPKIEAGLFMSLLAFLGAIVRPFGGHLADRITGVRALMAILAAIAAADFAFAAVMPPLAGGIALLVCLYVAFGLGNGSTFQLVPHRWQGKTGLLSGIVGAAGGIGGFYLPVVMGIAKESTGSYQLGFATFGALATCALVALAMLRAQWLRWAAPELAAAEPSAGAGMPIGGAARVGD

SEQ ID NO: 28478 - DNA, 1212 bp, Polaromonas sp. JS666
  CDS (1)..(1212): transl_table=11
atggcgggattccgcacctttctcaaatcgggccatgctccgaccttgttcgccgccttcctgtacttcgatttctgctttgcggtctgggtattgaatggggccatggcgccgttcatcagcgagacctttcatctgacggcggcgcagaagggcttcatgatttcggtgcccattctggcgggcgccctcatgcgctttccgctgggcattctggcgcaatacatcggccgcaaaaatgctgcgctggtcgaaatgggcatgattattctggcgctggcctacggctacttcttcatcagcgcgtacgaccatgtgctagccatgggcgtgctgctgggcatcgccggcgcgagcttcggcgtggcgctgtcgctgggttcgggctggttcccgcccaagtacaagggcctggccatgggcattgccggcgccggcaactccggcaccgtgctagccgtgctgttcgcaccgccactggccatggtctatggctggcagacggtttacggcctggcggccttcttcatgctgatcccgatggtggtaatggtcgtcttcgcgaaagagccgcccgacatcgagcaccagaccttccgccagcacatcgcctgcctgttcgagaaggacggctgggcgttcagcctgatctacatcatcactttcggcggcttcatcggcctggccagcttcctgcccacctacttctacgaccagttcggcgtcaccaaggtgcaggcaggccagctcaccatgctggcagcactcatgggctcagccgtgcgcgtggtcggcggctacatctctgaccgcgtgggcggcatcaacaccctgagcggcgtgctggtggtggtcgccttcaccctggtgctgtgcggcctggccggcaattcgctcaccgtcaccaccctgctcttcatggtctgctttgcagcgctcggtgccggcaacggcgcgctgttccagctggtgccgctgcgctggccgctggccacggcggtggcgggctccatgattggcgaggtgggcgctcttgggggcggcttcattcccaacgccatgggcctgagcaagcagtacaccaatacctacctctggggctttgtggctttcgccatcctggccgtcgtcatgctggtgatgctgcgggtgatgcaaatccgctggacccggacctgggctgaaaagggaggtcgcgcgcggagcgcgtga

SEQ ID NO: 28479 - protein, 403 aa, Polaromonas sp. JS666
MAGFRTFLKSGHAPTLFAAFLYFDFCFAVWVLNGAMAPFISETFHLTAAQKGFMISVPILAGALMRFPLGILAQYIGRKNAALVEMGMIILALAYGYFFISAYDHVLAMGVLLGIAGASFGVALSLGSGWFPPKYKGLAMGIAGAGNSGTVLAVLFAPPLAMVYGWQTVYGLAAFFMLIPMVVMVVFAKEPPDIEHQTFRQHIACLFEKDGWAFSLIYIITFGGFIGLASFLPTYFYDQFGVTKVQAGQLTMLAALMGSAVRVVGGYISDRVGGINTLSGVLVVVAFTLVLCGLAGNSLTVTTLLFMVCFAALGAGNGALFQLVPLRWPLATAVAGSMIGEVGALGGGFIPNAMGLSKQYTNTYLWGFVAFAILAVVMLVMLRVMQIRWTRTWAEKGGRARSA

SEQ ID NO: 28480 - DNA, 1320 bp, Geobacter metallireducens GS-15
  CDS (1)..(1320): transl_table=11
atggaaaggcacgagcagaagacggcaacggcggcaacgtgggggacccaggtcaggacgcgcaccatggcgacccacaggtacaagcagatctcggtcctgacgatgaacaccttcgccttcactgtctgcttcgcggtctgggtgatgttctccatcatcggcatcccgatcaagggcgccctaggcctgaacgagacccagttcggcatcctggccgcaacccccattctctccggctcattgattcggctgccgctcgggatgtggaccgacaagtacggcggacgcattgtcttcttcattctgatgctctgcaccatcgtccccatctacctggtgagcgccgccacggcgtactggcactttctcctcctggggctcttcatcggtcttgccggcggcgccttctcggtggggatcagctacaccgcccgctggttcaccaaggcccgtcagggattcgccatggggatctttggcgccgggaacgcgggggccgcggtcaccaagttcctggccccctccctggtggtggcctacggctggcagatggtccccaaggtctatgccgtggccatgctcgtgacggccatcctgttttgggcattcaccttcaccgagcacagccacaaagtgagctccaccgtgaccatcaaagaccagctggcggccctcagggacccgaaggtctggcgctactgccagtactacgccatcgtcttcgggggctacgtggggctctccctctggatgaccaagtactacatcaacgagtacggcttcgacatccggaccgcggccctggtggccgccatcttcgtgctaccctccggcgtgatccgcgccctgggagggtggctgtcggaccgtttcggcgcccacaccgtcacctgctgggtcatgtgggtctccggcgggtgcctcctgctcctctcgatcccccacttcgatgtggttgtcaccacggtgaacggtcccgtcgcgcgccacgtggggctcaacgtatgggtgttcacctcccttctcttcgttgtcggcattgcgtggggattcggcaaggcatcggtgttcaagcacatctccgatgaatacccccacaacatcggcgtgatctccggcatcgtggggctcattggcgggctcggcgggtttgtcctccccatcatgttcggcgccctggtggacctgaccggtgtccggagcaccgctttcatgctcctgtacggttccacgtgcgtttccctgttctggatgtacctggccctgaagaaagaaaacgttcatcgcaagctgaagaccgccgacattctcgaataa

SEQ ID NO: 28481 - protein, 439 aa, Geobacter metallireducens GS-15
MERHEQKTATAATWGTQVRTRTMATHRYKQISVLTMNTFAFTVCFAVWVMFSIIGIPIKGALGLNETQFGILAATPILSGSLIRLPLGMWTDKYGGRIVFFILMLCTIVPIYLVSAATAYWHFLLLGLFIGLAGGAFSVGISYTARWFTKARQGFAMGIFGAGNAGAAVTKFLAPSLVVAYGWQMVPKVYAVAMLVTAILFWAFTFTEHSHKVSSTVTIKDQLAALRDPKVWRYCQYYAIVFGGYVGLSLWMTKYYINEYGFDIRTAALVAAIFVLPSGVIRALGGWLSDRFGAHTVTCWVMWVSGGCLLLLSIPHFDVVVTTVNGPVARHVGLNVWVFTSLLFVVGIAWGFGKASVFKHISDEYPHNIGVISGIVGLIGGLGGFVLPIMFGALVDLTGVRSTAFMLLYGSTCVSLFWMYLALKKENVHRKLKTADILE

SEQ ID NO: 28482 - DNA, 1230 bp, Nitrobacter hamburgensis X14
  CDS (1)..(1230): transl_table=11
atggcgagagctggcagcctgtccgtcctgctcatcaccacctgggccttcacggtctgcttcgccgtctggatgatgttcagcgtgatcggcattccgatccgcgcagagcttgggcttggttcgactgagttcggtctcctcacagcgacgcccgtcctcaccggcgcgttgtttcgtttgccgctgggcatctggaccgaccgcttcggcggacggatcatcatgctgctgctgctgatcggctgcgcgatcccgctctggctgtcgtcctatgcgaccgcgctgtggcagttcctgctgctcgggctggcgctcggtcttgtcggcgcctcgttttcggtcggcacgccctacgtcgcgcgcttctttccaaaagagcgccggggtttcgcgatgggcttcttcggcgcaggcacgatcggtgcggcgctcaacatgttcgtcgctccgtggctgatcgaggcctatggctggcagatggtgccgaaggtctatgccgtcgcgctgctggtcactgctttgcttttttgggtgttgtccaggcccgatcccggcgtcggcggtccggtgtcgtcaatgtggcaacaactgtccgtgctgcgcaatccgcgcgtctggaaatactgccaatactactcgatcgtgttcggtggcttcaccgcgctgtcgatctggatgccgcaatatttcaagacggagtacggcttcaccatcgcgcaggcgtcgctgctggccgcgtgcttctcgctccccgggggcgcctttcgtgctctcggcggctggttgtcggaccgcttcggagcccacaacgtcacctggtgggtgctgtgggccgcctgggtttgcctgtttctgctgtcctatcccaagaccgacctgatcgtgcacacgatccgcgacccgctgagcttccgcatcgccttgccgtcgtggttcttcacaatgctcctcttcacgctcggcatcgcctttgcctgcggcatggcttcgacgttcaaatacataggcgacgacttccccgacagcatgggagcggtatccggcattgtcggcatggcgggcggccttggcggcttcctgctgccgatcacgttcggcgcgctcctggactggatcggcttcaactcaagctgcttcatgctgctctacggcatcatctgggtgtcgctgaccctcaattatctgaccgaagtccggcgggcaccggtcatgggcgaagaaacctga

SEQ ID NO: 28483 - protein, 409 aa, Nitrobacter hamburgensis X14
MARAGSLSVLLITTWAFTVCFAVWMMFSVIGIPIRAELGLGSTEFGLLTATPVLTGALFRLPLGIWTDRFGGRIIMLLLLIGCAIPLWLSSYATALWQFLLLGLALGLVGASFSVGTPYVARFFPKERRGFAMGFFGAGTIGAALNMFVAPWLIEAYGWQMVPKVYAVALLVTALLFWVLSRPDPGVGGPVSSMWQQLSVLRNPRVWKYCQYYSIVFGGFTALSIWMPQYFKTEYGFTIAQASLLAACFSLPGGAFRALGGWLSDRFGAHNVTWWVLWAAWVCLFLLSYPKTDLIVHTIRDPLSFRIALPSWFFTMLLFTLGIAFACGMASTFKYIGDDFPDSMGAVSGIVGMAGGLGGFLLPITFGALLDWIGFNSSCFMLLYGIIWVSLTLNYLTEVRRAPVMGEET

SEQ ID NO: 28484 - DNA, 1209 bp, Paracoccus denitrificans PD1222
  CDS (1)..(1209): transl_table=11
atgcccgccgttccccccgttccgccatccgaggccagccgcgcgctgggcctctcgaccttcgcctttaccatctgcttcgccgtctggacgatcttctcgatcatcggcctgcagatccgcgagcagctttccctgaccgaaacccagttcggcctgctgatcggcctgccgatcctgaccggatcgctggtgcgcatcgggctgggcgtgctgaccgaccggctgggcgggcggctggtctatacgatgaccatgctttccgccgccgtcgcgacgttccttttgtcccttgctacgacctggccgcagatgctgctggcggcgctgggcgtcgggctggccggcggttcctttgccgtcggcgtggcctatgtctcgcgcttctatgccgaggggcggcagggcacggcgttgggcatcttcggcaccggcaatgtcggggccgccgtgaccaagttcgccgcgcccttcgtcatgctggcgctgggctggcaggcgaccgcgcagatctgggccgccgcgctggtgctgaccgccgtgctgttctggctgctcagcaaggacgatcccgtcaccgccgcaggggccggccgcaaggcgccgctgcgtgccgagttcgcgccgctgggtcaggtgcgggtctggcgcttctcggcctattacttcttcagcttcggcgggttcgtggcgctggcgctgtggctgccgcattacctgacgcaggtctatggtttcggtgtcgggaccgccggcatgatcggcgcggcctattccatccccggctcgatcttccgcgcctatggcggggtgctgtccgaccggatcggggcgcgggcggtgatgtatgcgaccttcatcgtctcgctggccgcgaccgccatcctgtcgatcccggcgggggtgccggtgccggtcttcctggcggtgattttcgtcctgggcttcttcatgagcctgggcaaggcggccgtctacaagcacatccccagctattaccccggccatgtcggcgcggtcggcgggctggtcggcatgatcggcggtctgggcggctttgccttgccgctgctcttcggctggctgcgcgaccagaccgggctgtggtccagctgcttcatggcgctgttcctgctggtcgggctttgcgcgctgtggatgcacgcctcgatccgccagatgggccgcgcgcccctgcaagccgcctga

SEQ ID NO: 28485 - protein, 402 aa, Paracoccus denitrificans PD1222
MPAVPPVPPSEASRALGLSTFAFTICFAVWTIFSIIGLQIREQLSLTETQFGLLIGLPILTGSLVRIGLGVLTDRLGGRLVYTMTMLSAAVATFLLSLATTWPQMLLAALGVGLAGGSFAVGVAYVSRFYAEGRQGTALGIFGTGNVGAAVTKFAAPFVMLALGWQATAQIWAAALVLTAVLFWLLSKDDPVTAAGAGRKAPLRAEFAPLGQVRVWRFSAYYFFSFGGFVALALWLPHYLTQVYGFGVGTAGMIGAAYSIPGSIFRAYGGVLSDRIGARAVMYATFIVSLAATAILSIPAGVPVPVFLAVIFVLGFFMSLGKAAVYKHIPSYYPGHVGAVGGLVGMIGGLGGFALPLLFGWLRDQTGLWSSCFMALFLLVGLCALWMHASIRQMGRAPLQAA

SEQ ID NO: 28486 - DNA, 1401 bp, Pseudomonas aeruginosa
  CDS (1)..(1401): transl_table=11
atgatcgccaatacccaactgaaagccgcacggggaccgctgctgctcgactggcgccccgaggaccccgagttctgggcgcgcaacggcaagcgcatcgccagccgcaacctgtggatctcgatccccgcgctgctgctcgccttcgccgtgtggatgatctggagcacggtgactgtgcgcctgaacagcgccggcttcgccttcagcaacgaccagctgttcctgctcgcggcgctgccgtcgatctccggcgccaccctgcgggtgttctattcgttcatggtgccgatcttcggcggtcgtcgctggaccgccctgagcaccgcctcgatgctgatcccgtgcatctggctgggcttcgccgtgcaggacccgagtaccccgtactgggtgttcgccctgatcgcgctgctctgcggcttcggcggcggcaacttcgcctcgagcatgtccaatatcagcttcttctatccgaagagccagcagggcaccgccctcggcctgaatgccgggctcggcaacctcggcgtctcggtgatgcagttcgccgtgccgctggcggtggccggcggcctgttcggcgccttcggcggcgagccgcagcagctcggcgacggcggtcgcctgtggctgcagaacgccggctggatctgggtgccgttcatcgccgtggtatcggtcgcggcctggttcgggatgaacgacatcgccgacgccaaggcctcgttccgcgaccaggcggtgatcttcaagcgcaagcacaactggctgatgtgctggctgtacgtggccaccttcggctcgttcatcggcttctcggccggcttcgcgatgctcagcaagacccagttccccgacgtcaacccgctgcaatacgccttcctcggtccgctggtgggcgccctcagccggcctctgggcggctggctggcggacaagttcggcggcgcgcggatcaccctgtggaactacgcgctgatgatcggcggggtgttcgcggtgatcgccttcctgccgggcgacggcggccagggcaacttcttcggcttccttggcgccttcatcctgctgttcttcttcgccggcatcggcaacggctccaccttccgcatgatcccggtgatcttccgcaacgagtgggcccggcgggtgcgcgacggccaggccgacgaagccggcgcggcgcgcaacgcgagcatggagtcggccgcggtgatcggcttctccgccgccatcggcgccttcggcgggttcttcatcccgaaggcgttcggcacctcgctgcacatgaccggcagcgccgagggcgccctctacgtgttcatcgcctactacctgagctgcatcgtcgccacctggtggtggtacgcgcgcaagggtgcggagagtccctgttga

SEQ ID NO: 28487 - protein, 466 aa, Pseudomonas aeruginosa
MIANTQLKAARGPLLLDWRPEDPEFWARNGKRIASRNLWISIPALLLAFAVWMIWSTVTVRLNSAGFAFSNDQLFLLAALPSISGATLRVFYSFMVPIFGGRRWTALSTASMLIPCIWLGFAVQDPSTPYWVFALIALLCGFGGGNFASSMSNISFFYPKSQQGTALGLNAGLGNLGVSVMQFAVPLAVAGGLFGAFGGEPQQLGDGGRLWLQNAGWIWVPFIAVVSVAAWFGMNDIADAKASFRDQAVIFKRKHNWLMCWLYVATFGSFIGFSAGFAMLSKTQFPDVNPLQYAFLGPLVGALSRPLGGWLADKFGGARITLWNYALMIGGVFAVIAFLPGDGGQGNFFGFLGAFILLFFFAGIGNGSTFRMIPVIFRNEWARRVRDGQADEAGAARNASMESAAVIGFSAAIGAFGGFFIPKAFGTSLHMTGSAEGALYVFIAYYLSCIVATWWWYARKGAESPC

SEQ ID NO: 28488 - DNA, 1416 bp, Mycobacterium fortuitum
  CDS (1)..(1416): transl_table=11
atgcccactctgctgaagtcgaatcgcgtcaccaactgggaccccgaggacacactcgcctgggaagccggcaacaaatacatcgcgcgtcggaacctgatctggtcggtgttcgccgaacacgtcggattctcgatctggtccatctggtcggtgatggtcctgttcatgcccgaagccgtgtacggcttctccgccggggacaagttcctgctgggcgccaccgccacgctggtggggggatgcctgcgtatcccctacacgcttgccaccgccacattcggcggccgtaactggaccgtgttctccgccttcgtgctgctgatccccacggtggggaccatgttgctgctggccaatcccggcctgccactgtggccgtacctgctgtgcgcggcgctggccggcttcggcggcggcaacttcgcctcctcgatgaccaacatcaacgccttctacccgcagcggctcaagggctgggcgttgggactcaacgccggcggcggaaacatcggggtgccgatgatccagctggtcggcctgctggtcatcgccacggcaggcaaccgggccccgtactgggtctgcgccgtctacctcgtcgccctggccgtcgccggtatcggtgccgcgctctacatggacaacctcgaacagcacaagatcgacctgggcgcgatgaaagcaattctggcagaacgtgatacctgggtgatctcgttgctctacatcggcaccttcggctcgttcatcggcttcgccttcgcattcggccaggtgcttcagatcaacttcgccgccggcggccagaccgcggcacaggcctctctgcatgccgcgcagatcgcgttcatcggcccgctgctcggctcgctgtcgcgggtctacggcggcaagctggccgaccggatcggtggtgggcgcgtgaccctcgcagtcttcggcggcatgatcctggcggccggacttctcgtggcgatcagcatgaccgacgatcacaccgcaggtgcggccaacggactgatgatggtcggatacgtcatcggtttcatcgccctgttcctgctcagcggcctgggcaatggctcggtgtacaagatgatcccgtccatcttcgaggcccgcagtcactccctgcaggtcagtgagcaggagcggcagcggtggtcgctgtcgatgtcgggcgccctgatcggattcgccggagcgatcggagccctgggcggtgtcggtatcaacctggcgctccggcagtcctacctgtccagcggttcggcgaccaccgcgttctggatcttcctggccttctacctggtggcctcggcgtgcacctggttccgttacgtgcgcaggtcggttgcggtgggcgtcacaacgatcaccgaagaccgacacgactcggcaatggccgggtaa

SEQ ID NO: 28489 - protein, 471 aa, Mycobacterium fortuitum
MPTLLKSNRVTNWDPEDTLAWEAGNKYIARRNLIWSVFAEHVGFSIWSIWSVMVLFMPEAVYGFSAGDKFLLGATATLVGGCLRIPYTLATATFGGRNWTVFSAFVLLIPTVGTMLLLANPGLPLWPYLLCAALAGFGGGNFASSMTNINAFYPQRLKGWALGLNAGGGNIGVPMIQLVGLLVIATAGNRAPYWVCAVYLVALAVAGIGAALYMDNLEQHKIDLGAMKAILAERDTWVISLLYIGTFGSFIGFAFAFGQVLQINFAAGGQTAAQASLHAAQIAFIGPLLGSLSRVYGGKLADRIGGGRVTLAVFGGMILAAGLLVAISMTDDHTAGAANGLMMVGYVIGFIALFLLSGLGNGSVYKMIPSIFEARSHSLQVSEQERQRWSLSMSGALIGFAGAIGALGGVGINLALRQSYLSSGSATTAFWIFLAFYLVASACTWFRYVRRSVAVGVTTITEDRHDSAMAG

SEQ ID NO: 28490 - DNA, 1527 bp, Populus tremula x Populus tremuloides
  CDS (1)..(1527)
atggagatagaagggcaagccactgtcaaggaatctcagcctccaaaattcgctcttccagtggattcagaacacaaggcaactgagttccggttgttctcagtagctgcccctcacatgcgggcattccatctttcttgggtttctttctttgcctgttttgtctcttcttttgctgctccaccccttcttcctatcatacgtgacaacctcaacctcactgcctctgacattggtaatgcgggcattgcatcagtgtcaggtgcagtttttgctcgagttgctatggggactgcttgtgaccttttcggaccccgtctagcctctgcctcattgatcctcctcactgcacctgcagtttacttcacttccatggcctcatcttctacttcttttctcctggttcgttttttcactggcttctctctggccacttttgtctccactcaattctggatgagctctatgttttcagcaccggtagttggaacggctaatggcgttgcgggaggttggggtaaccttggcggtggggcaacgcaactaatcatgccccttgtgtttggcctcatccgtgacattggagccatcaaatttacagcttggagaattgcgtttttcattcctgccctgtttcagacactatcggcatttgcagtcttgatctttggcaaggacttgccggacggaaactttaggcggctgcagaaagcaggggataaaacaaaagataaattctcaaatgtcttctatcatggaataaaaaattacagagggtggatcctggcactcagttatgggtactgttttggggtagagctgacaatagacaacattgtcgcagaatacttctatgacagatttgacctcaaactccatacagcaggaatgattgcagcaagctttggtctagcaaacattgtttctcgaccaggtggtggaatgatctcagatgcagtagggaagaggtttggaatgagggggaagttgtgggctctgtgggtagtgcagaccttgggaggtgttttctgcatcatacttggacgagttggatctttaggcgcgtccattgtggtgatgattgtgttcttcttattctgccaagcagcatgtggactaacatttggggtggtgccttttgtctcacgaaggtcattggggctcatatctggtatgactggaggtggtggaaacgtgggggcagttctaactcaactaattttcttcagaggatcgaaatactcaaaagagagagggataatgctcatgggtgtcatgattatatgctgcactcttccaatttgtcttatacacttcccacaatggggtggaatgttttgcggtccatcatctacaaagatcgctacagaagaagactactacttgtccgaatggaattcagaggagaaggagaaaggcctgcatctatcaagcttaaagtttgcagataacagcagaagtgaaagaggtagaaaagaagattctgaaaccaggccagtagatgaaaccctatcaacaaaagtctag

SEQ ID NO: 28491 - protein, 508 aa, Populus tremula x Populus tremuloides
MEIEGQATVKESQPPKFALPVDSEHKATEFRLFSVAAPHMRAFHLSWVSFFACFVSSFAAPPLLPIIRDNLNLTASDIGNAGIASVSGAVFARVAMGTACDLFGPRLASASLILLTAPAVYFTSMASSSTSFLLVRFFTGFSLATFVSTQFWMSSMFSAPVVGTANGVAGGWGNLGGGATQLIMPLVFGLIRDIGAIKFTAWRIAFFIPALFQTLSAFAVLIFGKDLPDGNFRRLQKAGDKTKDKFSNVFYHGIKNYRGWILALSYGYCFGVELTIDNIVAEYFYDRFDLKLHTAGMIAASFGLANIVSRPGGGMISDAVGKRFGMRGKLWALWVVQTLGGVFCIILGRVGSLGASIVVMIVFFLFCQAACGLTFGVVPFVSRRSLGLISGMTGGGGNVGAVLTQLIFFRGSKYSKERGIMLMGVMIICCTLPICLIHFPQWGGMFCGPSSTKIATEEDYYLSEWNSEEKEKGLHLSSLKFADNSRSERGRKEDSETRPVDETLSTKV

SEQ ID NO: 28492 - DNA, 1602 bp, Pseudomonas sp
  CDS (1)..(1602): transl_table=11
atgagcaatatcgaaaagtgggacgtggaggaccagatcttctgggacaccactggcaagcgggtcgccaatcgcaatctgtggatctccatcccgagtctgctgatgggcttcgccatctggctgatgtggggcatcgtcacggtgcagatgctcaacctgggctttccgttcgcgcccgccgagttgttcaccctgaccgccatcgccggcctcaccggcgccaccctgcgcattccagcgtcgttcatgatccgcatcgctggcgggcgcaacaccatcttcctgaccaccgcactgctgatgattcctgccgccggcgcgggcattgccctgcagagtcaggacacaccgctgtgggtctttcagctgctgggcttcctctccggtatcggtggcggcaacttcgcctgctcgatgagcaacatcagcaccttcttcccgaagaaccagcagggattggccctgggcctcaacgccggcctcggtaacttcggtgtcaccaccatgcagatcctgatcccgctggtgatgactgccggtgtgttcggctttatcgccggcgacccgatgacactggtcaaggacagcggcaccttgatcggcggcattactgccggaaccgatacctggattcagaatggcggttgggtctggctgctgttcctggtgccgctggccttcgccggctggttcggcatgaacaacctgctggtgatctcgccgacgccgggttacccgctgaacgcgttcggcaagattcttggtctctacgccgtggccttttttgccgccgccgtcggcctgtacctgtacctgcctgcgccgaccggcctcggcgtgctgaatatgtggggcgtgatgctgctgaccatcggcgcgacgctcggcatgctgcgcctgctgccgggcagcatcagcccgaacatcaagcgccagtttgcgatcttccgcgacaagcacacctggtcgatgagcgttctctacatcctgaccttcggctcgttcatcggcttctccatggcgctgccgctgtcgatcacggtgatcttcggtttcatgaatgaggtcggcgctgatggcgtggtgacccgcgtcgccaaccccaacgcaccgagtgcgctgacctacgcctggatcgggccgttcattggcgccctgatccgcccgctgggcggctggatttccgacaagggcggcggctccatcgtcacccaagtgatctcggtggtcatggttggtgcctcggtcgcggccggctacgtgatgcagcaggcctacagctcggcccagcctgaagagtacttcttcctgttcctggtgctgttcctggtgctgttcgccgccagcggcatcggcaacggctcgaccttccgcaccatcggcgtcatctacgaccgcgagaaggccggcccggtactcggctggacctccgctgtcgccgcctacggctccttcgtcgcgccgatcgtgatcggcgagcaggtcaaggcgggcaccccggaagtagccatgtacggcttcgcggtgttctacgcgctgtgcctgatcctcaactggtggttctacctgcgccccaacgcctacgtgaagaacccctaa

SEQ ID NO: 28493 - protein, 533 aa, Pseudomonas sp
MSNIEKWDVEDQIFWDTTGKRVANRNLWISIPSLLMGFAIWLMWGIVTVQMLNLGFPFAPAELFTLTAIAGLTGATLRIPASFMIRIAGGRNTIFLTTALLMIPAAGAGIALQSQDTPLWVFQLLGFLSGIGGGNFACSMSNISTFFPKNQQGLALGLNAGLGNFGVTTMQILIPLVMTAGVFGFIAGDPMTLVKDSGTLIGGITAGTDTWIQNGGWVWLLFLVPLAFAGWFGMNNLLVISPTPGYPLNAFGKILGLYAVAFFAAAVGLYLYLPAPTGLGVLNMWGVMLLTIGATLGMLRLLPGSISPNIKRQFAIFRDKHTWSMSVLYILTFGSFIGFSMALPLSITVIFGFMNEVGADGVVTRVANPNAPSALTYAWIGPFIGALIRPLGGWISDKGGGSIVTQVISVVMVGASVAAGYVMQQAYSSAQPEEYFFLFLVLFLVLFAASGIGNGSTFRTIGVIYDREKAGPVLGWTSAVAAYGSFVAPIVIGEQVKAGTPEVAMYGFAVFYALCLILNWWFYLRPNAYVKNP

SEQ ID NO: 28494 - DNA, 1302 bp, Halomonas maura
  CDS (1)..(1302): transl_table=11
atgacgcctgccgactccctcgtttcccccagcggcccgcccgaggaggccccgttggccgagccgactccaccgctgggctatcgcgccctggtggtggtggtgctctcgccactggccttcgcgctggtcttcgcctgctggaccctgttcgccgtgctgggcctcgagctcaggcgcgaactggcgctgagccccctggccttcgccatcctgctggcgatgccgctgctggccggggggctggccagcctgcccgcggcgctgctggcccgacgcctgggggggcgccgggtcatgctcggctgcctgctgtggatctgtcccttcctgtggtggatcggccatgccgaccactatccggagtacctgctcgcgggcctgggactcggtgtcggggccggcgctctggccgccggcctggtccatgtggccacgctgggcccggcgcggcacgtcggcctggcgctggggctctacggggccggcatggtcggggcggggctcggctacctgttgctgccgctggtcagccaggcctatggctggcgcctggccccgttgctctacctgctgccggtggccctggtcgcgggattgctgtggctgttcgccgacgacgccggcacgccggcggaggccccgcgccgccgcccgtcgggccgcctggccgcggggctgcgacggctgcgggactggacgctgtggcggctggccatcacctacggcttcttcttcggtgccttcgtcggcctggcgctgtggttgccgggtgagctgacggcgcgctacggcctcgcgcaacaggccgcggccttgtgggggctgcccttcccgctggtggtgggaatcggtcaggtggtgggcggggccctggccgaccgccacgacttccgcagcctgcgctggtgggtcagcgccttcgtgctggcctgcctgttcctgctctcctatccgcccttcacgatgcagatccatggcgtgcatggggccctggcgctgcactacgacgcgcccctgtggggcttcgagctgctgatgggcctgatggggctggccatgggcctggggctcggcagcctgatgcggctgatccatcgcgaccacggcgaggacatggtgctggtgggcggcctggcgctgaccctcggtgggctcttcgccgccctgctgccgccggtgttcgtgctcggcagcctctggaccggcctcgataccgccggcttcatgttcctctacgccgccctggtgctctgcatgctggtgatgctggccgaccacgtccgcggcgctcgccgctga

SEQ ID NO: 28495 - protein, 433 aa, Halomonas maura
MTPADSLVSPSGPPEEAPLAEPTPPLGYRALVVVVLSPLAFALVFACWTLFAVLGLELRRELALSPLAFAILLAMPLLAGGLASLPAALLARRLGGRRVMLGCLLWICPFLWWIGHADHYPEYLLAGLGLGVGAGALAAGLVHVATLGPARHVGLALGLYGAGMVGAGLGYLLLPLVSQAYGWRLAPLLYLLPVALVAGLLWLFADDAGTPAEAPRRRPSGRLAAGLRRLRDWTLWRLAITYGFFFGAFVGLALWLPGELTARYGLAQQAAALWGLPFPLVVGIGQVVGGALADRHDFRSLRWWVSAFVLACLFLLSYPPFTMQIHGVHGALALHYDAPLWGFELLMGLMGLAMGLGLGSLMRLIHRDHGEDMVLVGGLALTLGGLFAALLPPVFVLGSLWTGLDTAGFMFLYAALVLCMLVMLADHVRGARR

SEQ ID NO: 28496 - DNA, 1254 bp, Rhizobium sp
  CDS (1)..(1254): transl_table=11
atgtccactgttcaccagacaaagaatatcagcgcaacagaacagggccgcgccctgtggatctcgacggccgccttcaccatctgtttcgccgtctggacgatcttttccatcatcggcgtgcgcatcaagcaggagcttggcctaagcgaagcgcagttcgggcttctgatcggtatgccgatcctcaccggctcgctgatccgtatcgtgctcggcatctggacgaaccgctatggcggcaggctcgtctatacggtcaccatgctggcggccgcactttcgaccttcctccttgcccatgcgacgacctatcccgagatgctgctcgccggcctcggcgtcggcttggccggcggctccttcgccgtcggagtcgcctatgtctcgccgttcttcccgccggaaaagcagggtacggcgctcggcatcttcggtgccggcaatgtcggcgcggcggtgaccaagttcctcgcgccgttcgtgctcgtcgcctatggctggcagatggttgcgcaggtctgggccgccggacttttgcacaccgccgtcgtcttctggttcacgaccgaagacgacccgaagttccgcgcccgtcgcgagacaagccagccgcgcaagagcttcctcagtgaattcgccccgctcaggaacgtccaggtctggcgcttctcgctttactacttcttcgccttcggcggcttcgtcgccctggcgctgtggctgccgcgctacctcgttggcgtctatggtttcagcatcgagacggcgggcatgatcgcagccgcctattccattcccggcagcattttccgcgcctatggcggcgcgctttccgacaggatcggcgcgcgcaagatcatgcatgcgatgttcgccgtgtccgccgtggcaacgctcattctctccgtgccggagggcggcgccgtgctgcacatcactccggttgttttcgtcggtgcaactttcgtgctcggcttcgtgatgagcctcggcaaggcggccgtctacaagcacattccggcctactatccggagcatgtcggcgcagtcggcggcgttgtcggcatgatgggtggccttggcggcttcatcctgcccgtcgccttcggtttcctcaaggactggaccggcctctggtcgagctgtttcatgctgctcttcgcgatcgttgcgatctcgatgatctggatgaacgcgtcgatccgccagtacaagcggcgtgccgttgagagtgcgccggccggtgcctaa

SEQ ID NO: 28497 - protein, 417 aa, Rhizobium sp
MSTVHQTKNISATEQGRALWISTAAFTICFAVWTIFSIIGVRIKQELGLSEAQFGLLIGMPILTGSLIRIVLGIWTNRYGGRLVYTVTMLAAALSTFLLAHATTYPEMLLAGLGVGLAGGSFAVGVAYVSPFFPPEKQGTALGIFGAGNVGAAVTKFLAPFVLVAYGWQMVAQVWAAGLLHTAVVFWFTTEDDPKFRARRETSQPRKSFLSEFAPLRNVQVWRFSLYYFFAFGGFVALALWLPRYLVGVYGFSIETAGMIAAAYSIPGSIFRAYGGALSDRIGARKIMHAMFAVSAVATLILSVPEGGAVLHITPVVFVGATFVLGFVMSLGKAAVYKHIPAYYPEHVGAVGGVVGMMGGLGGFILPVAFGFLKDWTGLWSSCFMLLFAIVAISMIWMNASIRQYKRRAVESAPAGA

SEQ ID NO: 28498 - DNA, 1311 bp, Halobacterium mediterranei
  CDS (1)..(1311): transl_table=11
atgggtctcgtcaagatgactcggtggcggacgctcgtcctcgccaccgcggcgttcaacctctcgtttctcatctggttctcgttcgccccgttcacggggcaaatcgccgcggagttcggactctcgctcaccgacctcggcattctcgccagcgcgcatctggtcggcccgccggggcgtattctcactggctggctctcggaccgcttcggcgcttcgacggtgttcggtatcgtcctcgcctacgtcggcatattcagcatggccagcgcgttcgcgacctcgtacgaggtgttcttcgtcgaacgggtcgtcgtcgcctcggcgggtatcaccttcgtcgtcggtatccagcacgtctcccagtggttccccgaggaggaactcgggactgccgagggcatctacgcgggtatcggcaatgccggtgccgcggggggtgcgctcatcctcccgcgggcgttcgggaactggagcggcccgctgttttcgaccgggtggcgcgcggcgttcttctacaccggtgtcgtcgccatcctgatggccatcgtctacgtcgttttcggacaggacgccgccacgaaagcccgtgcagcggccaccagcgagtcggcgacgctctcgacgtgggtccacacagcgacccgctacggcgtcgtcgcgctcgcactcggctacgtgatgagcttcgggctcgaaatctcgatgaacggctggcttccgacgtacttccgcgaaggattcggttcgaacctcgtcatcgccagcaccttcgcggcgacgttctcgctcgctgccgggttgcttcggccaatcggcggctacgtctccgaccgcctcgttcgcgaccagcgcgacattctcccgttcttcgcgggtcgctaccgggagcagtggactgtcctctgcatgacgttcatcgtcgtctcgatgaccggactcaccttcgcagggcagactggaaacgtcctcctgaccgtcgcagctggcttcctcgtcgggatgagttgcgcgttcacggagggtgcgatattcgcgcaagtccctgccatgttcccgaaccggtcgggcgctgccgccggtatcgtgggcggaatcggaaccttcggcggcatcggattcccgctcgtctactcgttcgccgccgcggaagggatgattcacacgggctacgtcatcgtggcggcgctcatgattccgatactcgcgttgaacgcgttcatctcgcgtccgcatatcgcgagtcgcgcccacgtggacggcttcttcgacgggagtcgcttcgagtccagtcagagcgacgactga

SEQ ID NO: 28499 - protein, 436 aa, Halobacterium mediterranei
MGLVKMTRWRTLVLATAAFNLSFLIWFSFAPFTGQIAAEFGLSLTDLGILASAHLVGPPGRILTGWLSDRFGASTVFGIVLAYVGIFSMASAFATSYEVFFVERVVVASAGITFVVGIQHVSQWFPEEELGTAEGIYAGIGNAGAAGGALILPRAFGNWSGPLFSTGWRAAFFYTGVVAILMAIVYVVFGQDAATKARAAATSESATLSTWVHTATRYGVVALALGYVMSFGLEISMNGWLPTYFREGFGSNLVIASTFAATFSLAAGLLRPIGGYVSDRLVRDQRDILPFFAGRYREQWTVLCMTFIVVSMTGLTFAGQTGNVLLTVAAGFLVGMSCAFTEGAIFAQVPAMFPNRSGAAAGIVGGIGTFGGIGFPLVYSFAAAEGMIHTGYVIVAALMIPILALNAFISRPHIASRAHVDGFFDGSRFESSQSDD

SEQ ID NO: 28500 - DNA, 1650 bp, Physcomitrella patens
  CDS (1)..(1650)
atggcagaccagacaacatcggcggtgggacatgggggaaggactgttcccggcatgtccatgcacggtgtgacaggaaaagagcctgtgtatgcattctcagtgattcaaggaactgtagaggaccccgacgctgagaagtttgcgctcccggtggactctgagcacaaggcgaaaacaatccgagtttacagtttcgcaaagccacacatgcgcgcctttcatctcgcttgggtgtctttctttacatgtttcttggcaaccttcgcgtcgccgcccctgatgccgatcatccgtgacaacttgaatttgaccaaaaccgacgttggacatgctgccatcgcctcagtatctggttctatcctgtctcgtctgctgatgggaaccgtgtgcgacgtggttggaccccgatatggctgtgcattcctgattatgataatttcgccagccgtgtactcaatggctcttgtttcagatgccgcgagctttataatagtccgattctttaccggtttcgctctagccaccttcgtctcttgccaattttggatgagctccatgttcaacagcaagatcgtcggcacagctaatgggctggccgcgggttggggcaacctcggtggtggcgctactcagctcatcatgcctctggttttcgcgttaatccgagacagcttcaactctacaccgttcgttgcatggcgcctggcctttttcttacccggagcgatgcagacaattatggggctcctcgttctatttctcggccaagatcttcccgacggcaactattctcagttgcagaaacaaggcgtcaaagtgaaagatagctttctaaaggtcttgatgtacgcaattacaaattacagaacatgggtgttctttctgttgtatggattcaccttcggcgttgagctgacagtcaacaacaacatcgctgagtacttctatgaccgcttcgatttgaatctctccacagctggaataatcgcttcattattcggcttgatgaactttttcgctcgtccaagtggtggaatcatctccgatactgttgcgcgccgttttggaatgaaaggtcgcctgtgcacgctgtggatatgccattcacttggggcagtcttctgcattgtgcttgggaggatggacagtttgactgccgccatagccgtcttgatcgtcttcgcggttttcatccaggcttctagcggggctgtttttggcataatcccttttatctcacggagatcacttggtgtgatttcgggattcactggcgcaggagggaatgtaggctccgtggtactgcaaacagtattcttcacatcgggttcgtatcgaaccgaagaaggcatccagttcatgggtgtgatggtcatctgtgtcgccgcgctaacagtatttatctatttcccccagtggggagggatcttctttcctccatccaaaagcaccgaagaagattactacgcctccgagtggagtgccgaggagcaggagcaagggaagcatgcaacaagcatgaaattcgcctctaatgcgagaagcgagcgtggaaagagaggtctgaattctcccgatttgaccatccatcccgttactgattccaaggccaccccagtttctgacgttgagctcaacaaagtgtaa

SEQ ID NO: 28501 - protein, 549 aa, Physcomitrella patens
MADQTTSAVGHGGRTVPGMSMHGVTGKEPVYAFSVIQGTVEDPDAEKFALPVDSEHKAKTIRVYSFAKPHMRAFHLAWVSFFTCFLATFASPPLMPIIRDNLNLTKTDVGHAAIASVSGSILSRLLMGTVCDVVGPRYGCAFLIMIISPAVYSMALVSDAASFIIVRFFTGFALATFVSCQFWMSSMFNSKIVGTANGLAAGWGNLGGGATQLIMPLVFALIRDSFNSTPFVAWRLAFFLPGAMQTIMGLLVLFLGQDLPDGNYSQLQKQGVKVKDSFLKVLMYAITNYRTWVFFLLYGFTFGVELTVNNNIAEYFYDRFDLNLSTAGIIASLFGLMNFFARPSGGIISDTVARRFGMKGRLCTLWICHSLGAVFCIVLGRMDSLTAAIAVLIVFAVFIQASSGAVFGIIPFISRRSLGVISGFTGAGGNVGSVVLQTVFFTSGSYRTEEGIQFMGVMVICVAALTVFIYFPQWGGIFFPPSKSTEEDYYASEWSAEEQEQGKHATSMKFASNARSERGKRGLNSPDLTIHPVTDSKATPVSDVELNKV

SEQ ID NO: 28502 - DNA, 1353 bp, Corynebacterium glutamicum
  CDS (1)..(1353): transl_table=11
atgaagaggcatcacgtgacacaactcaacaccaaaggcgttgttctgcaagggtgggatccagaagatcctgaacattgggactcgaaaattgcatggcgaaccctgtggattaccaccttctccatgattattgggttctgcgtgtggtatttggtttctgccatcgctcccctactcaatcgaattggatttgatctctcagcaggtcagctttattggctcgcatctatccccggtttggccggcggattaatccgattgatttacatgttccttccaccgattcttggaacccgcaaattggtcggaatttcctccggtctatttttgatccccatgtttgggtggttcctggctgtccaagattcaagcactccctactggtggcttctcacactcgctgcactcactggcattggtggtggcgtgttctctggatatatgccgtccacgggatacttcttccccaaggcaaaatcgggcactgcgctgggcattcaggcaggtatcggcaacctcggcgtctcgataattcagttcatgggcccatgggtcatgggtttcggtctgctgggcattggtttcctcaccccgcagcgcaccattgaaggcaccacggtgtttgtgcacaatgctgcgattgtgttggtcccgtggactattctcgcggccgttttatccttcctgtttcttaaagatgtcccagtcaccgcaaatttccggcaacagatcgatatctttggcaacaagaacacatggattttgtccattatctacttgatgacattcggtgccttcgccggtttcgccgcgcagttcggtctgatcatcaacaacaacttcggcatcgcttccccgatggcagagacttatccagctgagatgcttcacgccggtgctacgttcgcgtttcttggacctttgattggtgctttggtgcgtgctgcatggggtccactgtgtgacagattcggtggagctatctggacctttgtcggtggcatcggaatgactatcgccactgcagctgccgcaatcttcctaagcagagcggagacacctgatgatttctggccattcctgtggtccatgcttgccctgttcttcttcaccggtctgggcaatgctggcaccttcaaacaaatgcccatgattttgcctaaacgccaagcaggtggcgtgatcggctggaccggtgccattggtgccttcggccccttcattgtcggtgtcttgctctccttcactccaactgtcgcgttcttctggggctgcgtggtgttcttcatcatcgccaccgctttgacctggatctactacgcccgcccgaacgctccattcccgggataa

SEQ ID NO: 28503 - protein, 450 aa, Corynebacterium glutamicum
MKRHHVTQLNTKGVVLQGWDPEDPEHWDSKIAWRTLWITTFSMIIGFCVWYLVSAIAPLLNRIGFDLSAGQLYWLASIPGLAGGLIRLIYMFLPPILGTRKLVGISSGLFLIPMFGWFLAVQDSSTPYWWLLTLAALTGIGGGVFSGYMPSTGYFFPKAKSGTALGIQAGIGNLGVSIIQFMGPWVMGFGLLGIGFLTPQRTIEGTTVFVHNAAIVLVPWTILAAVLSFLFLKDVPVTANFRQQIDIFGNKNTWILSIIYLMTFGAFAGFAAQFGLIINNNFGIASPMAETYPAEMLHAGATFAFLGPLIGALVRAAWGPLCDRFGGAIWTFVGGIGMTIATAAAAIFLSRAETPDDFWPFLWSMLALFFFTGLGNAGTFKQMPMILPKRQAGGVIGWTGAIGAFGPFIVGVLLSFTPTVAFFWGCVVFFIIATALTWIYYARPNAPFPG

SEQ ID NO: 28504 - DNA, 1284 bp, Paracoccus halodenitrificans
  CDS (1)..(1284): transl_table=11
atgccacacctccccgaccgccgcgatcctgtcgtcgtcggctaccgcccgctggtggtggtattgctgtcgccgctggtctttgcgctggtgttcgccagctggaccatcttcgcggtgctggggctggagctgcgcgagccgctgggtctggatgaactcggcttcgccttcatgctggccacgcccatgctcaccggggccctggcggcgctacccatggcggcactggcccggcgtcatggcgggcgccgcgtgatgatcgcctgcctgttgctgatctgtcccttcctgtgggcgatcgcccgctccagcagctattcacacttcctgctgtccggcgccggcctggggctgggggccgggtctctggcggcggggctggtctatgtcggcgagctctcgccccggcggcatgttggcctcgccctgggcctctacggggccggcatgatgggggccggactgagctatctgctgctgcccctggtcagccaggcctatggctggcgcagcgcccccctgctctatctgctgccggtgctgacggtcgcgacgctgttgtggctgtttgccgatgacccggacctctccgtcgactctggcctcgccggcgtcgccgccggtacccggccgcgcctctcggggtggctgagggccttgcgacactggcgcccctggcgcctggccgtggtctacagcttcttctatggcgccttcgtggcgctgtcgctatggctgccggcctacctcgaggcccagtacgacctgggcatccgctacgccgccctgctggcgctgccctttccgctggcggtgggcttggggcaggtggccggcggcgtctggggcgatgtgcacgactttcgtgccttgcgctggtgggtcagcgcctgggtgctggtctgcctgtttctgctctcttatccccccttcgacatgcgggtcgagggcgtggaggggatgctgatgctgcgttattccgcgccgctgtggggctttctgacgctgctggtcgccatgggtctggtcatgggggtcgggcagggcagcctgatgcgcatgatccatcgtgatcacggccagcagctggccctggtgggtgggctggcgctgaccctgggcgggctgtttggcgccctgctgccggtgatgttcgccctgggcaaccactgggtgggcatccgcaccgcagggttcatgttcctctatgcctcgctggtgctgtgcatgctggtgatggtgtgggaccacgccagccaggcagggcagacgaggccctga

SEQ ID NO: 28505 - protein, 427 aa, Paracoccus halodenitrificans
MPHLPDRRDPVVVGYRPLVVVLLSPLVFALVFASWTIFAVLGLELREPLGLDELGFAFMLATPMLTGALAALPMAALARRHGGRRVMIACLLLICPFLWAIARSSSYSHFLLSGAGLGLGAGSLAAGLVYVGELSPRRHVGLALGLYGAGMMGAGLSYLLLPLVSQAYGWRSAPLLYLLPVLTVATLLWLFADDPDLSVDSGLAGVAAGTRPRLSGWLRALRHWRPWRLAVVYSFFYGAFVALSLWLPAYLEAQYDLGIRYAALLALPFPLAVGLGQVAGGVWGDVHDFRALRWWVSAWVLVCLFLLSYPPFDMRVEGVEGMLMLRYSAPLWGFLTLLVAMGLVMGVGQGSLMRMIHRDHGQQLALVGGLALTLGGLFGALLPVMFALGNHWVGIRTAGFMFLYASLVLCMLVMVWDHASQAGQTRP

SEQ ID NO: 28506 - DNA, 1593 bp, Paracoccus halodenitrificans
  CDS (1)..(1593): transl_table=11
atgaccaggaagaatgccgacatcgaaaggtgggatgtcgagaacgaggagttctgggaatcggagggcaagcgagtcgccaaccgcaacctctggatctccattcccagcctcctgctgggcttcgccgtctggctgatgtggggcatgatcaccacccagatgcagaacctgggcttcccgttctcggtggatcagctgttcacactgaccgcgatcgccggcctcgccggcgccaccctgcgtatccccgcatcgttcatgatccgcatcgccggcggtcgcaacaccatcttcctgacgaccgccctgctgatggtccctgccctggggaccggcatcgcgctgatgaccccccagacgcccttctgggtgttccaggtgctggcactgctctcgggcatcggcggcggcaacttcgccaactcgatgagcaatatctccaacttcttccccaagaagcagcagggctatgccctgggcatgaatgccgggctgggcaacttcggcgtcaccaccatgcagatcctgattcccctggtgatgaccgtgggcctgttcggtgccttcggcggcgatgccatggagcttgagaaggccagcggcacgctgatcggtcgcatcgaggcgggcaccgacacctggatccagaacgccggtctcgtgtggatgctgctattgatcccgctggccttcgccggctggttcggcatgaacaacctgcgcaccatcacgcccaactccggctcgcccctgcaggccttcggcaagattctcggcctctacggggtcggcgtcgtgacctccatcgtcggcgtggtagcgctgggctatctcaacatgtgggtcgccctgccgctgaccatcgtgctgaccgtggtgctgctgcgcctgatccccggggatatcaagcccgccatcaagaagcagttcgagatcttctccaacaagcacacctggtcgatgacggtgctctatatcgccaccttcggctcctttatcggcttctccgcggccctgcccctctccatctccgtgatcttcggcaacatgatggaagtggccgccgatggcagcatggtccgggtcgccaaccccgacgcccccagcgccctgacctgggcctggatgggccccttcgtgggcgccctgatccgcccggtgggcggctggatctccgataagctgggtggctccatcgtgacccaggtcatcaccgccatcatggtggtgggctccgtggccgccggctacgtcatgatgctggcctacaactccaccgaccccaaccagtatttctggatgtttctgctgctgttcatcctgttgttcgccgccagcgggatcggcaacggctccaccttccgcagcatcggcttcatcttcgacccacagcagaagggcccggcgctgggctggacctctgccgtggccgcctatggctcctttatcgccccccgggtcatgggcgagcagatcaaggccggcacgccggaactcgccatgtacggcttcgcggttttctatgccgtctgcctgctcgtcaactggtggttctacctgcgccccggcgcctatgtgaagaacccctga

SEQ ID NO: 28507 - protein, 530 aa, Paracoccus halodenitrificans
MTRKNADIERWDVENEEFWESEGKRVANRNLWISIPSLLLGFAVWLMWGMITTQMQNLGFPFSVDQLFTLTAIAGLAGATLRIPASFMIRIAGGRNTIFLTTALLMVPALGTGIALMTPQTPFWVFQVLALLSGIGGGNFANSMSNISNFFPKKQQGYALGMNAGLGNFGVTTMQILIPLVMTVGLFGAFGGDAMELEKASGTLIGRIEAGTDTWIQNAGLVWMLLLIPLAFAGWFGMNNLRTITPNSGSPLQAFGKILGLYGVGVVTSIVGVVALGYLNMWVALPLTIVLTVVLLRLIPGDIKPAIKKQFEIFSNKHTWSMTVLYIATFGSFIGFSAALPLSISVIFGNMMEVAADGSMVRVANPDAPSALTWAWMGPFVGALIRPVGGWISDKLGGSIVTQVITAIMVVGSVAAGYVMMLAYNSTDPNQYFWMFLLLFILLFAASGIGNGSTFRSIGFIFDPQQKGPALGWTSAVAAYGSFIAPRVMGEQIKAGTPELAMYGFAVFYAVCLLVNWWFYLRPGAYVKNP

SEQ ID NO: 28508 - DNA, 2718 bp, Paracoccus pantotrophus
  CDS (1)..(2718): transl_table=11
atgccggacccaagttccttttccccgatgcagcagcaaaaggcgctgtggctcagcaccaccgccttcacgctgtgctttgccgtctggacgatcttttccatcatcggcatcaccatcaaggaggagctcggcctgaccgagttcgaatatggggtgctgatcgccacgcccatcctgaccggatcgctggtccggctgatcctgggcgtctggaccgaacgctatggcggccgcctggtgttctcgttgcagatgctgttcaccggccttgccacctgggcgctgacctgggccgacagctatgccggcttcctgctggcggctttgggcgtgggcatggcgggcggcagcttcatcatcggcgtcgcctatgtctcgaaatggttcccggcccagcgccagggcactgcgcttggcatcttcggcatgggcaacgtgggcgccgcggtcacgaagttcatcgcgcccttcatcctggtcgcctggggttggcaggccgtggcgcagatctgggcggtgggcatcgcgctgatgggcgtggtcttcctgctggtcgcccgcgacgatcccgatttcgaggcgcgccgtgcccagggcatcgccgggccgacactggccgagcagttcgcgccgctcaagaagctccaggtctggcgcttcgcgctttactatttcttcgtcttcggcggcttcgtcgccctggcgctgtggctgccgcattacctgacgcaggtctatggcgtcgatctgcgggtcgcgggcatggcggcggcggccttcagcctgtcggccagcatcttccgcgcctatggcggcatcctgtccgaccgtttcggcgcgcgcacggtgatgtactggaccttcggcttcagcgcgctgttcctgttcatgctgtcctatccgccgaccgattacaccatccgcggcaaggacgggctgatctcgttctcgaccgagatggggctctggcccttcgtggtcacgttgtttgcgctgggcttcttcatgagcctgggcaaggccgccatcttcaagcacatcccggtctattatccgaaccatgtcggggcggtcggcgggcttgtcggcatgatcggcggcctgggcggctttgtgctgcccatcgtcttcggtgcggcgctggacctgaccgggatctggacctcgtgctttgccctgcttttgctgatcgtcgtcgtctcgatggcctggatgcacctgtcgatccgcgccatggagcgccgtgcccagggccgggccctggaccggctgccgaactttcccgaactggccgaggtgcatgaccctgagcgcacggtgatgccgcgcgtgctggacgactggcgccccgagaacccgaccttctgggccgagcagggccgcaggatcgccaggcgcaacctgtggatctcgatccccgccctgacgctggccttcgcggtctggatggtctggtcggtggtggtggccaagctgccgctgatcggcttcggcttcacccaggaccagctgttctggctggcggcgctgccggccctgtcgggcgccaccgtgcgcatcttctacagcttcatggtgccgatcttcggcgggcggctgtggacgacgctgtccaccgcctcgctgctgatcccggccatgggcatcggctatgcggtgcaggatcccgcgacgccttatgtgatcttcgtggcgctggcgctgctgtgcgggctggggggcgcgaacttcgcctcgtccatggccaatatcagcttcttcttcccgaaatcggaaaagggcaacgccctggggctgaacgcgggcctgggcaacctgggcgtatcgctgatgcagttcctggtgcccatcgtcatcaccatgggcgtctttggcgccatgggcggcgcggcgcaggagctttcggacggcagccggctgtggatgcagaacgcgggcttcatctgggtgcccttcatcatcgcctcgaccattgcggcctggctggggatgaacgacatcaccgatgcccgcgccagcttccgcgaacaggcggtgatctttacccggctgcacaactgggtgatgtgcctgctttacatcggcaccttcggcagcttcatcggctattctgccggcttcccgctgctcatcaagctggccttcccggacgtcaacgcgctgcaattcgtgttcctgggcccgctggtcggcgcgctcagccgcgcgggcacgggctggctttccgaccgggtcggcggcgggcgcgtgaccttctgggtcttcgccggcatgatcgcctcggtcgggctggtgatcgtctcgctgcaggcgctgtccttctggggcttcttcgcgggcttcatggcgctgttcttctttaccggggtcggcaattcctcgaccttccagatgatcccggtgatcatgcgcaaggaagtcgcccggcttgagccgcagctgtcccccgaggatcgccgccgccagtccgaccgcgaatccgccgcgatcatcgcattcaccagcgcgatcggtgcctatggcggcttcttcatccccaaggcctatggcagttcgatcgccctgaccggatcggcgatcggcgcgctctgggccttcctgggcttctacgtgctctgccttgccgtgacctgggtgttctacacccgtccgggcggccttctgcacgacatcgaacgcggccgcgcctctgccggcgccgcctcccctgcctga

SEQ ID NO: 28509 - protein, 905 aa, Paracoccus pantotrophus
MPDPSSFSPMQQQKALWLSTTAFTLCFAVWTIFSIIGITIKEELGLTEFEYGVLIATPILTGSLVRLILGVWTERYGGRLVFSLQMLFTGLATWALTWADSYAGFLLAALGVGMAGGSFIIGVAYVSKWFPAQRQGTALGIFGMGNVGAAVTKFIAPFILVAWGWQAVAQIWAVGIALMGVVFLLVARDDPDFEARRAQGIAGPTLAEQFAPLKKLQVWRFALYYFFVFGGFVALALWLPHYLTQVYGVDLRVAGMAAAAFSLSASIFRAYGGILSDRFGARTVMYWTFGFSALFLFMLSYPPTDYTIRGKDGLISFSTEMGLWPFVVTLFALGFFMSLGKAAIFKHIPVYYPNHVGAVGGLVGMIGGLGGFVLPIVFGAALDLTGIWTSCFALLLLIVVVSMAWMHLSIRAMERRAQGRALDRLPNFPELAEVHDPERTVMPRVLDDWRPENPTFWAEQGRRIARRNLWISIPALTLAFAVWMVWSVVVAKLPLIGFGFTQDQLFWLAALPALSGATVRIFYSFMVPIFGGRLWTTLSTASLLIPAMGIGYAVQDPATPYVIFVALALLCGLGGANFASSMANISFFFPKSEKGNALGLNAGLGNLGVSLMQFLVPIVITMGVFGAMGGAAQELSDGSRLWMQNAGFIWVPFIIASTIAAWLGMNDITDARASFREQAVIFTRLHNWVMCLLYIGTFGSFIGYSAGFPLLIKLAFPDVNALQFVFLGPLVGALSRAGTGWLSDRVGGGRVTFWVFAGMIASVGLVIVSLQALSFWGFFAGFMALFFFTGVGNSSTFQMIPVIMRKEVARLEPQLSPEDRRRQSDRESAAIIAFTSAIGAYGGFFIPKAYGSSIALTGSAIGALWAFLGFYVLCLAVTWVFYTRPGGLLHDIERGRASAGAASPA

SEQ ID NO: 28510 - DNA, 1266 bp, Pseudomonas fluorescens
  CDS (1)..(1266): transl_table=11
atgcgagcacaagtgcaacaagggctggtactagggatgagtaccttggccttcaccgtgtgcttcatggtctggatgatgtttgccgtgctcggcgttccgatcaaggaattgctggccctcaacgaaacccaatttggcctgttggccgccacgccggtactcaccggttctctggtacgtttgcccctggggcttctgaccgaccgctttggcggacggatcgtgttcttcctgctgatgctcgcctgcgtgttgccgctgtacctgatcaccctcgccacggcctattggcagttcctggtgctgggcctgttcgtcggcctggccggcggctcgttctcggtgggcatcgcctacgtcgccaaatggttcgataagcagaaccagggtttcgccatgggcgtgttcggtgcgggcaacgccggtgcggcggtgaccaagttcctcgccccggcgctgatcgcgttcggaacctggcacctggtgccgaaggtgttcagcgcgatcctgttcatcacggcattactgttctggtttctcaccgccgagaaaaaagaacaccgcaatgccggcggcgccacgttgcgtgagcaactcaagtcactgaaagatcctgcggtgtggcgctactgccagtactactcgatcgtgttcggcggctacgtggccttggcgttgtggatgaccaagtactacgtgcaggaatacggcttcagcctgcaaagcgcggcgctgttggcggcgtgtttttccttgcccggtggcgtgctgcgggccgtcggtggctggatgtccgaccgttggggcgcccagagcgtgacctggtgggtgctgtgggtgagttggatctgcctgttcctgctgtcctatccgcaaacccagctgcaagtgcaaaccgtcaacggcatcgttgattttcacatcggcctcaacgccacgctgttccctgtgatcctgttcgtgatgggcatcgccttcgcgttcggcaaggcctcggtcttcaagtacatcgccaacaactacccgcagaacatgggcgcggtgtccggcatcgtcggcctggccggcggcctgggtggtttcgtgctaccgatcatgtttggcgccctggtggacctcaccggcgtgcgctcgtcctgcttcatgttgctgtacggcgtggtctgggtctcgttgatctggatgtacctgagcaaagtgcacaagcgcccgctgctgggtaaacaaccgccggccagccaatccccgttttccagcatttga

SEQ ID NO: 28511 - protein, 421 aa, Pseudomonas fluorescens
MRAQVQQGLVLGMSTLAFTVCFMVWMMFAVLGVPIKELLALNETQFGLLAATPVLTGSLVRLPLGLLTDRFGGRIVFFLLMLACVLPLYLITLATAYWQFLVLGLFVGLAGGSFSVGIAYVAKWFDKQNQGFAMGVFGAGNAGAAVTKFLAPALIAFGTWHLVPKVFSAILFITALLFWFLTAEKKEHRNAGGATLREQLKSLKDPAVWRYCQYYSIVFGGYVALALWMTKYYVQEYGFSLQSAALLAACFSLPGGVLRAVGGWMSDRWGAQSVTWWVLWVSWICLFLLSYPQTQLQVQTVNGIVDFHIGLNATLFPVILFVMGIAFAFGKASVFKYIANNYPQNMGAVSGIVGLAGGLGGFVLPIMFGALVDLTGVRSSCFMLLYGVVWVSLIWMYLSKVHKRPLLGKQPPASQSPFSSI

SEQ ID NO: 28512 - DNA, 1332 bp, Thermus thermophilus
  CDS (1)..(1332): transl_table=11
atgctgaagtccgccaagggaacctggattacggattggaaccccgaggaccccaagcgttgggacccggccctggcttggcgcaccctctggatcaccaccttcaacctcaccctgtccttcatcacctggtacgtggtgagcgccctggtggtgcgcctacccaaggtggggtttgagctctccaccacccagctcttctggctcacggccatgccggggctggccgggggcaccctgcgcatcatctggaccttcttgccccccatcttgggcacccgccacctggtcaccttttccaccctcctccttctcatcccgcttctgggctggggcttcgccgtgcagaacaccgggaccccttactgggttctcctgctcctggccttcttggcgggcatcgggggagggcacttctcggggtacatgccctccaccagctatttctttcccaagcgcctccaggggacggccttgggcttgcaggcggggatcggcaactttggggtttccatcgtccagttcgtgaccccctggatcatcggcttcgccctcttcggctccctcctgggtgggccccagaccttcacccccaagcccggggttgtcccagcccatctggctccagaacgccaccttcgcctgggtgcccttgtcctcttgggggcgctcttggcctgggtctatctgaaaagcgtgcccatccgggccaacttccgcgagcagtttgacatcttccgcgacaatcacacctggatcatgaccaccctttacatcatcaccttcgggtccttttccgggttctccgccatcttccccctcctcatccgcgaggtctacgggaagtttgaaggggctcccgatcccttgcggtacgccttcctggggcctttggtgggttccttggcccgggtgatcgccggggccatctccgaccgcctgggcggggccatcgtcacccaggtttccgccatcggcatcttcctctccgcccttctggtcaccctctacacccggcccacctccttggaccagttccccatgttcgtggtggccatgctcctgatcttcttcttcagcggggtggggaatgccagcaccttcaagcagatgcccatgatctttccgccccgccaggcggggggagttatcggctggaccgcggccgtcgccgcctacgggcctttcctcttctccaccctggctgcctatacccagcaggccacgggaggcttcaccgccttcttctacgggctcatggtcttctacgccttcaacttcttcctgaactggtactactacgcccgcaagggggcggagaagccctgctaa

SEQ ID NO: 28513 - protein, 443 aa, Thermus thermophilus
MLKSAKGTWITDWNPEDPKRWDPALAWRTLWITTFNLTLSFITWYVVSALVVRLPKVGFELSTTQLFWLTAMPGLAGGTLRIIWTFLPPILGTRHLVTFSTLLLLIPLLGWGFAVQNTGTPYWVLLLLAFLAGIGGGHFSGYMPSTSYFFPKRLQGTALGLQAGIGNFGVSIVQFVTPWIIGFALFGSLLGGPQTFTPKPGVVPAHLAPERHLRLGALVLLGALLAWVYLKSVPIRANFREQFDIFRDNHTWIMTTLYIITFGSFSGFSAIFPLLIREVYGKFEGAPDPLRYAFLGPLVGSLARVIAGAISDRLGGAIVTQVSAIGIFLSALLVTLYTRPTSLDQFPMFVVAMLLIFFFSGVGNASTFKQMPMIFPPRQAGGVIGWTAAVAAYGPFLFSTLAAYTQQATGGFTAFFYGLMVFYAFNFFLNWYYYARKGAEKPC

SEQ ID NO: 28514 - DNA, 1308 bp, Thermus thermophilus
  CDS (1)..(1308): transl_table=11
atgatccacgatcctgcccaactggaaaaggagcgccccgaccgcttgagggtcctctggctttccaccttggccttcaccctcatgttcgccgcttggctcatgttcggcgtgctgggggtacccatccgcaaggagttcggcctctccgacgtgcagctttcctggatctccgccctggccatcctcaatggctccctttggcgcctcctagcgggcattctcgccgaccgctacggggggcggctggtcttcaccctcatgctcttcttcaccgccatccccgcctacctggtttcccgggcggggagctacgaggagctcctcctctacgccttcttggtgggctttgcggggaacagcttcagcgtgggcatcgcctggaactccgcctggttccccaaggaccagcagggctttgccctgggggtgttcggggcgggcaacgtgggggccagcgtcaccaagttcatcggcccggccctcatcgccagcgttcccgcctcggggtatttgggggggctcattcccggggggtggcgcttcatccccttcctctacgcggtgctcctggtgctgatgggcttcgtcctgtggttcggcactccccggaaggacaagcgcccggggcagggaaggcccttcctggacatgctaaagcccctccgctacgtgcgggtgtggcgcttcagcctctactacgtggtggtctttggggcctacgtggcccttagcgcctggcttcctaagtactacgtggacgtcttcggcctgcccctgcacgaggcggctctgctcaccgccctcttcatcttccccgcgagcctccttaggccggtggggggctacctttccgaccgcttcggggcgcggcgcatcatgtactggaccttcggcatcatcctcctggcctcgggggtgctgatgatgcccgaagggcacatcgtcctctacaccaagcaaggggccaaggaggtgatgcagttcaccatgggcgtggagctcttcaccctcctggtcttcctcatcggcgtggggatggggatcggcaaggccgcggtctacaagcacatccccacctacttcccccaggacgtgggggcggtgggcggcctcgtggggatgctgggggccctggggggcttcttcctcccgccccttttcgcctacgcccaggcctggaccggtctgccccagatgaccttcttcgtcctcttccttctcgccgccatcagcttcctctggatgcacctcaccgtcctaaagctcttgcagcaggaggcccagcacctcaagaaacgactttga

SEQ ID NO: 28515 - protein, 435 aa, Thermus thermophilus
MIHDPAQLEKERPDRLRVLWLSTLAFTLMFAAWLMFGVLGVPIRKEFGLSDVQLSWISALAILNGSLWRLLAGILADRYGGRLVFTLMLFFTAIPAYLVSRAGSYEELLLYAFLVGFAGNSFSVGIAWNSAWFPKDQQGFALGVFGAGNVGASVTKFIGPALIASVPASGYLGGLIPGGWRFIPFLYAVLLVLMGFVLWFGTPRKDKRPGQGRPFLDMLKPLRYVRVWRFSLYYVVVFGAYVALSAWLPKYYVDVFGLPLHEAALLTALFIFPASLLRPVGGYLSDRFGARRIMYWTFGIILLASGVLMMPEGHIVLYTKQGAKEVMQFTMGVELFTLLVFLIGVGMGIGKAAVYKHIPTYFPQDVGAVGGLVGMLGALGGFFLPPLFAYAQAWTGLPQMTFFVLFLLAAISFLWMHLTVLKLLQQEAQHLKKRL

SEQ ID NO: 28516 - DNA, 1449 bp, Cylindrotheca fusiformis
  CDS (1)..(1449)
atgagtggaactgatgttgcaactggtgctcctgccgaatggaagaagtaccaagagtactcccttgacgtcgatcccgatcaagacgaccgggccactgagatcaagctatgtaacttctctcggccccatatgagagctttccatttctcatggattggattcttcattgccttcttcatctggttcgccatcgctccccttctcagtgagatccaagatactcttgacttggacaagaaggaagtctggacttcatctattgtcggtgtcggaggtacaattttcatgcgtttccttctaggaccgttctgcgacaagatcgggccccgagtcctcttcacctttgtcctttgcttcgcttctattcccactgcctgtaccggatttgtcaactctgccacttcccttgccgtcctccgattgttcattggaactgctggaggtactttcgtcatgtgccaatattggactagccgaatgttcacaaagcaagtggtcggaactgccaatgctcttgtcggtggatggggaaatcttggaggaggtgtcacgcagcttgtcatgggatcagcgttgtttccactgttcaaggaaatcttcaagaacgagcctgaccccgctgagactgcgtggcgatgggtttctatcgttcccgccgtcgttgcattcgcaattggtctcctaattttcttctattccgacgatgcgcccaagggaaactaccacgagatgaagaagaatggggccatggccgatgtttccgccgccgcttccttccgcaccggagcactcaacctcaatacttggtttttgttcatccaatacgcatgctgcttcggtgtggaactgaccatgaacaacgccgccgttctgtacttcaaggagaagttctcgctgaccactgaagaagcggccgccattgcctccatcttcggatggatgaatcttttcgcccgtggcgctggtggattccttagtgacaaggccaacgccaggatgggaatgcgtggacgcctttggactcagaccatcttgctggcttgtgagggtgctcttgtcttggtttttgccaacacaggatcgttgacgggagccattgtcgttatggtcttcttttctctattcgtccaagccgctgaagggtcctcttatggaatcgtcccctacgttgacccacccgccactggagctattgccggtatcattggagctggaggaaacactggagccgtcgcttttggaatgggattccgtcagttggactacaaagatgctttcatcatcatgggagccgtcatctgtgcgtcttctgtcttgtcagtcttcatctgcatccccggatcgtctagaatgattggaggagaagcggatgatgtcggtgccaaggaccccactttgtcggttcccgaacctgatacccagaagactcaggatgtcaatgcctaa

SEQ ID NO: 28517 - protein, 482 aa, Cylindrotheca fusiformis
MSGTDVATGAPAEWKKYQEYSLDVDPDQDDRATEIKLCNFSRPHMRAFHFSWIGFFIAFFIWFAIAPLLSEIQDTLDLDKKEVWTSSIVGVGGTIFMRFLLGPFCDKIGPRVLFTFVLCFASIPTACTGFVNSATSLAVLRLFIGTAGGTFVMCQYWTSRMFTKQVVGTANALVGGWGNLGGGVTQLVMGSALFPLFKEIFKNEPDPAETAWRWVSIVPAVVAFAIGLLIFFYSDDAPKGNYHEMKKNGAMADVSAAASFRTGALNLNTWFLFIQYACCFGVELTMNNAAVLYFKEKFSLTTEEAAAIASIFGWMNLFARGAGGFLSDKANARMGMRGRLWTQTILLACEGALVLVFANTGSLTGAIVVMVFFSLFVQAAEGSSYGIVPYVDPPATGAIAGIIGAGGNTGAVAFGMGFRQLDYKDAFIIMGAVICASSVLSVFICIPGSSRMIGGEADDVGAKDPTLSVPEPDTQKTQDVNA

SEQ ID NO: 28518 - DNA, 1449 bp, Cylindrotheca fusiformis
  CDS (1)..(1449)
atgagtggaactgatgttgcaactggtgctcctgccgaatggaagaagtaccaagagtactcccttgacgtcgatcccgatcaagacgaccgggccactgagatcaagctgtgtaacttctctcgtccccatatgagagctttccatttctcatggattggattcttcattgccttcttcatctggttcgccatcgctccccttctcagtgagatccaagatactcttgacttggacaagaaggaagtctggacttcttctattgtcggtgtcggaggtacaattttcatgcgtttccttctaggaccgttctgcgacaagatcgggccccgagtcctcttcacctttgtcctttgcttcgcttctatccccactgcctgtaccggatttgtcaactctgccacttcccttgccgttctccgattgttcattggaactgctggaggtactttcgtcatgtgccaatattggactagccgaatgttcacaaagcaagtggtcggaactgccaatgctcttgtcggtggatggggaaatcttggaggaggtgtcacgcagcttgtcatgggatcagcgttgtttccactgttcaaggaaatcttcaagaacgagcctgaccccgctgagactgcgtggcgatgggtttctatcgttcccgccgtcgttgcattcgcaattggtctcctaattttcttctattccgacgatgcgcccaagggaaactacaacgagatgaagaagaatggggccatggccgatgtttccgccgccgcttccttccgcaccggagcactcaacctcaatacttggtttttgttcattcaatacgcatgctgcttcggtgtggaactgaccatgaacaacgccgccgctctgtacttcaaggagaagttctcgctgaccactgaagaagcggccgccattgcctccatcttcggatggatgaatcttttcgcccgtggcgctggtggattccttagtgacaaggccaacgccaggatgggaatgcgtggacgcctttggactcacaccatcttgctggcttgtgagggtgctcttgtcttggtttttgccaacacaggatcgttgacgggagccattgtcgttatggtcttcttttctctattcgtccaagccgctgaagggtcctcttatggaatcgtcccctacgttgacccacccgccactggagctattgccggtatcattggagctggaggaaacactggagccgtcgcttttggaatgggattccgtcagttggactacaaagatgctttcatcatcatgggagccgtcatctgtgcgtcttctgtcttgtcagtcttcatctgcatccccggatcgtctagaatgattggaggagaagcggatgatgtcggtgccaaggaccccactttgtcggttccccaacctgataccgagaagactcaagatgtcaatgcctaa

SEQ ID NO: 28519 - protein, 482 aa, Cylindrotheca fusiformis
MSGTDVATGAPAEWKKYQEYSLDVDPDQDDRATEIKLCNFSRPHMRAFHFSWIGFFIAFFIWFAIAPLLSEIQDTLDLDKKEVWTSSIVGVGGTIFMRFLLGPFCDKIGPRVLFTFVLCFASIPTACTGFVNSATSLAVLRLFIGTAGGTFVMCQYWTSRMFTKQVVGTANALVGGWGNLGGGVTQLVMGSALFPLFKEIFKNEPDPAETAWRWVSIVPAVVAFAIGLLIFFYSDDAPKGNYNEMKKNGAMADVSAAASFRTGALNLNTWFLFIQYACCFGVELTMNNAAALYFKEKFSLTTEEAAAIASIFGWMNLFARGAGGFLSDKANARMGMRGRLWTHTILLACEGALVLVFANTGSLTGAIVVMVFFSLFVQAAEGSSYGIVPYVDPPATGAIAGIIGAGGNTGAVAFGMGFRQLDYKDAFIIMGAVICASSVLSVFICIPGSSRMIGGEADDVGAKDPTLSVPQPDTEKTQDVNA

SEQ ID NO: 28520 - DNA, 1449 bp, Cylindrotheca fusiformis
  CDS (1)..(1449)
atgagtggaactgatgttgcaactggtgctcctgccgaatggaagaagtaccaagagtactcccttgacgtcgatcccgatcaagacgaccgggccactgagatcaagctatgtaacttctctcggccccatatgagagctttccatttctcatggattggattcttcattgccttcttcatctggttcgccatcgctccccttctcagtgagatccaagatactcttgacttggacaagaaggaagtctggacttcatctattgtcggtgtcggaggtacaattttcatgcgtttccttctaggaccgttctgcgacaagatcgggccccgagtcctcttcacctttgtcctttgcttcgcttctattcccactgtctgtaccggatttgtcaactctgccacttcccttgccgtcctccgattgttcattggaactgctggaggtactttcgtcatgtgccaatattggaccagccgaatgttcacaaagcaagtggtcggaactgccaatgctcttgtcggtggatggggaaatcttggaggaggtgtcacgcagcttgtcatgggatcagcgttgtttccactgttcaaggaaatcttcaagaacgagcctgaccccgctgagactgcgtggcgatgggtttctatcgttcccgccgtcgttgcattcgcaattggtctcctaattttcttctattccgacgatgcgcccaagggaaactacaacgagatgaagaagaatggggccatgtccgatgtttccgccgccgcttccttccgcaccggagcactcaacctcaatacatggtttttgttcaaacaatacgcatgctgcttcggtgtggaactgaccatgaacaacaccgccgctctgtacttcaaggagaagttctcgctgaccactgaagaagcggccgccattgcctccatcttcggatggatgaatcttttcgcccgtggcgctggtggattccttagtgacaaggccaacgccaggatgggaatgcgtggacgcctttggactcagaccatcttgctggcttgtgagggtgctcttgtcttggtttttgccaacacaggatcgttgacgggagccattgtcgttatggtcttcttttctctattcgtccaagccgctgaagggtcctcttatggaatcgtcccctacgttgacccacccgccactggagctattgccggtatcattggagctggaggaaacactggagccgtcgcttttggaatgggattccgtcagttggactacaaagatgctttcatcatcatgggagccgtcatctgtgcgtcttctgtcttgtcagtcttcatctgcatccccggatcgtctagaatgattggaggagaagcggatgatgtcggtgccaaggaccccactttgtcggttccccaacctgataccgagaagactcaagatgtcaatgcctaa

SEQ ID NO: 28521 - protein, 482 aa, Cylindrotheca fusiformis
MSGTDVATGAPAEWKKYQEYSLDVDPDQDDRATEIKLCNFSRPHMRAFHFSWIGFFIAFFIWFAIAPLLSEIQDTLDLDKKEVWTSSIVGVGGTIFMRFLLGPFCDKIGPRVLFTFVLCFASIPTVCTGFVNSATSLAVLRLFIGTAGGTFVMCQYWTSRMFTKQVVGTANALVGGWGNLGGGVTQLVMGSALFPLFKEIFKNEPDPAETAWRWVSIVPAVVAFAIGLLIFFYSDDAPKGNYNEMKKNGAMSDVSAAASFRTGALNLNTWFLFKQYACCFGVELTMNNTAALYFKEKFSLTTEEAAAIASIFGWMNLFARGAGGFLSDKANARMGMRGRLWTQTILLACEGALVLVFANTGSLTGAIVVMVFFSLFVQAAEGSSYGIVPYVDPPATGAIAGIIGAGGNTGAVAFGMGFRQLDYKDAFIIMGAVICASSVLSVFICIPGSSRMIGGEADDVGAKDPTLSVPQPDTEKTQDVNA

SEQ ID NO: 28522 - DNA, 1212 bp, Pseudomonas aeruginosa
  CDS (1)..(1212): transl_table=11
atgaacaacagcttctggaaggccggccatgcgccgaccctgttcgcggcgtttctctatttcgacctgagtctcatggtctggtacgtgctcggcccgctgggggtgcagattgccggcgacctgcaactgagcacccagcagcgcgcgatgatggtcgccacgccgatcctcgccggcgccgtactgcgcttcctgctcggcctgctggccgatcgctggtcgccgaagagctccggcatcctcgcccaggtcatcgtcatcgccgccctcgcggccgcctggctgctgggcgtgaacagctatgagcaggcactgctgctggggttgttcctcggcttcgccggggcatccttcgccgtggccctgccgctcgcatcgcaatggtacccgccgcaacaccagggcaaggccatgggcatcgccggcgcgggcaactccggcaccgtgctcgccgccctcttcgcccccggcctggccgccgcgttcggctggaacaacgtgttcggcttcgccctgctgccgctcgtcctgaccctcctggtgttcgccatggtcgcgcgcaacgccccgcagcggccggcgcccaaggccatgggcgattacctgaaagccttcggcgaccgcgacagctggtggttcatgttcttctacagcgtcaccttcggcggcttcctcggcctggccagcaccctgcccggctatttccacgaccagtacggcctgaacccggtgaccgccggctactacaccgccgcctgcgtcttcgccggcagcctgatgcgcccgctcggtggcgccctcgccgatcgcatcggcggcatccgcagcctgctgatggtgtacaccctggccgccatctgcatcgccgcggtcggtttccacttgtccagcgcgatggccgccctcggcctgttcgtggtcgccatgctcagtctcggtgccggcaatggcgcggtgttccagttggtaccgcagcgcttccacaaggaaatcggcgtgatgaccgggctgatcggcatggccggcggcatcggcggcttctgcctgactgccggcctcggcgcgatcaagcaaagcaccggcgactaccagctcggcctgtggctgttcgccagtctcggcgtgctggcctggttcggcctccacggggtgaagcggcgctggcgcaccacctggggctcggccgcggtcaccgccgcgcgggtctga

SEQ ID NO: 28523 - protein, 403 aa, Pseudomonas aeruginosa
MNNSFWKAGHAPTLFAAFLYFDLSLMVWYVLGPLGVQIAGDLQLSTQQRAMMVATPILAGAVLRFLLGLLADRWSPKSSGILAQVIVIAALAAAWLLGVNSYEQALLLGLFLGFAGASFAVALPLASQWYPPQHQGKAMGIAGAGNSGTVLAALFAPGLAAAFGWNNVFGFALLPLVLTLLVFAMVARNAPQRPAPKAMGDYLKAFGDRDSWWFMFFYSVTFGGFLGLASTLPGYFHDQYGLNPVTAGYYTAACVFAGSLMRPLGGALADRIGGIRSLLMVYTLAAICIAAVGFHLSSAMAALGLFVVAMLSLGAGNGAVFQLVPQRFHKEIGVMTGLIGMAGGIGGFCLTAGLGAIKQSTGDYQLGLWLFASLGVLAWFGLHGVKRRWRTTWGSAAVTAARV

SEQ ID NO: 28524 - DNA, 1389 bp, Escherichia coli
  CDS (1)..(1389): transl_table=11
atggcactgcaaaatgagaaaaatagtcgttatcttttgcgcgactggaaaccagaaaatccggccttctgggaaaataaaggaaaacatattgctcgaagaaatctctggatatcagtcagttgtctacttcttgccttctgtgtctggatgctatttagcgcagttaccgttaatctcaataaaatcggttttaattttactaccgatcaactctttttattaaccgcattaccctccgtttctggcgcattattgcgtgttccctactcctttatggtgcctatattcggtggacgccgatggacggtttttagtactgcaatcctgattattccttgcgtctggctcggaattgccgtgcaaaatccgaatactccttttgggatatttatcgttatcgctttgctatgcggttttgcaggtgcaaactttgcttcgagcatgggcaatatcagtttcttctttccaaaagccaaacaagggagcgctcttgggattaatggcggattaggaaacttaggtgtaagtgtaatgcagctggttgcaccgctggtcatttttgtacctgtatttgcctttctcggcgtcaatggcgtaccgcaggccgacggttcggtgatgtcgctggcgaatgccgcatggatttgggtaccgctactggcgattgccacgatcgccgcatggtcagggatgaatgatatcgccagttcacgcgcctcaattgccgaccagctccctgtcttacaacgcctgcatctctggctgctgagcctgctttaccttgccaccttcggttcgtttatcggtttttctgcgggttttgccatgctggcaaaaacccagttcccggatgtgaatattctgcgcctggcgttctttggcccatttatcggtgccatcgcgcggtcggttggtggtgctatttccgataagttcggcggcgtgcgggtgacgttgatcaactttatttttatggcgattttcagtgccctgctgttccttaccttaccgggcacaggctccggtaatttcatcgccttttacgccgtatttatggggctgtttctgactgcgggtctgggaagtggttctactttccagatgatcgccgtcatctttcgccagataaccatttatcgggtaaagatgaaaggcggtagtgatgagcaagctcataaagaagccgtcaccgaaacggcggcggctctgggctttatctcagccattggcgcagtgggcggcttttttattccgcaggcgtttggcatgtcgctcaatatgaccggctctccggtcggcgcgatgaaagtgtttttaatcttctacatcgtttgtgtgctgctgacctggctggtttatggtcggcggaagttcagccaaaaataa

SEQ ID NO: 28525 - protein, 462 aa, Escherichia coli
MALQNEKNSRYLLRDWKPENPAFWENKGKHIARRNLWISVSCLLLAFCVWMLFSAVTVNLNKIGFNFTTDQLFLLTALPSVSGALLRVPYSFMVPIFGGRRWTVFSTAILIIPCVWLGIAVQNPNTPFGIFIVIALLCGFAGANFASSMGNISFFFPKAKQGSALGINGGLGNLGVSVMQLVAPLVIFVPVFAFLGVNGVPQADGSVMSLANAAWIWVPLLAIATIAAWSGMNDIASSRASIADQLPVLQRLHLWLLSLLYLATFGSFIGFSAGFAMLAKTQFPDVNILRLAFFGPFIGAIARSVGGAISDKFGGVRVTLINFIFMAIFSALLFLTLPGTGSGNFIAFYAVFMGLFLTAGLGSGSTFQMIAVIFRQITIYRVKMKGGSDEQAHKEAVTETAAALGFISAIGAVGGFFIPQAFGMSLNMTGSPVGAMKVFLIFYIVCVLLTWLVYGRRKFSQK

SEQ ID NO: 28526 - DNA, 1389 bp, Salmonella typhimurium
  CDS (1)..(1389): transl_table=11
atgacacgacaaaacgagaattataaccgttatctcttgagtgactggcgacccgaaaatccagccttctgggagaataaagggaaaggcatcgccagaagaaacttatggatttcagtaagttgtttgctcctggcattttgcgtctggatgttgtttagcgctgttgccgtcaacctcaataaaattggatttaattttaccaccgaccaactctttttattaaccgcattaccttctctttccggcgcaatattacgcgttccctactcctttatggtgccactgtttggtggtcgtaaatggaccgtattaagcaccgtaatattgattattccctgcgcctggctgggattcgccgtacaaaatcccgccacccctttcggggtatttatgctcatcgctctgttgtgcggttttgcgggggcaaacttcgcgtccagtatgggcaacatcagttttttctttccaaaagccagacaaggtagcgcgttgggtattaacggcggactgggaaatcttggcgtcagtgtgatgcagttgattgcgccgctggttatttttctgccgatatttacttttttaggcgtccagggcgtgccgcaacctgatggctccctgctcgccctcactaacgccgcctggatctgggtgccgttactggctgtcgcgacgcttgccgcctggtttggtatgaacgatatcggcagttcaaaagcgtctgtcgcctcgcaattgccggtgctaaaacgtctgcacctgtggctgcttagcctgctgtacctggcgacattcgggtcattcatcggcttttccgcaggtttcgccatgctcgccaaaacgcaatttcccgacgtaaacattctgcaactggcgttctttggcccctttatcggcgcgctggcgcgatcggcaggcggcgtgatctccgataaattcggcggcgttcgcgtaacgctcattaattttatctttatggcgctgtttaccgccttgctattcctcacgctgccaggctccggcgcaggcagctttagcgcgttctatcttgtttttatgggcctgtttttgacagcgggtctcggcagcggttctaccttccagatgattgcggtgatcttccggcagatcacgctctacaacgtcaaactgcgcggcgggagcgatgagcaggcgcagcgcgaagcggtgacggataccgccgccgcgctcggttttatctccgctattggcgctgtgggcggcttctttattccaaaagcgtttggcacctctttggccttgaccggctcgccggtgggcgccatgaaaatctttttgctgttttacctcgcttgcgtcctgctgacctggctggtctacgggcgtcgtaagcctaaacaacaataa

SEQ ID NO: 28527 - protein, 462 aa, Salmonella typhimurium
MTRQNENYNRYLLSDWRPENPAFWENKGKGIARRNLWISVSCLLLAFCVWMLFSAVAVNLNKIGFNFTTDQLFLLTALPSLSGAILRVPYSFMVPLFGGRKWTVLSTVILIIPCAWLGFAVQNPATPFGVFMLIALLCGFAGANFASSMGNISFFFPKARQGSALGINGGLGNLGVSVMQLIAPLVIFLPIFTFLGVQGVPQPDGSLLALTNAAWIWVPLLAVATLAAWFGMNDIGSSKASVASQLPVLKRLHLWLLSLLYLATFGSFIGFSAGFAMLAKTQFPDVNILQLAFFGPFIGALARSAGGVISDKFGGVRVTLINFIFMALFTALLFLTLPGSGAGSFSAFYLVFMGLFLTAGLGSGSTFQMIAVIFRQITLYNVKLRGGSDEQAQREAVTDTAAALGFISAIGAVGGFFIPKAFGTSLALTGSPVGAMKIFLLFYLACVLLTWLVYGRRKPKQQ

SEQ ID NO: 28528 - DNA, 1266 bp, Bacillus subtilis
  CDS (1)..(1266): transl_table=11
atgaagctgtcggaactgaaaactagcggtcatccactcactttgctctgttcctttttatactttgatgtcagttttatgatatgggttatgcttggggcgctgggtgtttatatttctcaggattttggcctgtctccttttgagaaagggcttgtcgtagctgtgccgattttatctggatctgtgtttcgtatcattcttggtattttaacggacagaatcggaccgaaaaaaacggcagtgatcgggatgctggtgacgatgattccgctgctttgggggacattcggcggccgttccctgactgagctgtatgccatcgggattctgcttggcgtggcgggagcaagctttgctgtagcgctgcctatggccagccgctggtatccgcctcatttgcagggacttgcgatggggattgccggagcggggaacagcggcacgttgtttgcaaccctgtttggccctcgtctggcagagcagttcggctggcacattgtcatgggaattgcgctaattccattattgatcgtctttattctttttgtatccatggcaaaggattcccctgcacagccgtctccccagccgctcaaaagctatctgcatgtgtttgggcaaaaggaaacatggtttttctgcctgctgtacagcgtcacatttggcggatttgtcgggctctcaagctttttatctattttctttgttgatcaataccagctgtcaaaaattcacgcaggggacttcgttacattatgtgtggcggcggggagctttttccggcctgtcgggggcttgatttcagatcgtgtcggcggcacgaaagttctttctgtattgtttgtcatcgtggcactgtgtatggccggagtcagtagcctgccatctctctcaatgggttatggtcctattgtttgtcggaatgatggggctcggaatgggaaacggcgcagtattccagctcgtgccgcagcgcttccgcaaagaaatcggcatggtgacgggaatcgtcggtgcggccggaggaatcggagggtttttcttgccgaacatcttaggatctctcaaacagatgacaggcacatatgctatcggtttatcacgtttcctgtatcgcgctgctggcgtttgcacttgtgcttgccgcaggctattactggcggaaaagctggagcgcggaaagcagcccggcggatgtttaggattttgacggacacgcgtttgtgcgtgtcttttttattttctcttgattttcaacagtga

SEQ ID NO: 28529 - protein, 421 aa, Bacillus subtilis
MKLSELKTSGHPLTLLCSFLYFDVSFMIWVMLGALGVYISQDFGLSPFEKGLVVAVPILSGSVFRIILGILTDRIGPKKTAVIGMLVTMIPLLWGTFGGRSLTELYAIGILLGVAGASFAVALPMASRWYPPHLQGLAMGIAGAGNSGTLFATLFGPRLAEQFGWHIVMGIALIPLLIVFILFVSMAKDSPAQPSPQPLKSYLHVFGQKETWFFCLLYSVTFGGFVGLSSFLSIFFVDQYQLSKIHAGDFVTLCVAAGSFFRPVGGLISDRVGGTKVLSVLFVIVALCMAGVSSLPSLSMGYGPIVCRNDGARNGKRRSIPARAAALPQRNRHGDGNRRCGRRNRRVFLAEHLRISQTDDRHICYRFITFPVSRCWRLHLCLPQAITGGKAGARKAARRMFRILTDTRLCVSFLFSLDFQQ

SEQ ID NO: 28530 - DNA, 21 bp, Artificial sequence
  Primer sequence
atgagtcactcatccgccccc

SEQ ID NO: 28531 - DNA, 27 bp, Artificial sequence
  Primer sequence
ttattttttagaatgccgaccatatac

SEQ ID NO: 28532 - protein, 512 aa, Artificial sequence
  Consensus
  Variant (2)..(9): Xaa in position 2 to 9 is any amino acid
  Variant (11)..(11): Xaa in position 11 is any amino acid
  Variant (13)..(13): Xaa in position 13 is any amino acid
  Variant (16)..(16): Xaa in position 16 is any amino acid
  Variant (18)..(22): Xaa in position 18 to 22 is any amino acid
  Variant (23)..(24): Xaa in position 23 to 24 is any or no amino acid
  Variant (26)..(38): Xaa in position 26 to 38 is any amino acid
  Variant (39)..(49): Xaa in position 39 to 49 is any or no amino acid
  Variant (51)..(51): Xaa in position 51 is any amino acid
  Variant (53)..(54): Xaa in position 53 to 54 is any amino acid
  Variant (55)..(55): Xaa in position 55 is any or no amino acid
  Variant (57)..(57): Xaa in position 57 is any amino acid
  Variant (60)..(60): Xaa in position 60 is any amino acid
  Variant (64)..(72): Xaa in position 64 to 72 is any amino acid
  Variant (74)..(74): Xaa in position 74 is any amino acid
  Variant (76)..(86): Xaa in position 76 to 86 is any amino acid
  Variant (88)..(101): Xaa in position 88 to 101 is any amino acid
  Variant (102)..(110): Xaa in position 102 to 110 is any or no amino acid
  Variant (112)..(112): Xaa in position 112 is any amino acid
  Variant (113)..(113): Xaa in position 113 is any or no amino acid
  Variant (115)..(117): Xaa in position 115 to 117 is any amino acid
  Variant (119)..(119): Xaa in position 119 is any amino acid
  Variant (123)..(123): Xaa in position 123 is any amino acid
  Variant (126)..(127): Xaa in position 126 to 127 is any amino acid
  Variant (129)..(133): Xaa in position 129 to 133 is any amino acid
  Variant (137)..(140): Xaa in position 137 to 140 is any amino acid
  Variant (142)..(142): Xaa in position 142 is any amino acid
  Variant (144)..(144): Xaa in position 144 is any amino acid
  Variant (147)..(147): Xaa in position 147 is any amino acid
  Variant (150)..(150): Xaa in position 150 is any amino acid
  Variant (151)..(151): Xaa in position 151 is any or no amino acid
  Variant (153)..(153): Xaa in position 153 is any amino acid
  Variant (155)..(156): Xaa in position 155 to 156 is any amino acid
  Variant (158)..(162): Xaa in position 158 to 162 is any amino acid
  Variant (164)..(164): Xaa in position 164 is any or no amino acid
  Variant (166)..(181): Xaa in position 166 to 181 is any amino acid
  Variant (182)..(210): Xaa in position 182 to 210 is any or no amino acid
  Variant (212)..(212): Xaa in position 212 is any amino acid
  Variant (214)..(215): Xaa in position 214 to 215 is any amino acid
  Variant (217)..(243): Xaa in position 217 to 243 is any amino acid
  Variant (244)..(314): Xaa in position 244 to 314 is any or no amino acid
  Variant (316)..(320): Xaa in position 316 to 320 is any amino acid
  Variant (322)..(324): Xaa in position 322 to 324 is any amino acid
  Variant (327)..(327): Xaa in position 327 is any amino acid
  Variant (331)..(342): Xaa in position 331 to 342 is any amino acid
  Variant (344)..(357): Xaa in position 344 to 357 is any amino acid
  Variant (358)..(377): Xaa in position 358 to 377 is any or no amino acid
  Variant (379)..(381): Xaa in position 379 to 381 is any amino acid
  Variant (383)..(384): Xaa in position 383 to 384 is any amino acid
  Variant (387)..(387): Xaa in position 387 is any amino acid
  Variant (392)..(392): Xaa in position 392 is any amino acid
  Variant (395)..(432): Xaa in position 395 to 432 is any amino acid
  Variant (433)..(455): Xaa in position 433 to 455 is any or no amino acid
  Variant (457)..(457): Xaa in position 457 is any amino acid
  Variant (459)..(459): Xaa in position 459 is any amino acid
  Variant (462)..(462): Xaa in position 462 is any amino acid
  Variant (464)..(465): Xaa in position 464 to 465 is any amino acid
  Variant (467)..(469): Xaa in position 467 to 469 is any amino acid
  Variant (471)..(474): Xaa in position 471 to 474 is any amino acid
  Variant (475)..(497): Xaa in position 475 to 497 is any or no amino acid
  Variant (499)..(501): Xaa in position 499 to 501 is any amino acid
  Variant (503)..(507): Xaa in position 503 to 507 is any amino acid
  Variant (510)..(510): Xaa in position 510 is any amino acid
LXXXXXXXXLXFXVWXLXXXXXXXIXXXXXXXXXXXXXXXXXXXXXXXXLXAXXXLXGAXLRVXXXXXXXXXGXRXXXXXXXXXXXIXXXXXXXXXXXXXXXXXXXXXXXLXXGXXXGXAGAXFAXXMXXXXXFFPXXXXGXAXGIXGGXXNXGXXVXXXXXPXVXXXXXXXXXXXXXXXXXXXXXXXXXXXXXXXXXXXXXXXXXXXXXLXLXXLXXXXXXXXXXXXXXXXXXXXXXXXXXXXXXXXXXXXXXXXXXXXXXXXXXXXXXXXXXXXXXXXXXXXXXXXXXXXXXXXXXXXXXXXXXXXXXXXXXWXXXXXYXXXFGXFVGXXXXXXXXXXXXFXXXXXXXXXXXXXXXXXXXXXXXXXXXXXXXXXXGXXXRXXGGXLSDRXGGXXXXXXXXXXXXXXXXXXXXXXXXXXXXXXXXXXXXXXXXXXXXXXXXXXXXXXXXXXXXXGXGXGSXFXXIXXXFXXXXXXXXXXXXXXXXXXXXXXXXXXXGXXXGXXXXXGGXGG

SEQ ID NO: 28533 - protein, 19 aa, Artificial sequence
  Consensus
  Variant (2)..(10): Xaa in position 2 to 10 is any amino acid
  Variant (11)..(11): Xaa in position 11 is any or no amino acid
  Variant (13)..(13): Xaa in position 13 is any amino acid
  Variant (14)..(14): Xaa in position 14 is Ala, Ile or Val
  Variant (16)..(16): Xaa in position 16 is any amino acid
  Variant (17)..(17): Xaa in position 17 is Ile, Leu, Met or Val
  Variant (18)..(18): Xaa in position 18 is any amino acid
  Variant (19)..(19): Xaa in position 19 is Ala, Gly or Ser
LXXXXXXXXXXFXXWXXXX

SEQ ID NO: 28534 - protein, 45 aa, Artificial sequence
  Consensus
  Variant (2)..(3): Xaa in position 2 to 3 is any amino acid
  Variant (4)..(4): Xaa in position 4 is any or no amino acid
  Variant (6)..(6): Xaa in position 6 is Ala, Gly or Thr
  Variant (7)..(7): Xaa in position 7 is any amino acid
  Variant (9)..(9): Xaa in position 9 is Ala, Gly or Ser
  Variant (10)..(12): Xaa in position 10 to 12 is any amino acid
  Variant (13)..(13): Xaa in position 13 is Ala, Gly, Pro, Ser or Thr
  Variant (14)..(15): Xaa in position 14 to 15 is any amino acid
  Variant (16)..(16): Xaa in position 16 is Ala, Gly, Asn, Pro or Ser
  Variant (17)..(18): Xaa in position 17 to 18 is any amino acid
  Variant (19)..(19): Xaa in position 19 is Phe, His or Tyr
  Variant (20)..(24): Xaa in position 20 to 24 is any amino acid
  Variant (26)..(26): Xaa in position 26 is any amino acid
  Variant (27)..(27): Xaa in position 27 is Ala, Ser or Val
  Variant (28)..(28): Xaa in position 28 is any amino acid
  Variant (30)..(31): Xaa in position 30 to 31 is any amino acid
  Variant (32)..(33): Xaa in position 32 to 33 is any or no amino acid
  Variant (35)..(38): Xaa in position 35 to 38 is any amino acid
  Variant (39)..(39): Xaa in position 39 is Ala, Gly or Val
  Variant (40)..(44): Xaa in position 40 to 44 is any amino acid
  Variant (45)..(45): Xaa in position 45 is Phe, Ile, Leu or Val
GXXXGXXFXXXXXXXXXXXXXXXXGXXXGXXXXGXXXXXXXXXXX

SEQ ID NO: 28535 - protein, 24 aa, Artificial sequence
  Consensus
  Variant (2)..(3): Xaa in position 2 to 3 is any amino acid
  Variant (4)..(4): Xaa in position 4 is any or no amino acid
  Variant (6)..(6): Xaa in position 6 is any or no amino acid
  Variant (8)..(8): Xaa in position 8 is Ala, Gly or Ser
  Variant (9)..(9): Xaa in position 9 is Phe or Tyr
  Variant (10)..(10): Xaa in position 10 is Ala, Ile or Val
  Variant (11)..(11): Xaa in position 11 is Ala or Gly
  Variant (12)..(12): Xaa in position 12 is any amino acid
  Variant (13)..(13): Xaa in position 13 is Ala, Gly, Ser or Thr
  Variant (14)..(15): Xaa in position 14 to 15 is any amino acid
  Variant (16)..(16): Xaa in position 16 is Phe, Leu, Met or Val
  Variant (17)..(17): Xaa in position 17 is Ala, Gly, Pro, Ser or Thr
  Variant (18)..(23): Xaa in position 18 to 23 is any amino acid
  Variant (24)..(24): Xaa in position 24 is Phe or Tyr
YXXXFXGXXXXXXXXXXXXXXXXX

SEQ ID NO: 28536 - protein, 33 aa, Artificial sequence
  Consensus
  Variant (2)..(19): Xaa in position 2 to 19 is any amino acid
  Variant (20)..(22): Xaa in position 20 to 22 is any or no amino acid
  Variant (24)..(24): Xaa in position 24 is Phe, Ile, Leu, Met or Val
  Variant (25)..(25): Xaa in position 25 is any amino acid
  Variant (26)..(26): Xaa in position 26 is Ala, Gly or Ser
  Variant (27)..(28): Xaa in position 27 to 28 is any amino acid
  Variant (30)..(30): Xaa in position 30 is Ala, Cys, Gly, Asn, Ser or Thr
  Variant (31)..(31): Xaa in position 31 is any amino acid
  Variant (33)..(33): Xaa in position 33 is Ala, Gly, Pro or Ser
GXXXXXXXXXXXXXXXXXXXXXGXXXXXGXXGX

SEQ ID NO: 28537 - DNA, 1563 bp, Escherichia coli K12; identical to SEQ ID NO: 3241
  CDS (1)..(1563)

SEQ ID NO: 28538 - protein, 520 aa, Escherichia coli K12; identical to SEQ ID NO: 3242

SEQ ID NO: 28539 - DNA, 2984 bp, Rhizobium meliloti; identical to SEQ ID NO: 3243
  CDS (638)..(2827)

SEQ ID NO: 28540 - protein, 729 aa, Rhizobium meliloti; identical to SEQ ID NO: 3244

SEQ ID NO: 28541 - DNA, 1365 bp, Salmonella typhimurium; identical to SEQ ID NO: 3245
  CDS (1)..(1365)

SEQ ID NO: 28542 - protein, 454 aa, Salmonella typhimurium; identical to SEQ ID NO: 3246

SEQ ID NO: 28543 - DNA, 1413 bp, Bacillus subtilis; identical to SEQ ID NO: 3247
  CDS (1)..(1413)

SEQ ID NO: 28544 - protein, 470 aa, Bacillus subtilis; identical to SEQ ID NO: 3248

SEQ ID NO: 28545 - DNA, 1449 bp, Spirochaeta aurantia; identical to SEQ ID NO: 3249
  CDS (1)..(1449)

SEQ ID NO: 28546 - protein, 482 aa, Spirochaeta aurantia; identical to SEQ ID NO: 3250

SEQ ID NO: 28547 - DNA, 1389 bp, Methanobacterium thermoautotrophicum; identical to SEQ ID NO: 3251
  CDS (1)..(1389)

SEQ ID NO: 28548 - protein, 462 aa, Methanobacterium thermoautotrophicum; identical to SEQ ID NO: 3252

SEQ ID NO: 28549 - DNA, 1572 bp, Haloferax volcanii; identical to SEQ ID NO: 3253
  CDS (1)..(1572)

SEQ ID NO: 28550 - protein, 523 aa, Haloferax volcanii; identical to SEQ ID NO: 3254

SEQ ID NO: 28551 - DNA, 1305 bp, Pyrococcus abyssi; identical to SEQ ID NO: 3255
  CDS (1)..(1305)

SEQ ID NO: 28552 - protein, 434 aa, Pyrococcus abyssi; identical to SEQ ID NO: 3256

SEQ ID NO: 28553 - DNA, 1572 bp, Vibrio cholerae; identical to SEQ ID NO: 3257
  CDS (1)..(1572)

SEQ ID NO: 28554 - protein, 523 aa, Vibrio cholerae; identical to SEQ ID NO: 3258

SEQ ID NO: 28555 - DNA, 1359 bp, Xylella fastidiosa; identical to SEQ ID NO: 3259
  CDS (1)..(1359)

SEQ ID NO: 28556 - protein, 452 aa, Xylella fastidiosa; identical to SEQ ID NO: 3260

SEQ ID NO: 28557 - DNA, 1464 bp, Xylella fastidiosa; identical to SEQ ID NO: 3261
  CDS (1)..(1464)

SEQ ID NO: 28558 - protein, 487 aa, Xylella fastidiosa; identical to SEQ ID NO: 3262

SEQ ID NO: 28559 - DNA, 2760 bp, Arabidopsis thaliana (mouse-ear cress); identical to SEQ ID NO: 3263
  CDS (7)..(2760)

SEQ ID NO: 28560 - protein, 917 aa, Arabidopsis thaliana (mouse-ear cress); identical to SEQ ID NO: 3264

SEQ ID NO: 28561 - DNA, 1722 bp, Streptococcus pneumoniae; identical to SEQ ID NO: 3265
  CDS (1)..(1722)

SEQ ID NO: 28562 - protein, 573 aa, Streptococcus pneumoniae; identical to SEQ ID NO: 3266

SEQ ID NO: 28563 - DNA, 1362 bp, Streptococcus pneumoniae; identical to SEQ ID NO: 3267
  CDS (1)..(1362)

SEQ ID NO: 28564 - protein, 453 aa, Streptococcus pneumoniae; identical to SEQ ID NO: 3268

SEQ ID NO: 28565 - DNA, 1428 bp, Clostridium acetobutylicum; identical to SEQ ID NO: 3269
  CDS (1)..(1428)

SEQ ID NO: 28566 - protein, 475 aa, Clostridium acetobutylicum; identical to SEQ ID NO: 3270

SEQ ID NO: 28567 - DNA, 1566 bp, Yersinia pestis; identical to SEQ ID NO: 3271
  CDS (1)..(1566)

SEQ ID NO: 28568 - protein, 521 aa, Yersinia pestis; identical to SEQ ID NO: 3272

SEQ ID NO: 28569 - DNA, 2148 bp, Nostoc sp. PCC 7120; identical to SEQ ID NO: 3273
  CDS (1)..(2148)

SEQ ID NO: 28570 - protein, 715 aa, Nostoc sp. PCC 7120; identical to SEQ ID NO: 3274

SEQ ID NO: 28571 - DNA, 1377 bp, Yersinia pestis; identical to SEQ ID NO: 3275
  CDS (1)..(1377)

SEQ ID NO: 28572 - protein, 458 aa, Yersinia pestis; identical to SEQ ID NO: 3276

SEQ ID NO: 28573 - DNA, 2145 bp, Nostoc sp. PCC 7120; identical to SEQ ID NO: 3277
  CDS (1)..(2145)

SEQ ID NO: 28574 - protein, 714 aa, Nostoc sp. PCC 7120; identical to SEQ ID NO: 3278

SEQ ID NO: 28575 - DNA, 2208 bp, Nostoc sp. PCC 7120; identical to SEQ ID NO: 3279
  CDS (1)..(2208)

SEQ ID NO: 28576 - protein, 735 aa, Nostoc sp. PCC 7120; identical to SEQ ID NO: 3280

SEQ ID NO: 28577 - DNA, 1515 bp, Nostoc sp. PCC 7120; identical to SEQ ID NO: 3281
  CDS (1)..(1515)

SEQ ID NO: 28578 - protein, 504 aa, Nostoc sp. PCC 7120; identical to SEQ ID NO: 3282

SEQ ID NO: 28579 - DNA, 1362 bp, Escherichia coli; identical to SEQ ID NO: 3283
  CDS (1)..(1362)

SEQ ID NO: 28580 - protein, 453 aa, Escherichia coli; identical to SEQ ID NO: 3284

SEQ ID NO: 28581 - DNA, 2190 bp, Agrobacterium tumefaciens; identical to SEQ ID NO: 3285
  CDS (1)..(2190)

SEQ ID NO: 28582 - protein, 729 aa, Agrobacterium tumefaciens; identical to SEQ ID NO: 3286

SEQ ID NO: 28583 - DNA, 1365 bp, Listeria monocytogenes; identical to SEQ ID NO: 3287
  CDS (1)..(1365)

SEQ ID NO: 28584 - protein, 454 aa, Listeria monocytogenes; identical to SEQ ID NO: 3288

SEQ ID NO: 28585 - DNA, 1365 bp, Listeria innocua; identical to SEQ ID NO: 3289
  CDS (1)..(1365)

SEQ ID NO: 28586 - protein, 454 aa, Listeria innocua; identical to SEQ ID NO: 3290

SEQ ID NO: 28587 - DNA, 1869 bp, Klebsiella pneumoniae; identical to SEQ ID NO: 3291
  CDS (151)..(1506)

SEQ ID NO: 28588 - protein, 451 aa, Klebsiella pneumoniae; identical to SEQ ID NO: 3292

SEQ ID NO: 28589 - DNA, 1389 bp, Leptospira biflexa; identical to SEQ ID NO: 3293
  CDS (1)..(1389)

SEQ ID NO: 28590 - protein, 462 aa, Leptospira biflexa; identical to SEQ ID NO: 3294

SEQ ID NO: 28591 - DNA, 1425 bp, Methanococcus jannaschii; identical to SEQ ID NO: 3295
  CDS (1)..(1425)

SEQ ID NO: 28592 - protein, 474 aa, Methanococcus jannaschii; identical to SEQ ID NO: 3296

SEQ ID NO: 28593 - DNA, 1503 bp, Helicobacter pylori; identical to SEQ ID NO: 3297
  CDS (1)..(1503)

SEQ ID NO: 28594 - protein, 500 aa, Helicobacter pylori; identical to SEQ ID NO: 3298

SEQ ID NO: 28595 - DNA, 1236 bp, Archaeoglobus fulgidus; identical to SEQ ID NO: 3299
  CDS (1)..(1236)

SEQ ID NO: 28596 - protein, 411 aa, Archaeoglobus fulgidus; identical to SEQ ID NO: 3300

SEQ ID NO: 28597 - DNA, 954 bp, Aeropyrum pernix; identical to SEQ ID NO: 3301
  CDS (1)..(954)

SEQ ID NO: 28598 - protein, 317 aa, Aeropyrum pernix; identical to SEQ ID NO: 3302

SEQ ID NO: 28599 - DNA, 1377 bp, Vibrio cholerae; identical to SEQ ID NO: 3303
  CDS (1)..(1377)

SEQ ID NO: 28600 - protein, 458 aa, Vibrio cholerae; identical to SEQ ID NO: 3304

SEQ ID NO: 28601 - DNA, 1497 bp, Xylella fastidiosa; identical to SEQ ID NO: 3305
  CDS (1)..(1497)

SEQ ID NO: 28602 - protein, 498 aa, Xylella fastidiosa; identical to SEQ ID NO: 3306

SEQ ID NO: 28603 - DNA, 1362 bp, Pseudomonas aeruginosa; identical to SEQ ID NO: 3307
  CDS (1)..(1362)

SEQ ID NO: 28604 - protein, 453 aa, Pseudomonas aeruginosa; identical to SEQ ID NO: 3308

SEQ ID NO: 28605 - DNA, 1461 bp, Bacillus halodurans; identical to SEQ ID NO: 3309
  CDS (1)..(1461)

SEQ ID NO: 28606 - protein, 486 aa, Bacillus halodurans; identical to SEQ ID NO: 3310

SEQ ID NO: 28607 - DNA, 1467 bp, Halobacterium sp. NRC-1; identical to SEQ ID NO: 3311
  CDS (1)..(1467)

SEQ ID NO: 28608 - protein, 488 aa, Halobacterium sp. NRC-1; identical to SEQ ID NO: 3312

SEQ ID NO: 28609 - DNA, 1584 bp, Halobacterium sp. NRC-1; identical to SEQ ID NO: 3313
  CDS (1)..(1584)

SEQ ID NO: 28610 - protein, 527 aa, Halobacterium sp. NRC-1; identical to SEQ ID NO: 3314

SEQ ID NO: 28611 - DNA, 1542 bp, Caulobacter crescentus; identical to SEQ ID NO: 3315
  CDS (1)..(1542)

SEQ ID NO: 28612 - protein, 513 aa, Caulobacter crescentus; identical to SEQ ID NO: 3316

SEQ ID NO: 28613 - DNA, 1557 bp, Haemophilus influenzae; identical to SEQ ID NO: 3317
  CDS (1)..(1557)

SEQ ID NO: 28614 - protein, 518 aa, Haemophilus influenzae; identical to SEQ ID NO: 3318

SEQ ID NO: 28615 - DNA, 1395 bp, Methanobacterium thermoautotrophicum; identical to SEQ ID NO: 3319
  CDS (1)..(1395)

SEQ ID NO: 28616 - protein, 464 aa, Methanobacterium thermoautotrophicum; identical to SEQ ID NO: 3320

SEQ ID NO: 28617 - DNA, 1509 bp, Bacillus halodurans; identical to SEQ ID NO: 3321
  CDS (1)..(1509)

SEQ ID NO: 28618 - protein, 502 aa, Bacillus halodurans; identical to SEQ ID NO: 3322

SEQ ID NO: 28619 - DNA, 1464 bp, Streptococcus pneumoniae; identical to SEQ ID NO: 3323
  CDS (1)..(1464)

SEQ ID NO: 28620 - protein, 487 aa, Streptococcus pneumoniae; identical to SEQ ID NO: 3324

SEQ ID NO: 28621 - DNA, 1479 bp, Pseudomonas aeruginosa; identical to SEQ ID NO: 3325
  CDS (1)..(1479)

SEQ ID NO: 28622 - protein, 492 aa, Pseudomonas aeruginosa; identical to SEQ ID NO: 3326

SEQ ID NO: 28623 - DNA, 1386 bp, Thermotoga maritima; identical to SEQ ID NO: 3327
  CDS (1)..(1386)

SEQ ID NO: 28624 - protein, 461 aa, Thermotoga maritima; identical to SEQ ID NO: 3328

SEQ ID NO: 28625 - DNA, 1482 bp, Pseudomonas putida; identical to SEQ ID NO: 3329
  CDS (1)..(1482)

SEQ ID NO: 28626 - protein, 493 aa, Pseudomonas putida; identical to SEQ ID NO: 3330

SEQ ID NO: 28627 - DNA, 3065 bp, Pseudomonas aeruginosa; identical to SEQ ID NO: 3331
  CDS (401)..(1993)

SEQ ID NO: 28628 - protein, 530 aa, Pseudomonas aeruginosa; identical to SEQ ID NO: 3332

SEQ ID NO: 28629 - DNA, 1485 bp, Aquifex aeolicus; identical to SEQ ID NO: 3333
  CDS (1)..(1485)

SEQ ID NO: 28630 - protein, 494 aa, Aquifex aeolicus; identical to SEQ ID NO: 3334

SEQ ID NO: 28631 - DNA, 1422 bp, Deinococcus radiodurans; identical to SEQ ID NO: 3335
  CDS (1)..(1422)

SEQ ID NO: 28632 - protein, 473 aa, Deinococcus radiodurans; identical to SEQ ID NO: 3336

SEQ ID NO: 28633 - DNA, 1917 bp, Deinococcus radiodurans; identical to SEQ ID NO: 3337
  CDS (1)..(1917)

SEQ ID NO: 28634 - protein, 638 aa, Deinococcus radiodurans; identical to SEQ ID NO: 3338

SEQ ID NO: 28635 - DNA, 1551 bp, Mycobacterium tuberculosis; identical to SEQ ID NO: 3339
  CDS (1)..(1551)

SEQ ID NO: 28636 - protein, 516 aa, Mycobacterium tuberculosis; identical to SEQ ID NO: 3340

SEQ ID NO: 28637 - DNA, 1503 bp, Helicobacter pylori; identical to SEQ ID NO: 3341
  CDS (1)..(1503)

SEQ ID NO: 28638 - protein, 500 aa, Helicobacter pylori; identical to SEQ ID NO: 3342

SEQ ID NO: 28639 - DNA, 1476 bp, Neisseria meningitidis; identical to SEQ ID NO: 3343
  CDS (1)..(1476)

SEQ ID NO: 28640 - protein, 491 aa, Neisseria meningitidis; identical to SEQ ID NO: 3344

SEQ ID NO: 28641 - DNA, 1575 bp, Caulobacter crescentus; identical to SEQ ID NO: 3345
  CDS (1)..(1575)

SEQ ID NO: 28642 - protein, 524 aa, Caulobacter crescentus; identical to SEQ ID NO: 3346

SEQ ID NO: 28643 - DNA, 1251 bp, Campylobacter jejuni; identical to SEQ ID NO: 3347
  CDS (1)..(1251)

SEQ ID NO: 28644 - protein, 416 aa, Campylobacter jejuni; identical to SEQ ID NO: 3348

SEQ ID NO: 28645 - DNA, 1266 bp, Sulfolobus solfataricus; identical to SEQ ID NO: 3349
  CDS (1)..(1266)

SEQ ID NO: 28646 - protein, 421 aa, Sulfolobus solfataricus; identical to SEQ ID NO: 3350

SEQ ID NO: 28647 - DNA, 1548 bp, Buchnera aphidicola; identical to SEQ ID NO: 3351
  CDS (1)..(1548)

SEQ ID NO: 28648 - protein, 515 aa, Buchnera aphidicola; identical to SEQ ID NO: 3352

SEQ ID NO: 28649 - DNA, 2172 bp, Streptomyces griseus; identical to SEQ ID NO: 3353
  CDS (1)..(2172)

SEQ ID NO: 28650 - protein, 723 aa, Streptomyces griseus; identical to SEQ ID NO: 3354

SEQ ID NO: 28651 - DNA, 2712 bp, Streptomyces lividans; identical to SEQ ID NO: 3355
  CDS (119)..(1546)

SEQ ID NO: 28652 - protein, 475 aa, Streptomyces lividans; identical to SEQ ID NO: 3356

SEQ ID NO: 28653 - DNA, 2115 bp, Clostridium thermocellum; identical to SEQ ID NO: 3357
  CDS (361)..(1845)

SEQ ID NO: 28654 - protein, 494 aa, Clostridium thermocellum; identical to SEQ ID NO: 3358

SEQ ID NO: 28655 - DNA, 1548 bp, Bacillus subtilis; identical to SEQ ID NO: 3359
  CDS (1)..(1548)

SEQ ID NO: 28656 - protein, 515 aa, Bacillus subtilis; identical to SEQ ID NO: 3360

SEQ ID NO: 28657 - DNA, 1524 bp, Saccharomyces cerevisiae; identical to SEQ ID NO: 3361
  CDS (1)..(1524)

SEQ ID NO: 28658 - protein, 507 aa, Saccharomyces cerevisiae; identical to SEQ ID NO: 3362

SEQ ID NO: 28659 - DNA, 2340 bp, Thermus aquaticus; identical to SEQ ID NO: 3363
  CDS (169)..(1557)

SEQ ID NO: 28660 - protein, 462 aa, Thermus aquaticus; identical to SEQ ID NO: 3364

SEQ ID NO: 28661 - DNA, 2558 bp, Bacillus caldotenax; identical to SEQ ID NO: 3365
  CDS (312)..(1838)

SEQ ID NO: 28662 - protein, 508 aa, Bacillus caldotenax; identical to SEQ ID NO: 3366

SEQ ID NO: 28663 - DNA, 2068 bp, Arabidopsis thaliana (mouse-ear cress); identical to SEQ ID NO: 3367
  CDS (29)..(1894)

SEQ ID NO: 28664 - protein, 621 aa, Arabidopsis thaliana (mouse-ear cress); identical to SEQ ID NO: 3368

SEQ ID NO: 28665 - DNA, 1371 bp, Lactococcus lactis subsp. lactis; identical to SEQ ID NO: 3369
  CDS (1)..(1371)

SEQ ID NO: 28666 - protein, 456 aa, Lactococcus lactis subsp. lactis; identical to SEQ ID NO: 3370

SEQ ID NO: 28667 - DNA, 1527 bp, Synechocystis sp; identical to SEQ ID NO: 3371
  CDS (1)..(1527)

SEQ ID NO: 28668 - protein, 508 aa, Synechocystis sp; identical to SEQ ID NO: 3372

SEQ ID NO: 28669 - DNA, 1458 bp, Synechocystis sp; identical to SEQ ID NO: 3373
  CDS (1)..(1458)

SEQ ID NO: 28670 - protein, 485 aa, Synechocystis sp; identical to SEQ ID NO: 3374

SEQ ID NO: 28671 - DNA, 2144 bp, Nicotiana tabacum (common tobacco); identical to SEQ ID NO: 3375
  CDS (90)..(1940)

SEQ ID NO: 28672 - protein, 616 aa, Nicotiana tabacum (common tobacco); identical to SEQ ID NO: 3376

SEQ ID NO: 28673 - DNA, 1509 bp, Streptomyces coelicolor; identical to SEQ ID NO: 3377
  CDS (1)..(1509)

SEQ ID NO: 28674 - protein, 502 aa, Streptomyces coelicolor; identical to SEQ ID NO: 3378

SEQ ID NO: 28675 - DNA, 1470 bp, Schizosaccharomyces pombe; identical to SEQ ID NO: 3379
  CDS (1)..(1470)

SEQ ID NO: 28676 - protein, 489 aa, Schizosaccharomyces pombe; identical to SEQ ID NO: 3380

SEQ ID NO: 28677 - DNA, 1302 bp, Pyrococcus kodakaraensis; identical to SEQ ID NO: 3381
  CDS (1)..(1302)

SEQ ID NO: 28678 - protein, 433 aa, Pyrococcus kodakaraensis; identical to SEQ ID NO: 3382

SEQ ID NO: 28679 - DNA, 1590 bp, Mycobacterium leprae; identical to SEQ ID NO: 3383
  CDS (1)..(1590)

SEQ ID NO: 28680 - protein, 529 aa, Mycobacterium leprae; identical to SEQ ID NO: 3384

SEQ ID NO: 28681 - DNA, 1512 bp, Rhodobacter sphaeroides; identical to SEQ ID NO: 3385
  CDS (1)..(1512)

SEQ ID NO: 28682 - protein, 503 aa, Rhodobacter sphaeroides; identical to SEQ ID NO: 3386

SEQ ID NO: 28683 - DNA, 1993 bp, Ruta graveolens; identical to SEQ ID NO: 3387
  CDS (94)..(1935)

SEQ ID NO: 28684 - protein, 613 aa, Ruta graveolens; identical to SEQ ID NO: 3388

SEQ ID NO: 28685 - DNA, 1983 bp, Corynebacterium glutamicum; identical to SEQ ID NO: 3389
  CDS (86)..(1963)

SEQ ID NO: 28686 - protein, 625 aa, Corynebacterium glutamicum; identical to SEQ ID NO: 3390

SEQ ID NO: 28687 - DNA, 2220 bp, Streptomyces pristinaespiralis; identical to SEQ ID NO: 3391
  CDS (61)..(2220)

SEQ ID NO: 28688 - protein, 719 aa, Streptomyces pristinaespiralis; identical to SEQ ID NO: 3392

SEQ ID NO: 28689 - DNA, 2051 bp, Ruta graveolens; identical to SEQ ID NO: 3393
  CDS (43)..(1869)

SEQ ID NO: 28690 - protein, 608 aa, Ruta graveolens; identical to SEQ ID NO: 3394

SEQ ID NO: 28691 - DNA, 2660 bp, Streptomyces venezuelae; identical to SEQ ID NO: 3395
  CDS (651)..(2660)

SEQ ID NO: 28692 - protein, 669 aa, Streptomyces venezuelae; identical to SEQ ID NO: 3396

SEQ ID NO: 28693 - DNA, 1518 bp, Symbiobacterium thermophilum; identical to SEQ ID NO: 3397
  CDS (1)..(1518)

SEQ ID NO: 28694 - protein, 505 aa, Symbiobacterium thermophilum; identical to SEQ ID NO: 3398

SEQ ID NO: 28695 - DNA, 1476 bp, Symbiobacterium thermophilum; identical to SEQ ID NO: 3399
  CDS (1)..(1476)

SEQ ID NO: 28696 - protein, 491 aa, Symbiobacterium thermophilum; identical to SEQ ID NO: 3400

SEQ ID NO: 28697 - DNA, 2088 bp, Propionibacterium acnes; identical to SEQ ID NO: 3401
  CDS (1)..(2088)

SEQ ID NO: 28698 - protein, 695 aa, Propionibacterium acnes; identical to SEQ ID NO: 3402

SEQ ID NO: 28699 - DNA, 1458 bp, Leifsonia xyli; identical to SEQ ID NO: 3403
  CDS (1)..(1458)

SEQ ID NO: 28700 - protein, 485 aa, Leifsonia xyli; identical to SEQ ID NO: 3404

SEQ ID NO: 28701 - DNA, 1560 bp, Leifsonia xyli; identical to SEQ ID NO: 3405
  CDS (1)..(1560)

SEQ ID NO: 28702 - protein, 519 aa, Leifsonia xyli; identical to SEQ ID NO: 3406

SEQ ID NO: 28703 - DNA, 1545 bp, Debaryomyces hansenii CBS767; identical to SEQ ID NO: 3407
  CDS (1)..(1545)

SEQ ID NO: 28704 - protein, 514 aa, Debaryomyces hansenii CBS767; identical to SEQ ID NO: 3408

SEQ ID NO: 28705 - DNA, 1524 bp, Yarrowia lipolytica CLIB99; identical to SEQ ID NO: 3409
  CDS (1)..(1524)

SEQ ID NO: 28706 - protein, 507 aa, Yarrowia lipolytica CLIB99; identical to SEQ ID NO: 3410

SEQ ID NO: 28707 - DNA, 1527 bp, Kluyveromyces lactis NRRL Y; identical to SEQ ID NO: 3411
  CDS (1)..(1527)

SEQ ID NO: 28708 - protein, 508 aa, Kluyveromyces lactis NRRL Y; identical to SEQ ID NO: 3412

SEQ ID NO: 28709 - DNA, 1455 bp, Erwinia carotovora; identical to SEQ ID NO: 3413
  CDS (1)..(1455)

SEQ ID NO: 28710 - protein, 484 aa, Erwinia carotovora; identical to SEQ ID NO: 3414

SEQ ID NO: 28711 - DNA, 1563 bp, Erwinia carotovora; identical to SEQ ID NO: 3415
  CDS (1)..(1563)

SEQ ID NO: 28712 - protein, 520 aa, Erwinia carotovora; identical to SEQ ID NO: 3416

SEQ ID NO: 28713 - DNA, 1311 bp, Acinetobacter sp; identical to SEQ ID NO: 3417
  CDS (1)..(1311)

SEQ ID NO: 28714 - protein, 436 aa, Acinetobacter sp; identical to SEQ ID NO: 3418

SEQ ID NO: 28715 - DNA, 1521 bp, Candida glabrata CBS138; identical to SEQ ID NO: 3419
  CDS (1)..(1521)

SEQ ID NO: 28716 - protein, 506 aa, Candida glabrata CBS138; identical to SEQ ID NO: 3420

SEQ ID NO: 28717 - DNA, 1407 bp, Staphylococcus aureus; identical to SEQ ID NO: 3421
  CDS (1)..(1407)

SEQ ID NO: 28718 - protein, 468 aa, Staphylococcus aureus; identical to SEQ ID NO: 3422

SEQ ID NO: 28719 - DNA, 1407 bp, Staphylococcus aureus; identical to SEQ ID NO: 3423
  CDS (1)..(1407)

SEQ ID NO: 28720 - protein, 468 aa, Staphylococcus aureus; identical to SEQ ID NO: 3424

SEQ ID NO: 28721 - DNA, 1428 bp, Bacillus thuringiensis; identical to SEQ ID NO: 3425
  CDS (1)..(1428)

SEQ ID NO: 28722 - protein, 475 aa, Bacillus thuringiensis; identical to SEQ ID NO: 3426

SEQ ID NO: 28723 - DNA, 1443 bp, Bacillus thuringiensis; identical to SEQ ID NO: 3427
  CDS (46)..(1443)

SEQ ID NO: 28724 - protein, 465 aa, Bacillus thuringiensis; identical to SEQ ID NO: 3428

SEQ ID NO: 28725 - DNA, 2061 bp, Streptomyces venezuelae; identical to SEQ ID NO: 3429
  CDS (1)..(2061)

SEQ ID NO: 28726 - protein, 686 aa, Streptomyces venezuelae; identical to SEQ ID NO: 3430

SEQ ID NO: 28727 - DNA, 1593 bp, Photobacterium profundum; identical to SEQ ID NO: 3431
  CDS (1)..(1593)

SEQ ID NO: 28728 - protein, 530 aa, Photobacterium profundum; identical to SEQ ID NO: 3432

SEQ ID NO: 28729 - DNA, 1404 bp, Photobacterium profundum; identical to SEQ ID NO: 3433
  CDS (1)..(1404)

SEQ ID NO: 28730 - protein, 467 aa, Photobacterium profundum; identical to SEQ ID NO: 3434

SEQ ID NO: 28731 - DNA, 1404 bp, Photobacterium profundum; identical to SEQ ID NO: 3435
  CDS (1)..(1404)

SEQ ID NO: 28732 - protein, 467 aa, Photobacterium profundum; identical to SEQ ID NO: 3436

SEQ ID NO: 28733 - DNA, 1320 bp, Methanococcus maripaludis; identical to SEQ ID NO: 3437
  CDS (1)..(1320)

SEQ ID NO: 28734 - protein, 439 aa, Methanococcus maripaludis; identical to SEQ ID NO: 3438

SEQ ID NO: 28735 - DNA, 1305 bp, Parachlamydia sp; identical to SEQ ID NO: 3439
  CDS (1)..(1305)

SEQ ID NO: 28736 - protein, 434 aa, Parachlamydia sp; identical to SEQ ID NO: 3440

SEQ ID NO: 28737 - DNA, 2160 bp, Rhodopseudomonas palustris; identical to SEQ ID NO: 3441
  CDS (1)..(2160)

SEQ ID NO: 28738 - protein, 719 aa, Rhodopseudomonas palustris; identical to SEQ ID NO: 3442

SEQ ID NO: 28739 - DNA, 1554 bp, Corynebacterium diphtheriae; identical to SEQ ID NO: 3443
  CDS (1)..(1554)

SEQ ID NO: 28740 - protein, 517 aa, Corynebacterium diphtheriae; identical to SEQ ID NO: 3444

SEQ ID NO: 28741 - DNA, 3174 bp, Lycopersicon esculentum; identical to SEQ ID NO: 3445
  CDS (121)..(2829)

SEQ ID NO: 28742 - protein, 902 aa, Lycopersicon esculentum; identical to SEQ ID NO: 3446

SEQ ID NO: 28743 - DNA, 1848 bp, uncultured bacterium; identical to SEQ ID NO: 3447
  CDS (1)..(1848)

SEQ ID NO: 28744 - protein, 615 aa, uncultured bacterium; identical to SEQ ID NO: 3448

SEQ ID NO: 28745 - DNA, 2151 bp, Xanthomonas albilineans; identical to SEQ ID NO: 3449
  CDS (1)..(2151)

SEQ ID NO: 28746 - protein, 716 aa, Xanthomonas albilineans; identical to SEQ ID NO: 3450

SEQ ID NO: 28747 - DNA, 2088 bp, Streptomyces thioluteus; identical to SEQ ID NO: 3451
  CDS (1)..(2088): Xaa of translated CDS can stand for any naturally occuring amino acid which can be translated from respective CDS-codon

SEQ ID NO: 28748 - protein, 695 aa, Streptomyces thioluteus; identical to SEQ ID NO: 3452
  misc_feature (11)..(12): Xaa can be any naturally occuring amino acid

SEQ ID NO: 28749 - DNA, 1707 bp, Listeria monocytogenes; identical to SEQ ID NO: 3453
  CDS (1)..(1707)

SEQ ID NO: 28750 - protein, 568 aa, Listeria monocytogenes; identical to SEQ ID NO: 3454

SEQ ID NO: 28751 - DNA, 1374 bp, Listeria monocytogenes; identical to SEQ ID NO: 3455
  CDS (1)..(1374)

SEQ ID NO: 28752 - protein, 457 aa, Listeria monocytogenes; identical to SEQ ID NO: 3456

SEQ ID NO: 28753 - DNA, 1599 bp, Desulfovibrio vulgaris; identical to SEQ ID NO: 3457
  CDS (1)..(1599)

SEQ ID NO: 28754 - protein, 532 aa, Desulfovibrio vulgaris; identical to SEQ ID NO: 3458

SEQ ID NO: 28755 - DNA, 1899 bp, Thermus thermophilus; identical to SEQ ID NO: 3459
  CDS (1)..(1899)

SEQ ID NO: 28756 - protein, 632 aa, Thermus thermophilus; identical to SEQ ID NO: 3460

SEQ ID NO: 28757 - DNA, 1422 bp, Leptospira interrogans; identical to SEQ ID NO: 3461
  CDS (1)..(1422)

SEQ ID NO: 28758 - protein, 473 aa, Leptospira interrogans; identical to SEQ ID NO: 3462

SEQ ID NO: 28759 - DNA, 1413 bp, Bacillus cereus; identical to SEQ ID NO: 3463
  CDS (1)..(1413)

SEQ ID NO: 28760 - protein, 470 aa, Bacillus cereus; identical to SEQ ID NO: 3464

SEQ ID NO: 28761 - DNA, 1443 bp, Bacillus cereus; identical to SEQ ID NO: 3465
  CDS (1)..(1443)

SEQ ID NO: 28762 - protein, 480 aa, Bacillus cereus; identical to SEQ ID NO: 3466

SEQ ID NO: 28763 - DNA, 1476 bp, Geobacter sulfurreducens; identical to SEQ ID NO: 3467
  CDS (1)..(1476)

SEQ ID NO: 28764 - protein, 491 aa, Geobacter sulfurreducens; identical to SEQ ID NO: 3468

SEQ ID NO: 28765 - DNA, 1506 bp, Ashbya gossypii; identical to SEQ ID NO: 3469
  CDS (1)..(1506)

SEQ ID NO: 28766 - protein, 501 aa, Ashbya gossypii; identical to SEQ ID NO: 3470

SEQ ID NO: 28767 - DNA, 1362 bp, Shigella flexneri; identical to SEQ ID NO: 3471
  CDS (1)..(1362)

SEQ ID NO: 28768 - protein, 453 aa, Shigella flexneri; identical to SEQ ID NO: 3472

SEQ ID NO: 28769 - DNA, 1419 bp, Wolinella succinogenes; identical to SEQ ID NO: 3473
  CDS (1)..(1419)

SEQ ID NO: 28770 - protein, 472 aa, Wolinella succinogenes; identical to SEQ ID NO: 3474

SEQ ID NO: 28771 - DNA, 1401 bp, Vibrio vulnificus; identical to SEQ ID NO: 3475
  CDS (1)..(1401)

SEQ ID NO: 28772 - protein, 466 aa, Vibrio vulnificus; identical to SEQ ID NO: 3476

SEQ ID NO: 28773 - DNA, 2076 bp, Photorhabdus luminescens; identical to SEQ ID NO: 3477
  CDS (1)..(2076)

SEQ ID NO: 28774 - protein, 691 aa, Photorhabdus luminescens; identical to SEQ ID NO: 3478

SEQ ID NO: 28775 - DNA, 1371 bp, Photorhabdus luminescens; identical to SEQ ID NO: 3479
  CDS (1)..(1371)

SEQ ID NO: 28776 - protein, 456 aa, Photorhabdus luminescens; identical to SEQ ID NO: 3480

SEQ ID NO: 28777 - DNA, 1575 bp, Photorhabdus luminescens; identical to SEQ ID NO: 3481
  CDS (1)..(1575)

SEQ ID NO: 28778 - protein, 524 aa, Photorhabdus luminescens; identical to SEQ ID NO: 3482

SEQ ID NO: 28779 - DNA, 2934 bp, Photorhabdus luminescens; identical to SEQ ID NO: 3483
  CDS (1)..(2934)

SEQ ID NO: 28780 - protein, 977 aa, Photorhabdus luminescens; identical to SEQ ID NO: 3484

SEQ ID NO: 28781 - DNA, 1527 bp, Gloeobacter violaceus; identical to SEQ ID NO: 3485
  CDS (1)..(1527)

SEQ ID NO: 28782 - protein, 508 aa, Gloeobacter violaceus; identical to SEQ ID NO: 3486

SEQ ID NO: 28783 - DNA, 1359 bp, Gloeobacter violaceus; identical to SEQ ID NO: 3487
  CDS (1)..(1359)

SEQ ID NO: 28784 - protein, 452 aa, Gloeobacter violaceus; identical to SEQ ID NO: 3488

SEQ ID NO: 28785 - DNA, 1293 bp, Chromobacterium violaceum; identical to SEQ ID NO: 3489
  CDS (1)..(1293)

SEQ ID NO: 28786 - protein, 430 aa, Chromobacterium violaceum; identical to SEQ ID NO: 3490

SEQ ID NO: 28787 - DNA, 1467 bp, Chromobacterium violaceum; identical to SEQ ID NO: 3491
  CDS (1)..(1467)

SEQ ID NO: 28788 - protein, 488 aa, Chromobacterium violaceum; identical to SEQ ID NO: 3492

SEQ ID NO: 28789 - DNA, 1287 bp, Synechococcus sp; identical to SEQ ID NO: 3493
  CDS (1)..(1287)

SEQ ID NO: 28790 - protein, 428 aa, Synechococcus sp; identical to SEQ ID NO: 3494

SEQ ID NO: 28791 - DNA, 1521 bp, Synechococcus sp; identical to SEQ ID NO: 3495
  CDS (1)..(1521)

SEQ ID NO: 28792 - protein, 506 aa, Synechococcus sp; identical to SEQ ID NO: 3496

SEQ ID NO: 28793 - DNA, 1644 bp, Rhodopirellula baltica; identical to SEQ ID NO: 3497
  CDS (1)..(1644)

SEQ ID NO: 28794 - protein, 547 aa, Rhodopirellula baltica; identical to SEQ ID NO: 3498

SEQ ID NO: 28795 - DNA, 1554 bp, Rhodopirellula baltica; identical to SEQ ID NO: 3499
  CDS (1)..(1554)

SEQ ID NO: 28796 - protein, 517 aa, Rhodopirellula baltica; identical to SEQ ID NO: 3500

SEQ ID NO: 28797 - DNA, 1521 bp, Prochlorococcus marinus subsp; identical to SEQ ID NO: 3501
  CDS (1)..(1521)

SEQ ID NO: 28798 - protein, 506 aa, Prochlorococcus marinus subsp; identical to SEQ ID NO: 3502

SEQ ID NO: 28799 - DNA, 1341 bp, Prochlorococcus marinus; identical to SEQ ID NO: 3503
  CDS (1)..(1341)

SEQ ID NO: 28800 - protein, 446 aa, Prochlorococcus marinus; identical to SEQ ID NO: 3504

SEQ ID NO: 28801 - DNA, 1521 bp, Prochlorococcus marinus; identical to SEQ ID NO: 3505
  CDS (1)..(1521)

SEQ ID NO: 28802 - protein, 506 aa, Prochlorococcus marinus; identical to SEQ ID NO: 3506

SEQ ID NO: 28803 - DNA, 1518 bp, Prochlorococcus marinus; identical to SEQ ID NO: 3507
  CDS (1)..(1518)

SEQ ID NO: 28804 - protein, 505 aa, Prochlorococcus marinus; identical to SEQ ID NO: 3508

SEQ ID NO: 28805 - DNA, 1497 bp, Helicobacter hepaticus; identical to SEQ ID NO: 3509
  CDS (1)..(1497)

SEQ ID NO: 28806 - protein, 498 aa, Helicobacter hepaticus; identical to SEQ ID NO: 3510

SEQ ID NO: 28807 - DNA, 1386 bp, Candidatus Blochmannia floridanus; identical to SEQ ID NO: 3511
  CDS (1)..(1386)

SEQ ID NO: 28808 - protein, 461 aa, Candidatus Blochmannia floridanus; identical to SEQ ID NO: 3512

SEQ ID NO: 28809 - DNA, 1566 bp, Candidatus Blochmannia floridanus; identical to SEQ ID NO: 3513
  CDS (1)..(1566)

SEQ ID NO: 28810 - protein, 521 aa, Candidatus Blochmannia floridanus; identical to SEQ ID NO: 3514

SEQ ID NO: 28811 - DNA, 1428 bp, Bacillus cereus; identical to SEQ ID NO: 3515
  CDS (1)..(1428)

SEQ ID NO: 28812 - protein, 475 aa, Bacillus cereus; identical to SEQ ID NO: 3516

SEQ ID NO: 28813 - DNA, 1398 bp, Bacillus cereus; identical to SEQ ID NO: 3517
  CDS (1)..(1398)

SEQ ID NO: 28814 - protein, 465 aa, Bacillus cereus; identical to SEQ ID NO: 3518

SEQ ID NO: 28815 - DNA, 1416 bp, Bacillus anthracis; identical to SEQ ID NO: 3519
  CDS (1)..(1416)

SEQ ID NO: 28816 - protein, 471 aa, Bacillus anthracis; identical to SEQ ID NO: 3520

SEQ ID NO: 28817 - DNA, 1482 bp, Streptomyces avermitilis; identical to SEQ ID NO: 3521
  CDS (1)..(1482)

SEQ ID NO: 28818 - protein, 493 aa, Streptomyces avermitilis; identical to SEQ ID NO: 3522

SEQ ID NO: 28819 - DNA, 2199 bp, Streptomyces avermitilis; identical to SEQ ID NO: 3523
  CDS (1)..(2199)

SEQ ID NO: 28820 - protein, 732 aa, Streptomyces avermitilis; identical to SEQ ID NO: 3524

SEQ ID NO: 28821 - DNA, 1488 bp, Nitrosomonas europaea; identical to SEQ ID NO: 3525
  CDS (1)..(1488)

SEQ ID NO: 28822 - protein, 495 aa, Nitrosomonas europaea; identical to SEQ ID NO: 3526

SEQ ID NO: 28823 - DNA, 1293 bp, Coxiella burnetii; identical to SEQ ID NO: 3527
  CDS (1)..(1293)

SEQ ID NO: 28824 - protein, 430 aa, Coxiella burnetii; identical to SEQ ID NO: 3528

SEQ ID NO: 28825 - DNA, 1392 bp, Coxiella burnetii; identical to SEQ ID NO: 3529
  CDS (1)..(1392)

SEQ ID NO: 28826 - protein, 463 aa, Coxiella burnetii; identical to SEQ ID NO: 3530

SEQ ID NO: 28827 - DNA, 1443 bp, Tropheryma whipplei; identical to SEQ ID NO: 3531
  CDS (1)..(1443)

SEQ ID NO: 28828 - protein, 480 aa, Tropheryma whipplei; identical to SEQ ID NO: 3532

SEQ ID NO: 28829 - DNA, 1494 bp, Burkholderia multivorans; identical to SEQ ID NO: 3533
  CDS (1)..(1494)

SEQ ID NO: 28830 - protein, 497 aa, Burkholderia multivorans; identical to SEQ ID NO: 3534

SEQ ID NO: 28831 - DNA, 1851 bp, Oryza sativa; identical to SEQ ID NO: 3535
  CDS (1)..(1851)

SEQ ID NO: 28832 - protein, 616 aa, Oryza sativa; identical to SEQ ID NO: 3536

SEQ ID NO: 28833 - DNA, 2241 bp, Neurospora crassa; identical to SEQ ID NO: 3537
  CDS (493)..(2241)

SEQ ID NO: 28834 - protein, 582 aa, Neurospora crassa; identical to SEQ ID NO: 3538

SEQ ID NO: 28835 - DNA, 1359 bp, Xylella fastidiosa; identical to SEQ ID NO: 3539
  CDS (1)..(1359)

SEQ ID NO: 28836 - protein, 452 aa, Xylella fastidiosa; identical to SEQ ID NO: 3540

SEQ ID NO: 28837 - DNA, 1476 bp, Xylella fastidiosa; identical to SEQ ID NO: 3541
  CDS (1)..(1476)

SEQ ID NO: 28838 - protein, 491 aa, Xylella fastidiosa; identical to SEQ ID NO: 3542

SEQ ID NO: 28839 - DNA, 1365 bp, Vibrio parahaemolyticus; identical to SEQ ID NO: 3543
  CDS (1)..(1365)

SEQ ID NO: 28840 - protein, 454 aa, Vibrio parahaemolyticus; identical to SEQ ID NO: 3544

SEQ ID NO: 28841 - DNA, 1344 bp, Pseudomonas syringae; identical to SEQ ID NO: 3545
  CDS (1)..(1344)

SEQ ID NO: 28842 - protein, 447 aa, Pseudomonas syringae; identical to SEQ ID NO: 3546

SEQ ID NO: 28843 - DNA, 1482 bp, Pseudomonas syringae; identical to SEQ ID NO: 3547
  CDS (1)..(1482)

SEQ ID NO: 28844 - protein, 493 aa, Pseudomonas syringae; identical to SEQ ID NO: 3548

SEQ ID NO: 28845 - DNA, 1341 bp, Pseudomonas putida; identical to SEQ ID NO: 3549
  CDS (1)..(1341)

SEQ ID NO: 28846 - protein, 446 aa, Pseudomonas putida; identical to SEQ ID NO: 3550

SEQ ID NO: 28847 - DNA, 1482 bp, Pseudomonas putida; identical to SEQ ID NO: 3551
  CDS (1)..(1482)

SEQ ID NO: 28848 - protein, 493 aa, Pseudomonas putida; identical to SEQ ID NO: 3552

SEQ ID NO: 28849 - DNA, 1437 bp, Lactobacillus plantarum; identical to SEQ ID NO: 3553
  CDS (1)..(1437)

SEQ ID NO: 28850 - protein, 478 aa, Lactobacillus plantarum; identical to SEQ ID NO: 3554

SEQ ID NO: 28851 - DNA, 2166 bp, Bradyrhizobium japonicum; identical to SEQ ID NO: 3555
  CDS (1)..(2166)

SEQ ID NO: 28852 - protein, 721 aa, Bradyrhizobium japonicum; identical to SEQ ID NO: 3556

SEQ ID NO: 28853 - DNA, 1407 bp, Bacteroides thetaiotaomicron; identical to SEQ ID NO: 3557
  CDS (1)..(1407)

SEQ ID NO: 28854 - protein, 468 aa, Bacteroides thetaiotaomicron; identical to SEQ ID NO: 3558

SEQ ID NO: 28855 - DNA, 1407 bp, Staphylococcus epidermidis; identical to SEQ ID NO: 3559
  CDS (1)..(1407)

SEQ ID NO: 28856 - protein, 468 aa, Staphylococcus epidermidis; identical to SEQ ID NO: 3560

SEQ ID NO: 28857 - DNA, 1161 bp, Staphylococcus epidermidis; identical to SEQ ID NO: 3561
  CDS (10)..(1161)

SEQ ID NO: 28858 - protein, 383 aa, Staphylococcus epidermidis; identical to SEQ ID NO: 3562

SEQ ID NO: 28859 - DNA, 1401 bp, Vibrio vulnificus; identical to SEQ ID NO: 3563
  CDS (1)..(1401)

SEQ ID NO: 28860 - protein, 466 aa, Vibrio vulnificus; identical to SEQ ID NO: 3564

SEQ ID NO: 28861 - DNA, 1566 bp, Vibrio vulnificus; identical to SEQ ID NO: 3565
  CDS (1)..(1566)

SEQ ID NO: 28862 - protein, 521 aa, Vibrio vulnificus; identical to SEQ ID NO: 3566

SEQ ID NO: 28863 - DNA, 1521 bp, Synechococcus elongatus; identical to SEQ ID NO: 3567
  CDS (1)..(1521)

SEQ ID NO: 28864 - protein, 506 aa, Synechococcus elongatus; identical to SEQ ID NO: 3568

SEQ ID NO: 28865 - DNA, 1377 bp, Synechococcus elongatus; identical to SEQ ID NO: 3569
  CDS (1)..(1377)

SEQ ID NO: 28866 - protein, 458 aa, Synechococcus elongatus; identical to SEQ ID NO: 3570

SEQ ID NO: 28867 - DNA, 1362 bp, Streptococcus mutans; identical to SEQ ID NO: 3571
  CDS (1)..(1362)

SEQ ID NO: 28868 - protein, 453 aa, Streptococcus mutans; identical to SEQ ID NO: 3572

SEQ ID NO: 28869 - DNA, 1725 bp, Shewanella oneidensis; identical to SEQ ID NO: 3573
  CDS (1)..(1725)

SEQ ID NO: 28870 - protein, 574 aa, Shewanella oneidensis; identical to SEQ ID NO: 3574

SEQ ID NO: 28871 - DNA, 1404 bp, Shewanella oneidensis; identical to SEQ ID NO: 3575
  CDS (1)..(1404)

SEQ ID NO: 28872 - protein, 467 aa, Shewanella oneidensis; identical to SEQ ID NO: 3576

SEQ ID NO: 28873 - DNA, 1407 bp, Oceanobacillus iheyensis; identical to SEQ ID NO: 3577
  CDS (1)..(1407)

SEQ ID NO: 28874 - protein, 468 aa, Oceanobacillus iheyensis; identical to SEQ ID NO: 3578

SEQ ID NO: 28875 - DNA, 1362 bp, Escherichia coli O6; identical to SEQ ID NO: 3579
  CDS (1)..(1362)

SEQ ID NO: 28876 - protein, 453 aa, Escherichia coli O6; identical to SEQ ID NO: 3580

SEQ ID NO: 28877 - DNA, 1668 bp, Corynebacterium efficiens; identical to SEQ ID NO: 3581
  CDS (1)..(1668)

SEQ ID NO: 28878 - protein, 555 aa, Corynebacterium efficiens; identical to SEQ ID NO: 3582

SEQ ID NO: 28879 - DNA, 1869 bp, Corynebacterium efficiens; identical to SEQ ID NO: 3583
  CDS (1)..(1869)

SEQ ID NO: 28880 - protein, 622 aa, Corynebacterium efficiens; identical to SEQ ID NO: 3584

SEQ ID NO: 28881 - DNA, 1557 bp, Bifidobacterium longum; identical to SEQ ID NO: 3585
  CDS (1)..(1557)

SEQ ID NO: 28882 - protein, 518 aa, Bifidobacterium longum; identical to SEQ ID NO: 3586

SEQ ID NO: 28883 - DNA, 1482 bp, Streptomyces globisporus; identical to SEQ ID NO: 3587
  CDS (1)..(1482)

SEQ ID NO: 28884 - protein, 493 aa, Streptomyces globisporus; identical to SEQ ID NO: 3588

SEQ ID NO: 28885 - DNA, 1686 bp, Streptococcus pyogenes; identical to SEQ ID NO: 3589
  CDS (1)..(1686)

SEQ ID NO: 28886 - protein, 561 aa, Streptococcus pyogenes; identical to SEQ ID NO: 3590

SEQ ID NO: 28887 - DNA, 1887 bp, Chlorobium tepidum; identical to SEQ ID NO: 3591
  CDS (1)..(1887)

SEQ ID NO: 28888 - protein, 628 aa, Chlorobium tepidum; identical to SEQ ID NO: 3592

SEQ ID NO: 28889 - DNA, 1515 bp, Chlorobium tepidum; identical to SEQ ID NO: 3593
  CDS (1)..(1515)

SEQ ID NO: 28890 - protein, 504 aa, Chlorobium tepidum; identical to SEQ ID NO: 3594

SEQ ID NO: 28891 - DNA, 1832 bp, Acinetobacter baumannii; identical to SEQ ID NO: 3595
  CDS (321)..(1637)

SEQ ID NO: 28892 - protein, 438 aa, Acinetobacter baumannii; identical to SEQ ID NO: 3596

SEQ ID NO: 28893 - DNA, 1356 bp, Xanthomonas campestris; identical to SEQ ID NO: 3597
  CDS (1)..(1356)

SEQ ID NO: 28894 - protein, 451 aa, Xanthomonas campestris; identical to SEQ ID NO: 3598

SEQ ID NO: 28895 - DNA, 1356 bp, Xanthomonas axonopodis; identical to SEQ ID NO: 3599
  CDS (1)..(1356)

SEQ ID NO: 28896 - protein, 451 aa, Xanthomonas axonopodis; identical to SEQ ID NO: 3600

SEQ ID NO: 28897 - DNA, 1476 bp, Xanthomonas axonopodis; identical to SEQ ID NO: 3601
  CDS (1)..(1476)

SEQ ID NO: 28898 - protein, 491 aa, Xanthomonas axonopodis; identical to SEQ ID NO: 3602

SEQ ID NO: 28899 - DNA, 1839 bp, Methanosarcina mazei; identical to SEQ ID NO: 3603
  CDS (1)..(1839)

SEQ ID NO: 28900 - protein, 612 aa, Methanosarcina mazei; identical to SEQ ID NO: 3604

SEQ ID NO: 28901 - DNA, 1362 bp, Fusobacterium nucleatum; identical to SEQ ID NO: 3605
  CDS (1)..(1362)

SEQ ID NO: 28902 - protein, 453 aa, Fusobacterium nucleatum; identical to SEQ ID NO: 3606

SEQ ID NO: 28903 - DNA, 1431 bp, Thermoanaerobacter tengcongensis; identical to SEQ ID NO: 3607
  CDS (1)..(1431)

SEQ ID NO: 28904 - protein, 476 aa, Thermoanaerobacter tengcongensis; identical to SEQ ID NO: 3608

SEQ ID NO: 28905 - DNA, 1683 bp, Methanosarcina acetivorans; identical to SEQ ID NO: 3609
  CDS (1)..(1683)

SEQ ID NO: 28906 - protein, 560 aa, Methanosarcina acetivorans; identical to SEQ ID NO: 3610

SEQ ID NO: 28907 - DNA, 1407 bp, Methanopyrus kandleri; identical to SEQ ID NO: 3611
  CDS (1)..(1407)

SEQ ID NO: 28908 - protein, 468 aa, Methanopyrus kandleri; identical to SEQ ID NO: 3612

SEQ ID NO: 28909 - DNA, 1299 bp, Pyrococcus furiosus; identical to SEQ ID NO: 3613
  CDS (1)..(1299)

SEQ ID NO: 28910 - protein, 432 aa, Pyrococcus furiosus; identical to SEQ ID NO: 3614

SEQ ID NO: 28911 - DNA, 1347 bp, Clostridium perfringens; identical to SEQ ID NO: 3615
  CDS (1)..(1347)

SEQ ID NO: 28912 - protein, 448 aa, Clostridium perfringens; identical to SEQ ID NO: 3616

SEQ ID NO: 28913 - DNA, 1530 bp, Ralstonia solanacearum; identical to SEQ ID NO: 3617
  CDS (1)..(1530)

SEQ ID NO: 28914 - protein, 509 aa, Ralstonia solanacearum; identical to SEQ ID NO: 3618

SEQ ID NO: 28915 - DNA, 1269 bp, Pyrobaculum aerophilum; identical to SEQ ID NO: 3619
  CDS (1)..(1269)

SEQ ID NO: 28916 - protein, 422 aa, Pyrobaculum aerophilum; identical to SEQ ID NO: 3620

SEQ ID NO: 28917 - DNA, 1479 bp, Arabidopsis thaliana; identical to SEQ ID NO: 3621
  CDS (1)..(1479)

SEQ ID NO: 28918 - protein, 492 aa, Arabidopsis thaliana; identical to SEQ ID NO: 3622

SEQ ID NO: 28919 - DNA, 1302 bp, Sulfolobus tokodaii; identical to SEQ ID NO: 3623
  CDS (1)..(1302)

SEQ ID NO: 28920 - protein, 433 aa, Sulfolobus tokodaii; identical to SEQ ID NO: 3624

SEQ ID NO: 28921 - DNA, 1056 bp, Thermoplasma volcanium; identical to SEQ ID NO: 3625
  CDS (1)..(1056)

SEQ ID NO: 28922 - protein, 351 aa, Thermoplasma volcanium; identical to SEQ ID NO: 3626

SEQ ID NO: 28923 - DNA, 2202 bp, Rhizobium loti; identical to SEQ ID NO: 3627
  CDS (1)..(2202)

SEQ ID NO: 28924 - protein, 733 aa, Rhizobium loti; identical to SEQ ID NO: 3628

SEQ ID NO: 28925 - DNA, 3859 bp, Brucella abortus; identical to SEQ ID NO: 3629
  CDS (341)..(2536): Xaa of translated CDS can stand for any naturally occuring amino acid which can be translated from respective CDS-codon

SEQ ID NO: 28926 - protein, 731 aa, Brucella abortus; identical to SEQ ID NO: 3630
  misc_feature (323)..(323): Xaa can be any naturally occuring amino acid
  misc_feature (602)..(602): Xaa can be any naturally occuring amino acid

SEQ ID NO: 28927 - DNA, 1410 bp, Bradyrhizobium japonicum; identical to SEQ ID NO: 3631
  CDS (1)..(1410)

SEQ ID NO: 28928 - protein, 469 aa, Bradyrhizobium japonicum; identical to SEQ ID NO: 3632

SEQ ID NO: 28929 - DNA, 2145 bp, Catharanthus roseus; identical to SEQ ID NO: 3633
  CDS (53)..(1879)

SEQ ID NO: 28930 - protein, 608 aa, Catharanthus roseus; identical to SEQ ID NO: 3634

SEQ ID NO: 28931 - DNA, 1551 bp, Pasteurella multocida; identical to SEQ ID NO: 3635
  CDS (1)..(1551)

SEQ ID NO: 28932 - protein, 516 aa, Pasteurella multocida; identical to SEQ ID NO: 3636

SEQ ID NO: 28933 - DNA, 1416 bp, Streptomyces coelicolor; identical to SEQ ID NO: 3637
  CDS (1)..(1416)

SEQ ID NO: 28934 - protein, 471 aa, Streptomyces coelicolor; identical to SEQ ID NO: 3638

SEQ ID NO: 28935 - DNA, 1350 bp, Xanthomonas albilineans; identical to SEQ ID NO: 3639
  CDS (1)..(1350)

SEQ ID NO: 28936 - protein, 449 aa, Xanthomonas albilineans; identical to SEQ ID NO: 3640

SEQ ID NO: 28937 - DNA, 1071 bp, Thermoplasma acidophilum; identical to SEQ ID NO: 3641
  CDS (1)..(1071)

SEQ ID NO: 28938 - protein, 356 aa, Thermoplasma acidophilum; identical to SEQ ID NO: 3642

SEQ ID NO: 28939 - DNA, 2986 bp, Buchnera aphidicola; identical to SEQ ID NO: 3643
  CDS (1)..(1566)

SEQ ID NO: 28940 - protein, 521 aa, Buchnera aphidicola; identical to SEQ ID NO: 3644

SEQ ID NO: 28941 - DNA, 2630 bp, Buchnera aphidicola; identical to SEQ ID NO: 3645
  CDS (1)..(1566)

SEQ ID NO: 28942 - protein, 521 aa, Buchnera aphidicola; identical to SEQ ID NO: 3646

SEQ ID NO: 28943 - DNA, 2591 bp, Buchnera aphidicola; identical to SEQ ID NO: 3647
  CDS (1)..(1560)

SEQ ID NO: 28944 - protein, 519 aa, Buchnera aphidicola; identical to SEQ ID NO: 3648

SEQ ID NO: 28945 - DNA, 1706 bp, Bordetella bronchiseptica; identical to SEQ ID NO: 3649
  CDS (75)..(1595)

SEQ ID NO: 28946 - protein, 506 aa, Bordetella bronchiseptica; identical to SEQ ID NO: 3650

SEQ ID NO: 28947 - DNA, 2027 bp, Buchnera aphidicola; identical to SEQ ID NO: 3651
  CDS (1)..(1587)

SEQ ID NO: 28948 - protein, 528 aa, Buchnera aphidicola; identical to SEQ ID NO: 3652

SEQ ID NO: 28949 - DNA, 1569 bp, Buchnera aphidicola; identical to SEQ ID NO: 3653
  CDS (1)..(1569)

SEQ ID NO: 28950 - protein, 522 aa, Buchnera aphidicola; identical to SEQ ID NO: 3654

SEQ ID NO: 28951 - DNA, 2124 bp, Oryza sativa; identical to SEQ ID NO: 3655
  CDS (19)..(1839)

SEQ ID NO: 28952 - protein, 606 aa, Oryza sativa; identical to SEQ ID NO: 3656

SEQ ID NO: 28953 - DNA, 1734 bp, Oryza sativa; identical to SEQ ID NO: 3657
  CDS (1)..(1734)

SEQ ID NO: 28954 - protein, 577 aa, Oryza sativa; identical to SEQ ID NO: 3658

SEQ ID NO: 28955 - DNA, 1888 bp, Lactococcus lactis; identical to SEQ ID NO: 3659
  CDS (147)..(1559)

SEQ ID NO: 28956 - protein, 470 aa, Lactococcus lactis; identical to SEQ ID NO: 3660

SEQ ID NO: 28957 - DNA, 1317 bp, Aeropyrum pernix; identical to SEQ ID NO: 3661
  CDS (1)..(1317)

SEQ ID NO: 28958 - protein, 438 aa, Aeropyrum pernix; identical to SEQ ID NO: 3662

SEQ ID NO: 28959 - DNA, 1788 bp, Arabidopsis thaliana; identical to SEQ ID NO: 3663
  CDS (1)..(1788)

SEQ ID NO: 28960 - protein, 595 aa, Arabidopsis thaliana; identical to SEQ ID NO: 3664

SEQ ID NO: 28961 - DNA, 2017 bp, Arthrobacter globiformis; identical to SEQ ID NO: 3665
  misc_feature (12)..(12): n is a, c, g, or t
  misc_feature (36)..(36): n is a, c, g, or t
  misc_feature (44)..(44): n is a, c, g, or t
  misc_feature (55)..(55): n is a, c, g, or t
  misc_feature (66)..(66): n is a, c, g, or t
  misc_feature (279)..(280): n is a, c, g, or t
  CDS (402)..(1997)

SEQ ID NO: 28962 - protein, 531 aa, Arthrobacter globiformis; identical to SEQ ID NO: 3666

SEQ ID NO: 28963 - DNA, 2199 bp, Azospirillum brasilense; identical to SEQ ID NO: 3667
  CDS (1)..(2199)

SEQ ID NO: 28964 - protein, 732 aa, Azospirillum brasilense; identical to SEQ ID NO: 3668

SEQ ID NO: 28965 - DNA, 1542 bp, Bacillus pumilus; identical to SEQ ID NO: 3669
  CDS (1)..(1542)

SEQ ID NO: 28966 - protein, 513 aa, Bacillus pumilus; identical to SEQ ID NO: 3670

SEQ ID NO: 28967 - DNA, 1527 bp, Bacillus stearothermophilus; identical to SEQ ID NO: 3671
  CDS (1)..(1527)

SEQ ID NO: 28968 - protein, 508 aa, Bacillus stearothermophilus; identical to SEQ ID NO: 3672

SEQ ID NO: 28969 - DNA, 1545 bp, Buchnera aphidicola; identical to SEQ ID NO: 3673
  CDS (1)..(1545)

SEQ ID NO: 28970 - protein, 514 aa, Buchnera aphidicola; identical to SEQ ID NO: 3674

SEQ ID NO: 28971 - DNA, 1593 bp, Buchnera aphidicola; identical to SEQ ID NO: 3675
  CDS (1)..(1593)

SEQ ID NO: 28972 - protein, 530 aa, Buchnera aphidicola; identical to SEQ ID NO: 3676

SEQ ID NO: 28973 - DNA, 3037 bp, Buchnera aphidicola; identical to SEQ ID NO: 3677
  CDS (1)..(1581)

SEQ ID NO: 28974 - protein, 526 aa, Buchnera aphidicola; identical to SEQ ID NO: 3678

SEQ ID NO: 28975 - DNA, 1557 bp, Corynebacterium glutamicum; identical to SEQ ID NO: 3679
  CDS (1)..(1557)

SEQ ID NO: 28976 - protein, 518 aa, Corynebacterium glutamicum; identical to SEQ ID NO: 3680

SEQ ID NO: 28977 - DNA, 1476 bp, Neisseria gonorrhoeae; identical to SEQ ID NO: 3681
  CDS (1)..(1476)

SEQ ID NO: 28978 - protein, 491 aa, Neisseria gonorrhoeae; identical to SEQ ID NO: 3682

SEQ ID NO: 28979 - DNA, 1476 bp, Neisseria meningitidis; identical to SEQ ID NO: 3683
  CDS (1)..(1476)

SEQ ID NO: 28980 - protein, 491 aa, Neisseria meningitidis; identical to SEQ ID NO: 3684

SEQ ID NO: 28981 - DNA, 1563 bp, Salmonella typhimurium; identical to SEQ ID NO: 3685
  CDS (1)..(1563)

SEQ ID NO: 28982 - protein, 520 aa, Salmonella typhimurium; identical to SEQ ID NO: 3686

SEQ ID NO: 28983 - DNA, 2502 bp, Serratia marcescens; identical to SEQ ID NO: 3687
  CDS (280)..(1839)

SEQ ID NO: 28984 - protein, 519 aa, Serratia marcescens; identical to SEQ ID NO: 3688

SEQ ID NO: 28985 - DNA, 1626 bp, Vibrio parahaemolyticus; identical to SEQ ID NO: 3689
  CDS (1)..(1626)

SEQ ID NO: 28986 - protein, 541 aa, Vibrio parahaemolyticus; identical to SEQ ID NO: 3690

SEQ ID NO: 28987 - DNA, 24 bp, Artificial sequence
  Primer sequence
atgcaaacacaaaaaccgactctc

SEQ ID NO: 28988 - DNA, 25 bp, Artificial sequence
  Primer sequence
ttagaaagtctcctgtgcatgatgc

SEQ ID NO: 28989 - protein, 810 aa, Artificial sequence
  Consensus
  Variant (2)..(2): Xaa in position 2 is any amino acid
  Variant (3)..(63): Xaa in position 3 to 63 is any or no amino acid
  Variant (65)..(93): Xaa in position 65 to 93 is any amino acid
  Variant (94)..(243): Xaa in position 94 to 243 is any or no amino acid
  Variant (245)..(247): Xaa in position 245 to 247 is any or no amino acid
  Variant (250)..(254): Xaa in position 250 to 254 is any or no amino acid
  Variant (256)..(262): Xaa in position 256 to 262 is any amino acid
  Variant (263)..(290): Xaa in position 263 to 290 is any or no amino acid
  Variant (293)..(300): Xaa in position 293 to 300 is any amino acid
  Variant (301)..(301): Xaa in position 301 is any or no amino acid
  Variant (303)..(304): Xaa in position 303 to 304 is any amino acid
  Variant (306)..(312): Xaa in position 306 to 312 is any amino acid
  Variant (314)..(324): Xaa in position 314 to 324 is any amino acid
  Variant (325)..(447): Xaa in position 325 to 447 is any or no amino acid
  Variant (449)..(451): Xaa in position 449 to 451 is any amino acid
  Variant (453)..(458): Xaa in position 453 to 458 is any amino acid
  Variant (460)..(461): Xaa in position 460 to 461 is any amino acid
  Variant (464)..(464): Xaa in position 464 is any amino acid
  Variant (468)..(469): Xaa in position 468 to 469 is any amino acid
  Variant (471)..(482): Xaa in position 471 to 482 is any amino acid
  Variant (483)..(490): Xaa in position 483 to 490 is any or no amino acid
  Variant (492)..(493): Xaa in position 492 to 493 is any amino acid
  Variant (496)..(497): Xaa in position 496 to 497 is any amino acid
  Variant (503)..(504): Xaa in position 503 to 504 is any amino acid
  Variant (507)..(510): Xaa in position 507 to 510 is any amino acid
  Variant (511)..(525): Xaa in position 511 to 525 is any or no amino acid
  Variant (528)..(528): Xaa in position 528 is any amino acid
  Variant (533)..(534): Xaa in position 533 to 534 is any amino acid
  Variant (536)..(541): Xaa in position 536 to 541 is any amino acid
  Variant (542)..(561): Xaa in position 542 to 561 is any or no amino acid
  Variant (563)..(565): Xaa in position 563 to 565 is any amino acid
  Variant (571)..(572): Xaa in position 571 to 572 is any amino acid
  Variant (575)..(585): Xaa in position 575 to 585 is any or no amino acid
  Variant (587)..(589): Xaa in position 587 to 589 is any amino acid
  Variant (590)..(592): Xaa in position 590 to 592 is any or no amino acid
  Variant (594)..(597): Xaa in position 594 to 597 is any amino acid
  Variant (600)..(600): Xaa in position 600 is any amino acid
  Variant (601)..(601): Xaa in position 601 is any or no amino acid
  Variant (604)..(604): Xaa in position 604 is any amino acid
  Variant (611)..(611): Xaa in position 611 is any amino acid
  Variant (619)..(620): Xaa in position 619 to 620 is any amino acid
  Variant (621)..(638): Xaa in position 621 to 638 is any or no amino acid
  Variant (641)..(641): Xaa in position 641 is any amino acid
  Variant (643)..(647): Xaa in position 643 to 647 is any amino acid
  Variant (650)..(650): Xaa in position 650 is any amino acid
  Variant (653)..(653): Xaa in position 653 is any amino acid
  Variant (655)..(655): Xaa in position 655 is any amino acid
  Variant (660)..(660): Xaa in position 660 is any amino acid
  Variant (662)..(662): Xaa in position 662 is any amino acid
  Variant (664)..(664): Xaa in position 664 is any amino acid
  Variant (666)..(670): Xaa in position 666 to 670 is any amino acid
  Variant (671)..(673): Xaa in position 671 to 673 is any or no amino acid
  Variant (675)..(677): Xaa in position 675 to 677 is any amino acid
  Variant (679)..(680): Xaa in position 679 to 680 is any amino acid
  Variant (695)..(696): Xaa in position 695 to 696 is any or no amino acid
  Variant (699)..(700): Xaa in position 699 to 700 is any amino acid
  Variant (703)..(705): Xaa in position 703 to 705 is any amino acid
  Variant (708)..(708): Xaa in position 708 is any amino acid
  Variant (709)..(709): Xaa in position 709 is any or no amino acid
  Variant (711)..(711): Xaa in position 711 is any amino acid
  Variant (717)..(720): Xaa in position 717 to 720 is any amino acid
  Variant (722)..(722): Xaa in position 722 is any amino acid
  Variant (723)..(742): Xaa in position 723 to 742 is any or no amino acid
  Variant (744)..(745): Xaa in position 744 to 745 is any amino acid
  Variant (747)..(747): Xaa in position 747 is any amino acid
  Variant (751)..(760): Xaa in position 751 to 760 is any amino acid
  Variant (761)..(780): Xaa in position 761 to 780 is any or no amino acid
  Variant (787)..(787): Xaa in position 787 is any amino acid
  Variant (788)..(788): Xaa in position 788 is any or no amino acid
  Variant (791)..(791): Xaa in position 791 is any amino acid
  Variant (793)..(794): Xaa in position 793 to 794 is any amino acid
  Variant (796)..(797): Xaa in position 796 to 797 is any amino acid
  Variant (800)..(801): Xaa in position 800 to 801 is any amino acid
  Variant (803)..(805): Xaa in position 803 to 805 is any amino acid
  Variant (807)..(809): Xaa in position 807 to 809 is any amino acid
SXXXXXXXXXXXXXXXXXXXXXXXXXXXXXXXXXXXXXXXXXXXXXXXXXXXXXXXXXXXXXXRXXXXXXXXXXXXXXXXXXXXXXXXXXXXXXXXXXXXXXXXXXXXXXXXXXXXXXXXXXXXXXXXXXXXXXXXXXXXXXXXXXXXXXXXXXXXXXXXXXXXXXXXXXXXXXXXXXXXXXXXXXXXXXXXXXXXXXXXXXXXXXXXXXXXXXXXXXXXXXXXXXXXXXXXXXXXXXXXXXXGXXXYDXXXXXEXXXXXXXXXXXXXXXXXXXXXXXXXXXXXXXXXXXPDXXXXXXXXXLXXDXXXXXXXLXXXXXXXXXXXXXXXXXXXXXXXXXXXXXXXXXXXXXXXXXXXXXXXXXXXXXXXXXXXXXXXXXXXXXXXXXXXXXXXXXXXXXXXXXXXXXXXXXXXXXXXXXXXXXXXXXXXXXXXXXXXXXXXXXXXXXXYXXXVXXXXXXIXXGDXFQVXXSXXXXXXXXXXXXXXXXXXXXYXXLRXXNPSPYXXYLXXXXXXXXXXXXXXXXXXXLVXSSPEXXVXXXXXXXXXXXXXXXXXXXXXXXXXXVXXXPIAGTXXRGXXXXXXXXXXXDXXXXXXLXXXXKEXXAEXLMLVDLXRNDLGRVXXXXXXXXXXXXXXXXXXXXSVXVXXXXXVEXYSXVXHLVSXVXGXLXXXXXXXXDXXXAXXPAGTVTGAPKVRAMXXIIXXLEXXXRGXXYXGAVGYXXXXGXXXXXXXXXXXXXXXXXXXXXDXXIXIRTXXXXXXXXXXXXXXXXXXXXXXXXXXXXXXAGAGIVXXDSXPXXEXXETXXKXXXLXXXI

SEQ ID NO: 28990 - protein, 55 aa, Artificial sequence; identical to SEQ ID NO: 6162
  Consensus
  Variant (1)..(1): Xaa in position 1 is Ser, Ala, Thr, Pro or Val
  Variant (2)..(2): Xaa in position 2 is Pro, Ala, Asn, Ser or Gly
  Variant (3)..(3): Xaa in position 3 is Tyr, Phe, His or Arg
  Variant (4)..(13): Xaa in position 4 to 13 is any amino acid
  Variant (14)..(22): Xaa in position 14 to 22 is any or no amino acid
  Variant (23)..(23): Xaa in position 23 is Leu, Ile or Val
  Variant (24)..(24): Xaa in position 24 is any amino acid
  Variant (25)..(25): Xaa in position 25 is Gly, Ser, Ala or Cys
  Variant (26)..(26): Xaa in position 26 is any amino acid
  Variant (30)..(38): Xaa in position 30 to 38 is any amino acid
  Variant (39)..(46): Xaa in position 39 to 46 is any or no amino acid
  Variant (47)..(47): Xaa in position 47 is Val, Ile, Ala, Leu or Phe
  Variant (48)..(50): Xaa in position 48 to 50 is any amino acid
  Variant (52)..(52): Xaa in position 52 is Ile, Leu or Met
  Variant (53)..(53): Xaa in position 53 is Ala, Lys or Ser
  Variant (55)..(55): Xaa in position 55 is Thr or Ser

SEQ ID NO: 28991 - protein, 49 aa, Artificial sequence; identical to SEQ ID NO: 6163
  Consensus
  Variant (2)..(2): Xaa in position 2 is Glu, Asp, Gln or Asn
  Variant (3)..(3): Xaa in position 3 is any amino acid
  Variant (4)..(4): Xaa in position 4 is Ala or Ser
  Variant (6)..(6): Xaa in position 6 is His, Asn or Leu
  Variant (7)..(7): Xaa in position 7 is any amino acid
  Variant (8)..(8): Xaa in position 8 is Met or Val
  Variant (9)..(9): Xaa in position 9 is Leu, Ile, Cys or Ser
  Variant (10)..(10): Xaa in position 10 is Val, Ile, Leu, Thr or Ser
  Variant (12)..(12): Xaa in position 12 is Leu or Val
  Variant (13)..(13): Xaa in position 13 is any amino acid
  Variant (15)..(15): Xaa in position 15 is Asn, His or Glu
  Variant (16)..(16): Xaa in position 16 is Asp or Glu
  Variant (17)..(17): Xaa in position 17 is Leu, Ile, Val, Lys or Met
  Variant (18)..(20): Xaa in position 18 to 20 is any amino acid
  Variant (21)..(21): Xaa in position 21 is Cys, Ser or Ala
  Variant (22)..(23): Xaa in position 22 to 23 is any amino acid
  Variant (24)..(24): Xaa in position 24 is any or no amino acid
  Variant (25)..(25): Xaa in position 25 is Ser, Thr, Glu or Lys
  Variant (26)..(27): Xaa in position 26 to 27 is any amino acid
  Variant (28)..(28): Xaa in position 28 is Val, Ile, Leu, Thr or Ala
  Variant (29)..(33): Xaa in position 29 to 33 is any amino acid
  Variant (34)..(34): Xaa in position 34 is Val, Ile, Leu or Thr
  Variant (35)..(36): Xaa in position 35 to 36 is any amino acid
  Variant (37)..(37): Xaa in position 37 is Tyr, Phe or Arg
  Variant (38)..(39): Xaa in position 38 to 39 is any amino acid
  Variant (40)..(40): Xaa in position 40 is Val, Leu or Ile
  Variant (41)..(41): Xaa in position 41 is any amino acid
  Variant (42)..(42): Xaa in position 42 is His or Gln
  Variant (43)..(43): Xaa in position 43 is Leu, Ile, Met or Thr
  Variant (44)..(44): Xaa in position 44 is any amino acid
  Variant (45)..(45): Xaa in position 45 is Ser, Asp or Thr
  Variant (46)..(46): Xaa in position 46 is any amino acid
  Variant (47)..(47): Xaa in position 47 is Val or Ile
  Variant (48)..(48): Xaa in position 48 is any amino acid
  Variant (49)..(49): Xaa in position 49 is Gly or Ala

SEQ ID NO: 28992 - protein, 52 aa, Artificial sequence; identical to SEQ ID NO: 6164
  Consensus
  Variant (1)..(1): Xaa in position 1 is Gly or Val
  Variant (2)..(2): Xaa in position 2 is Thr or Ser
  Variant (3)..(3): Xaa in position 3 is Val, Leu, Ile, Met or Ala
  Variant (4)..(4): Xaa in position 4 is Thr or Ser
  Variant (6)..(6): Xaa in position 6 is Ala, Cys, Ser or Ile
  Variant (9)..(10): Xaa in position 9 to 10 is any amino acid
  Variant (11)..(11): Xaa in position 11 is Ala, Thr, Ser or Cys
  Variant (12)..(12): Xaa in position 12 is Met, Ile, Leu or Val
  Variant (13)..(13): Xaa in position 13 is any amino acid
  Variant (14)..(14): Xaa in position 14 is any or no amino acid
  Variant (15)..(15): Xaa in position 15 is Ile, Leu or Val
  Variant (16)..(17): Xaa in position 16 to 17 is any amino acid
  Variant (18)..(18): Xaa in position 18 is any or no amino acid
  Variant (19)..(19): Xaa in position 19 is Glu or Tyr
  Variant (20)..(22): Xaa in position 20 to 22 is any amino acid
  Variant (24)..(25): Xaa in position 24 to 25 is any amino acid
  Variant (26)..(26): Xaa in position 26 is Tyr, Phe or Trp
  Variant (27)..(27): Xaa in position 27 is Gly, Ala, Ser, Cys, Thr or Tyr
  Variant (29)..(30): Xaa in position 29 to 30 is any amino acid
  Variant (31)..(31): Xaa in position 31 is Gly, Ala, Leu, Phe or Ile
  Variant (32)..(41): Xaa in position 32 to 41 is any amino acid
  Variant (42)..(47): Xaa in position 42 to 47 is any or no amino acid
  Variant (48)..(48): Xaa in position 48 is Ile, Leu, Val or Met
  Variant (49)..(49): Xaa in position 49 is any amino acid
  Variant (50)..(50): Xaa in position 50 is Ile or Leu
  Variant (52)..(52): Xaa in position 52 is Thr, Ser, Met or Ala

SEQ ID NO: 28993 - protein, 20 aa, Artificial sequence
  Consensus
  Variant (1)..(1): Xaa in position 1 is Gly or Ala
  Variant (2)..(2): Xaa in position 2 is Ala, Gly, Cys or Ser
  Variant (3)..(3): Xaa in position 3 is Gly, Ala or Thr
  Variant (4)..(4): Xaa in position 4 is Ile, Val or Leu
  Variant (5)..(5): Xaa in position 5 is Val, Thr, Leu or Ile
  Variant (6)..(7): Xaa in position 6 to 7 is any amino acid
  Variant (9)..(12): Xaa in position 9 to 12 is any amino acid
  Variant (14)..(15): Xaa in position 14 to 15 is any amino acid
  Variant (17)..(19): Xaa in position 17 to 19 is any amino acid
XXXXXXXSXXXXEXXEXXXK

SEQ ID NO: 28994 - DNA, 291 bp, Escherichia coli K12; identical to SEQ ID NO: 18608
  CDS (1)..(291): transl_table=11

SEQ ID NO: 28995 - protein, 96 aa, Escherichia coli K12; identical to SEQ ID NO: 18609

SEQ ID NO: 28996 - DNA, 216 bp, Bacteriophage 933W; identical to SEQ ID NO: 18610
  CDS (1)..(216): transl_table=11

SEQ ID NO: 28997 - protein, 71 aa, Bacteriophage 933W; identical to SEQ ID NO: 18611

SEQ ID NO: 28998 - DNA, 291 bp, Bacteriophage VT2-Sa; identical to SEQ ID NO: 18612
  CDS (1)..(291): transl_table=11

SEQ ID NO: 28999 - protein, 96 aa, Bacteriophage VT2-Sa; identical to SEQ ID NO: 18613

SEQ ID NO: 29000 - DNA, 315 bp, Escherichia coli O157:H7 EDL933; identical to SEQ ID NO: 18614
  CDS (1)..(315): transl_table=11

SEQ ID NO: 29001 - protein, 104 aa, Escherichia coli O157:H7 EDL933; identical to SEQ ID NO: 18615

SEQ ID NO: 29002 - DNA, 315 bp, Escherichia coli O157:H7 EDL933; identical to SEQ ID NO: 18616
  CDS (1)..(315): transl_table=11

SEQ ID NO: 29003 - protein, 104 aa, Escherichia coli O157:H7 EDL933; identical to SEQ ID NO: 18617

SEQ ID NO: 29004 - DNA, 273 bp, Escherichia coli O157:H7 EDL933; identical to SEQ ID NO: 18618
  CDS (1)..(273): transl_table=11

SEQ ID NO: 29005 - protein, 90 aa, Escherichia coli O157:H7 EDL933; identical to SEQ ID NO: 18619

SEQ ID NO: 29006 - DNA, 216 bp, Escherichia coli O157:H7; identical to SEQ ID NO: 18620
  CDS (1)..(216): transl_table=11

SEQ ID NO: 29007 - protein, 71 aa, Escherichia coli O157:H7; identical to SEQ ID NO: 18621

SEQ ID NO: 29008 - DNA, 207 bp, Escherichia coli O157:H7; identical to SEQ ID NO: 18622
  CDS (1)..(207): transl_table=11

SEQ ID NO: 29009 - protein, 68 aa, Escherichia coli O157:H7; identical to SEQ ID NO: 18623

SEQ ID NO: 29010 - DNA, 216 bp, Escherichia coli O157:H7; identical to SEQ ID NO: 18624
  CDS (1)..(216): transl_table=11

SEQ ID NO: 29011 - protein, 71 aa, Escherichia coli O157:H7; identical to SEQ ID NO: 18625

SEQ ID NO: 29012 - DNA, 216 bp, Escherichia coli O157:H7; identical to SEQ ID NO: 18626
  CDS (1)..(216): transl_table=11

SEQ ID NO: 29013 - protein, 71 aa, Escherichia coli O157:H7; identical to SEQ ID NO: 18627

SEQ ID NO: 29014 - DNA, 216 bp, Escherichia coli O157:H7; identical to SEQ ID NO: 18628
  CDS (1)..(216): transl_table=11

SEQ ID NO: 29015 - protein, 71 aa, Escherichia coli O157:H7; identical to SEQ ID NO: 18629

SEQ ID NO: 29016 - DNA, 207 bp, Escherichia coli O157:H7; identical to SEQ ID NO: 18630
  CDS (1)..(207): transl_table=11

SEQ ID NO: 29017 - protein, 68 aa, Escherichia coli O157:H7; identical to SEQ ID NO: 18631

SEQ ID NO: 29018 - DNA, 207 bp, Escherichia coli O157:H7; identical to SEQ ID NO: 18632
  CDS (1)..(207): transl_table=11

SEQ ID NO: 29019 - protein, 68 aa, Escherichia coli O157:H7; identical to SEQ ID NO: 18633

SEQ ID NO: 29020 - DNA, 216 bp, Shigella flexneri 2a str. 301; identical to SEQ ID NO: 18634
  CDS (1)..(216): transl_table=11

SEQ ID NO: 29021 - protein, 71 aa, Shigella flexneri 2a str. 301; identical to SEQ ID NO: 18635

SEQ ID NO: 29022 - DNA, 216 bp, Shigella flexneri 2a str. 301; identical to SEQ ID NO: 18636
  CDS (1)..(216): transl_table=11

SEQ ID NO: 29023 - protein, 71 aa, Shigella flexneri 2a str. 301; identical to SEQ ID NO: 18637

SEQ ID NO: 29024 - DNA, 321 bp, Escherichia coli CFT073; identical to SEQ ID NO: 18638
  CDS (1)..(321): transl_table=11

SEQ ID NO: 29025 - protein, 106 aa, Escherichia coli CFT073; identical to SEQ ID NO: 18639

SEQ ID NO: 29026 - DNA, 216 bp, Escherichia coli CFT073; identical to SEQ ID NO: 18640
  CDS (1)..(216): transl_table=11

SEQ ID NO: 29027 - protein, 71 aa, Escherichia coli CFT073; identical to SEQ ID NO: 18641

SEQ ID NO: 29028 - DNA, 216 bp, Shigella flexneri 2a str. 2457T; identical to SEQ ID NO: 18642
  CDS (1)..(216): transl_table=11

SEQ ID NO: 29029 - protein, 71 aa, Shigella flexneri 2a str. 2457T; identical to SEQ ID NO: 18643

SEQ ID NO: 29030 - DNA, 180 bp, Shigella flexneri 2a str. 2457T; identical to SEQ ID NO: 18644
  CDS (1)..(180): transl_table=11

SEQ ID NO: 29031 - protein, 59 aa, Shigella flexneri 2a str. 2457T; identical to SEQ ID NO: 18645

SEQ ID NO: 29032 - DNA, 213 bp, Yersinia pseudotuberculosis IP 32953; identical to SEQ ID NO: 18646
  CDS (1)..(213): transl_table=11

SEQ ID NO: 29033 - protein, 70 aa, Yersinia pseudotuberculosis IP 32953; identical to SEQ ID NO: 18647

SEQ ID NO: 29034 - DNA, 216 bp, Shigella sonnei Ss046; identical to SEQ ID NO: 18648
  CDS (1)..(216): transl_table=11

SEQ ID NO: 29035 - protein, 71 aa, Shigella sonnei Ss046; identical to SEQ ID NO: 18649

SEQ ID NO: 29036 - DNA, 216 bp, Shigella sonnei Ss046; identical to SEQ ID NO: 18650
  CDS (1)..(216): transl_table=11

SEQ ID NO: 29037 - protein, 71 aa, Shigella sonnei Ss046; identical to SEQ ID NO: 18651

SEQ ID NO: 29038 - DNA, 207 bp, Bacteriophage H19B; identical to SEQ ID NO: 18652
  CDS (1)..(207): transl_table=11

SEQ ID NO: 29039 - protein, 68 aa, Bacteriophage H19B; identical to SEQ ID NO: 18653

SEQ ID NO: 29040 - DNA, 291 bp, Stx1; identical to SEQ ID NO: 18654
  CDS (1)..(291): transl_table=11

SEQ ID NO: 29041 - protein, 96 aa, Stx1; identical to SEQ ID NO: 18655

SEQ ID NO: 29042 - DNA, 150 bp, Escherichia coli; identical to SEQ ID NO: 18656
  CDS (1)..(150): transl_table=11

SEQ ID NO: 29043 - protein, 49 aa, Escherichia coli; identical to SEQ ID NO: 18657

SEQ ID NO: 29044 - DNA, 216 bp, Escherichia coli; identical to SEQ ID NO: 18658
  CDS (1)..(216): transl_table=11

SEQ ID NO: 29045 - protein, 71 aa, Escherichia coli; identical to SEQ ID NO: 18659

SEQ ID NO: 29046 - DNA, 216 bp, Shigella dysenteriae; identical to SEQ ID NO: 18660
  CDS (1)..(216): transl_table=11

SEQ ID NO: 29047 - protein, 71 aa, Shigella dysenteriae; identical to SEQ ID NO: 18661

SEQ ID NO: 29048 - DNA, 216 bp, Escherichia coli O6; identical to SEQ ID NO: 18662
  CDS (1)..(216): transl_table=11

SEQ ID NO: 29049 - protein, 71 aa, Escherichia coli O6; identical to SEQ ID NO: 18663

SEQ ID NO: 29050 - DNA, 216 bp, Bacteriophage P21; identical to SEQ ID NO: 18664
  CDS (1)..(216): transl_table=11

SEQ ID NO: 29051 - protein, 71 aa, Bacteriophage P21; identical to SEQ ID NO: 18665

SEQ ID NO: 29052 - DNA, 24 bp, Artificial sequence
  Primer sequence
atgctgtcaaaactaccccgtaga

SEQ ID NO: 29053 - DNA, 23 bp, Artificial sequence
  Primer sequence
ttactctcctctcgcagccttac

SEQ ID NO: 29054 - protein, 71 aa, Artificial sequence; identical to SEQ ID NO: 18668
  Consensus
  Variant (2)..(3): Xaa in position 2 to 3 is any amino acid
  Variant (14)..(14): Xaa in position 14 is any amino acid
  Variant (18)..(20): Xaa in position 18 to 20 is any amino acid
  Variant (24)..(24): Xaa in position 24 is any amino acid
  Variant (27)..(27): Xaa in position 27 is any amino acid
  Variant (30)..(30): Xaa in position 30 is any amino acid
  Variant (37)..(37): Xaa in position 37 is any amino acid
  Variant (47)..(47): Xaa in position 47 is any amino acid
  Variant (49)..(49): Xaa in position 49 is any amino acid
  Variant (67)..(67): Xaa in position 67 is any amino acid

SEQ ID NO: 29055 - protein, 10 aa, Artificial sequence
  Consensus
  Variant (2)..(2): Xaa in position 2 is Asp or Glu
  Variant (5)..(5): Xaa in position 5 is Ser or Thr
  Variant (7)..(7): Xaa in position 7 is Gly or Ser
  Variant (8)..(8): Xaa in position 8 is Ile or Val
  Variant (9)..(9): Xaa in position 9 is Ala or Ser
MXKIXTXXXY

SEQ ID NO: 29056 - protein, 6 aa, Artificial sequence
  Consensus
  Variant (2)..(2): Xaa in position 2 is Phe or Leu
  Variant (5)..(5): Xaa in position 5 is any amino acid
WXLQXL

SEQ ID NO: 29057 - protein, 14 aa, Artificial sequence
  Consensus
  Variant (5)..(5): Xaa in position 5 is any or no amino acid
  Variant (7)..(7): Xaa in position 7 is any or no amino acid
PSQWXAXIGVLGSL

SEQ ID NO: 29058 - DNA, 2250 bp, Escherichia coli K12
  CDS (163)..(1566)
aatgcacccgctgtgtgaaataaacagagcgccttcggggcgtttttttacatggcacgaaagaccaaacatttgttatcaaatggtaaataataagtgagctaaaagttgcttaacgaaagcaaaacagaaagaaaaaattaatcaggtgaggagcaggtcatgaatacagtacgcagcgaaaaagattcgatgggggcgattgatgtcccggcagataagctgtggggcgcacaaactcaacgctcgctggagcatttccgcatttcgacggagaaaatgcccacctcactgattcatgcgctggcgctaaccaagcgtgcagcggcaaaagttaatgaagatttaggcttgttgtctgaagagaaagcgagcgccattcgtcaggcggcggatgaagtactggcaggacagcatgacgacgaattcccgctggctatctggcagaccggctccggcacgcaaagtaacatgaacatgaacgaagtgctggctaaccgggccagtgaattactcggcggtgtgcgcgggatggaacgtaaagttcaccctaacgacgacgtgaacaaaagccaaagttccaacgatgtctttccgacggcgatgcacgttgcggcgctgctggcgctgcgcaagcaactcattcctcagcttaaaaccctgacacagacactgaatgagaaatcccgtgcttttgccgatatcgtcaaaattggtcgtactcacttgcaggatgccacgccgttaacgctggggcaggagatttccggctgggtagcgatgctcgagcataatctcaaacatatcgaatacagcctgcctcacgtagcggaactggctcttggcggtacagcggtgggtactggactaaatacccatccggagtatgcgcgtcgcgtagcagatgaactggcagtcattacctgtgcaccgtttgttaccgcgccgaacaaatttgaagcgctggcgacctgtgatgccctggttcaggcgcacggcgcgttgaaagggttggctgcgtcactgatgaaaatcgccaatgatgtccgctggctggcctctggcccgcgctgcggaattggtgaaatctcaatcccggaaaatgagccgggcagctcaatcatgccggggaaagtgaacccaacacagtgtgaggcattaaccatgctctgctgtcaggtgatggggaacgacgtggcgatcaacatggggggcgcttccggtaactttgaactgaacgtcttccgtccaatggtgatccacaatttcctgcaatcggtgcgcttgctggcagatggcatggaaagttttaacaaacactgcgcagtgggtattgaaccgaatcgtgagcgaatcaatcaattactcaatgaatcgctgatgctggtgactgcgcttaacacccacattggttatgacaaagccgccgagatcgccaaaaaagcgcataaagaagggctgaccttaaaagctgcggcccttgcgctggggtatcttagcgaagccgagtttgacagctgggtacggccagaacagatggtcggcagtatgaaagccgggcgttaatctgcaacatacaggtgcagccgtggaatgatcaaacgaagcggctgcgcctgaggtttataacggtgctgcacattgtcggcatcgtaatttaacaactcaccaacgtccggcacgcccgcgccattatcccgattaatcagtgcaatcagtggtgtagggcaggcgtgttggacttgtttttgatctcctttgtaccagacgcgggcaatcggctgcaccttcaccggacgtttgatttttaacttcgcgttctgtggcagggcagcgatatcctgatactctcgctccagttttctttgccactcctcgcgcgtccacggtgcgacactgcgtggtgatttcaggcttttttccagctgtgccaggacttcatcacgatgtaaattcttaatgatatgtttattagcccaaccaaagcgtaaagtggcggggtcgtgcagaacggtgagcgtgcggtaagcattaagggtgatcacgcccggcaaatgacgatgcacccattcaaaacgtgccgcggtggggatttctgattcaaccgtgacgatatgctcgaacgtggcttcgagtttattgatgtgctgaatatgactgaccaacgctgcttgcgaaaggttatccgaaccggaacacaacagccaggcagacggacagtggccttgctgctgcgattcggactgttgt

SEQ ID NO: 29059 - protein, 467 aa, Escherichia coli K12
MNTVRSEKDSMGAIDVPADKLWGAQTQRSLEHFRISTEKMPTSLIHALALTKRAAAKVNEDLGLLSEEKASAIRQAADEVLAGQHDDEFPLAIWQTGSGTQSNMNMNEVLANRASELLGGVRGMERKVHPNDDVNKSQSSNDVFPTAMHVAALLALRKQLIPQLKTLTQTLNEKSRAFADIVKIGRTHLQDATPLTLGQEISGWVAMLEHNLKHIEYSLPHVAELALGGTAVGTGLNTHPEYARRVADELAVITCAPFVTAPNKFEALATCDALVQAHGALKGLAASLMKIANDVRWLASGPRCGIGEISIPENEPGSSIMPGKVNPTQCEALTMLCCQVMGNDVAINMGGASGNFELNVFRPMVIHNFLQSVRLLADGMESFNKHCAVGIEPNRERINQLLNESLMLVTALNTHIGYDKAAEIAKKAHKEGLTLKAAALALGYLSEAEFDSWVRPEQMVGSMKAGR

SEQ ID NO: 29060 - DNA, 1770 bp, Arabidopsis thaliana; identical to SEQ ID NO: 11020
  CDS (84)..(1559)

SEQ ID NO: 29061 - protein, 491 aa, Arabidopsis thaliana; identical to SEQ ID NO: 11021

SEQ ID NO: 29062 - DNA, 1512 bp, Arabidopsis thaliana; identical to SEQ ID NO: 11022
  CDS (1)..(1479)

SEQ ID NO: 29063 - protein, 492 aa, Arabidopsis thaliana; identical to SEQ ID NO: 11023

SEQ ID NO: 29064 - DNA, 1500 bp, Arabidopsis thaliana; identical to SEQ ID NO: 11024
  CDS (1)..(1500)

SEQ ID NO: 29065 - protein, 499 aa, Arabidopsis thaliana; identical to SEQ ID NO: 11025

SEQ ID NO: 29066 - DNA, 1865 bp, Solanum tuberosum; identical to SEQ ID NO: 11026
  CDS (66)..(1547)

SEQ ID NO: 29067 - protein, 493 aa, Solanum tuberosum; identical to SEQ ID NO: 11027

SEQ ID NO: 29068 - DNA, 1616 bp, Arabidopsis thaliana; identical to SEQ ID NO: 11028
  CDS (44)..(1576)

SEQ ID NO: 29069 - protein, 510 aa, Arabidopsis thaliana; identical to SEQ ID NO: 11029

SEQ ID NO: 29070 - DNA, 1647 bp, Bradyrhizobium japonicum
  CDS (22)..(1485)
actgcctatatagaggagcacatgaagaggccgcgcggcatttcgcgcggcggaatggatgtgctcatggccaaatctgcacgcacgaagaccgctcgccccgcgacccgcaccgagaccgacagtttcggtcccatcgaggtcccctccgatcgctattggggcgcgcagaccgaacgttcgcggcagaatttccgcatcggcacggatcgcatgccgatctcgctcgtgcatgcgctcggcatcgtcaagctcgccgcggcgcagtccaaccgcgagctcggcctgctcgaccagcgccgcgccagtgccatcatccgcgccgcgcgcgaggtatcgacggcagacctcgacgatcatttcccgctcgtcgtgtggcagaccggctcgggcacgcagaccaacatgaacctcaacgaggtgatcgccaaccgcgccaatgagctgctcggcggcgagctcggcgccaagaagccggtgcatccgaacgatcacgtcaacatgagccagtcgtcgaacgactcttttcccaccgcaatgcatatcgcggcggctagccgcatcaccgccgatctcgttcctgcccttggcgaactgctccgcgcgctgcgcaagaaggagaaggagttcgccaagatcgtcaagatcggccgcacccacacccaggacgcgacgccgctgacgctcggccaggaattctccggctatgccgcgcaggtcgaacgcgggatcgcgcgactgaaggtcgcggtgaaggagctctatccgctggcgcagggcggcaccgccgtcggcaccggcctcaacgcgaagccgcgctttgcaagactgttcgcaaagcacgttgccggaatcaccaaactgcccttcaccagcgccgccaacaaattcgaggcgctggcctcgaacgatgcttatgtgctggcgcacggcgccatcagttcggtcgcgacaggcctgttcaagatcgccaacgacatccgcctgctcggatcgggtccgcgctcagggctcggcgagctgatcctgccggagaacgaaccgggctcgtcgatcatgccgggcaaggtcaatccgacgcagtgcgaggcgatgaccatggtgtgctgccaggtgttcggcaatcacaccgcgatcacggtcgccggcagccagggccatttcgagctcaacgtctacaagcccgtgctggcctacaacatgctgcactcgatccgcctgatggccgatgccgcgcgctccttcaccgaacattgcgtcagcggcatccgcgccgacgaaaagcgcataagtgagctgatgcagcgctcgctgatgctggtgaccgcgctcgcaccgaagatcggctacgacaacgccgccaaggtcgcgaagacggcgcatgccaacggcaccacgctgaaggaggaagcgctgcggctcggcttcgtcacagcggacgagttcgaccgtttggtgcagccggagaagatgacgaaaccgtagtaattcctaattccgatagtcatccgtaatgatacggagccaaaaagctcataattgtaaggcttaaaggagaggatttgattaccgtcaatgttccggaaagacggcgtgctacgaagctattctgcccttggcggggcgaaattcatcgtttgatggcca

SEQ ID NO: 29071 - protein, 487 aa, Bradyrhizobium japonicum
MKRPRGISRGGMDVLMAKSARTKTARPATRTETDSFGPIEVPSDRYWGAQTERSRQNFRIGTDRMPISLVHALGIVKLAAAQSNRELGLLDQRRASAIIRAAREVSTADLDDHFPLVVWQTGSGTQTNMNLNEVIANRANELLGGELGAKKPVHPNDHVNMSQSSNDSFPTAMHIAAASRITADLVPALGELLRALRKKEKEFAKIVKIGRTHTQDATPLTLGQEFSGYAAQVERGIARLKVAVKELYPLAQGGTAVGTGLNAKPRFARLFAKHVAGITKLPFTSAANKFEALASNDAYVLAHGAISSVATGLFKIANDIRLLGSGPRSGLGELILPENEPGSSIMPGKVNPTQCEAMTMVCCQVFGNHTAITVAGSQGHFELNVYKPVLAYNMLHSIRLMADAARSFTEHCVSGIRADEKRISELMQRSLMLVTALAPKIGYDNAAKVAKTAHANGTTLKEEALRLGFVTADEFDRLVQPEKMTKP

SEQ ID NO: 29072 - DNA, 1383 bp, Chlamydophila pneumoniae, Chlamydia pneumoniae
  CDS (1)..(1383)
atgcgacaagaaaaggatagtttaggaatcgtagaagttcctgaggataagttatatggagctcaaactatgcgttctaggaattttttttcttggggacctgagttgatgccttatgaggtaatacgagctctcgtatggattaaaaaatgtgctgctcaggcgaatcaagatttaggatttttggattccaagcattgcgatatgattgttgctgctgccgatgagattttagagggaggttttgaagagcatttccctttaaaagtttggcagacagggagcggcacacaatctaatatgaatgtgaatgaggtgattgcgaatcttgccattcgtcatcacggaggggtgttaggcagtaaggatcctatccatcctaatgatcatgtgaataagtcccaatcgtccaatgatgttttccctacagcaatgcatatcgctgctgtgattagtttaaaaaataagttaattccagctttagatcatatgattcgggtgttagatgctaaagtggaagaatttcgtcatgatgtaaagataggacggacccatcttatggatgcggtgcctatgacgttgggtcaggaattttctggttatagcagtcaattgcgtcactgcttagagagtatagcattttctttagctcatttatatgaacttgcgattggagctactgctgtagggactgggttgaatgttcctgaagggttcgtggaaaagatcatccattatttaaggaaggaaacagatgaaccgtttattccagcttccaattatttttcagcactgtcttgtcacgatgctttagtagatgcccatgggtctttagcaactttagcatgtgctttaactaagatagctacggatttgagctttttaggttcaggacccaggtgtgggttgggtgagttatttttccctgaaaatgaaccaggatcttctatcatgcctggtaaagtcaatcctacgcagtgtgaagctctccaaatggtttgtgctcaagttcttgggaataatcaaacagtgattattggaggaagtcgaggaaattttgagcttaatgtgatgaagcctgtgatcatctataatttcctgcagtctgtggatctcctttctgaggggatgagggctttctctgaattctttgtgaaaggattaaaagtaaataaagctcgtttacaagataatatcaataattctttgatgttggttacagctttagctcctgtattaggttacgacaagtgttcgaaagcagcactgaaagcatttcatgaatctatatctttgaaggaggcgtgtctagctttgggatatctttctgagaaggaatttgatcgtttagtggttcctgagaatatggtgggaaaccattag

SEQ ID NO: 29073 - protein, 460 aa, Chlamydophila pneumoniae, Chlamydia pneumoniae
MRQEKDSLGIVEVPEDKLYGAQTMRSRNFFSWGPELMPYEVIRALVWIKKCAAQANQDLGFLDSKHCDMIVAAADEILEGGFEEHFPLKVWQTGSGTQSNMNVNEVIANLAIRHHGGVLGSKDPIHPNDHVNKSQSSNDVFPTAMHIAAVISLKNKLIPALDHMIRVLDAKVEEFRHDVKIGRTHLMDAVPMTLGQEFSGYSSQLRHCLESIAFSLAHLYELAIGATAVGTGLNVPEGFVEKIIHYLRKETDEPFIPASNYFSALSCHDALVDAHGSLATLACALTKIATDLSFLGSGPRCGLGELFFPENEPGSSIMPGKVNPTQCEALQMVCAQVLGNNQTVIIGGSRGNFELNVMKPVIIYNFLQSVDLLSEGMRAFSEFFVKGLKVNKARLQDNINNSLMLVTALAPVLGYDKCSKAALKAFHESISLKEACLALGYLSEKEFDRLVVPENMVGNH

SEQ ID NO: 29074 - DNA, 1392 bp, Campylobacter jejuni
  CDS (1)..(1392)
atggaatacagagttgaacatgataccatgggtgaagttaaggttccaaatgacaaatattggggagctcaaactgaaagaagttttgaaaatttcaaaatcggttgtgagaaaatgccaaaggttttaatctatgcttttgcaaatcttaaaaaatctttagctttggtcaataacaaacttggcaaacttgatgatgctaagaaaaatgctatagttcaagcttgcgatgagattatcgcaggtaaatttgatgataattttccacttgcgatttggcaaacaggttcaggcacacaaagcaatatgaatatgaatgaagttattgcaaatcgtgccactgaaatcatgggcggggattttcgcaaagaaaagcttgtacatccaaatgatcatgttaatatgagtcaaagttcaaatgatacttttccaacagctatgagtatcgttgcggttgagcaagtagagaaaaagcttatccctgcgcttgatgagcttattgcaacttttgaaaaaaaagtaaaagaatttgatggtattatcaagataggacgcacgcatttacaagatgctactccacttactctagcgcaagaatttagtggatatctttctatgcttttacattcaaaagagcaaatcatcgcttctttaccaactttaagagaacttgccataggaggaaccgcagtgggaacagggcttaatgcacatccagaattaagccaaaaagtaagtgaagagctaactcaacttataggtacaaaatttatttcaagtccaaataaatttcatgctttaacaagtcatgatgcgattaattttactcatggagctatgaaaggtttggctgcaaatttaatgaaaattgcaaatgatataagatggttagcttcaggcccaagatgcggtcttggtgagcttatcatccctgaaaatgagccaggaagttcgattatgccaggtaaggtaaatcctacccagtgtgaagctgttactatggttgctgtacaagtgatgggaaatgatgtagctatcggatttgcagcaagtcaaggaaattttgaacttaatgtgtttaagcctgtgattatttataatttcttgcaaagtcttgatttgttggctgattctatgcattcattcaatatccattgtgctgtaggcatagaaccaaatcgtgcaaaaatcgatcataatcttcataattctttaatgctagttaccgctctaaatccacacataggttatgaaaacgctgctaaagtagccaaaaatgcccataaaaaaggtatttctttaaaagaaagcacaatggagcttggtttggttagcgaagaagatttcaataaatttgttgatcctactaaaatgataggcccaaaagcctag

SEQ ID NO: 29075 - protein, 463 aa, Campylobacter jejuni
MEYRVEHDTMGEVKVPNDKYWGAQTERSFENFKIGCEKMPKVLIYAFANLKKSLALVNNKLGKLDDAKKNAIVQACDEIIAGKFDDNFPLAIWQTGSGTQSNMNMNEVIANRATEIMGGDFRKEKLVHPNDHVNMSQSSNDTFPTAMSIVAVEQVEKKLIPALDELIATFEKKVKEFDGIIKIGRTHLQDATPLTLAQEFSGYLSMLLHSKEQIIASLPTLRELAIGGTAVGTGLNAHPELSQKVSEELTQLIGTKFISSPNKFHALTSHDAINFTHGAMKGLAANLMKIANDIRWLASGPRCGLGELIIPENEPGSSIMPGKVNPTQCEAVTMVAVQVMGNDVAIGFAASQGNFELNVFKPVIIYNFLQSLDLLADSMHSFNIHCAVGIEPNRAKIDHNLHNSLMLVTALNPHIGYENAAKVAKNAHKKGISLKESTMELGLVSEEDFNKFVDPTKMIGPKA

SEQ ID NO: 29076 - DNA, 1398 bp, Yersinia pestis
  CDS (1)..(1398)
atggcaactacccgcagtgaaaaggattctatggggtctatcgatgtacctgcaaaccaattatggggggcgcaaactcaacgttcattggcgcattttcgaatttcacaagaaaaaatgccaacagagctaattcatgcattggctctgaccaaacgagcggcagctcaagtgaatatggacctaggcttgctgccagccgagcgtgcaaaagcgattatgcgggccgcagatgaagttctggatggcgctcatccaaccgagttccctctcgccatctggcaaaccgggtcgggtactcagacgaatatgaatatgaatgaggtactggcaaaccgtgcgagtgagttgctcgggggggcgcgggggaataaccgtttggttcatcccaatgatgatgtcaataaaagccaaagttcaaatgatgtcttcccaacggcgatgcatgtcgctgcagtgatgggggtgagtgaacatcttcttcctgaactgaaggtgttacagaaaaccttggccgacaaagcagaagcttatcgcgatattgtaaaaattggccgtacacatttacaagatgcgacccctttaacgttggggcaggaaatttccgggtgggcggcaatgttatctcacagtgtgcggcatattgaggcgacccttcctcacctgtgtgaattagcgcttgggggaacagcggtggggactggcctcaatacgcatcctgaatatgctgtacgagtagctaatgaaatagccacactgacacgccaaccgtttatcactgccccgaataaatttgaatcattgggaacctgcgatgcattggttcatggtcacggtgcgctaaaaggcttagcggcatccctgatgaaaattgccaatgatgtccgttggttatcatcaggccctcgctgtggtattggcgaaatatctattccggaaaatgagccaggcagttctatcatgccaggcaaagtgaatccaacacagtgtgaagcgatgaccatgctatgtgctcaagttatgggtaatgatgtggctatcaatatcggtggggcgtccggcaactttgaattaaacgtgttccgtccattggtcatccataacttcctgcaatctgttcgtttgttggctgatggaatgcgtggttttaatgagcactgcgctttgggaattgaacccaaccgcgaccgtattacgcaattgctcaatgaatcgctgatgttagttaccgcgctcaatacccatattggctacgataaagcagctgaaatcgccaaaaaggcgcataaagaggggctaacactgaaagcagcagctatggcattgggttatcttaccgatgcagagtttgatgaatgggttcgaccggaagatatggtcggcagtatgaagaaatag

SEQ ID NO: 29077 - protein, 465 aa, Yersinia pestis
MATTRSEKDSMGSIDVPANQLWGAQTQRSLAHFRISQEKMPTELIHALALTKRAAAQVNMDLGLLPAERAKAIMRAADEVLDGAHPTEFPLAIWQTGSGTQTNMNMNEVLANRASELLGGARGNNRLVHPNDDVNKSQSSNDVFPTAMHVAAVMGVSEHLLPELKVLQKTLADKAEAYRDIVKIGRTHLQDATPLTLGQEISGWAAMLSHSVRHIEATLPHLCELALGGTAVGTGLNTHPEYAVRVANEIATLTRQPFITAPNKFESLGTCDALVHGHGALKGLAASLMKIANDVRWLSSGPRCGIGEISIPENEPGSSIMPGKVNPTQCEAMTMLCAQVMGNDVAINIGGASGNFELNVFRPLVIHNFLQSVRLLADGMRGFNEHCALGIEPNRDRITQLLNESLMLVTALNTHIGYDKAAEIAKKAHKEGLTLKAAAMALGYLTDAEFDEWVRPEDMVGSMKK

SEQ ID NO: 29078 - DNA, 1368 bp, Listeria monocytogenes
  CDS (1)..(1368)
atggaacgaatagagcgagatacgcttggagaaatttctgtagatgcgacgaaatattggggagcgcaaacagaacgaagtaaaaggaattttgctattggtgataatcctatgccgatagaaattatatatgcttttgctcagttaaagaaagccactgcaaaagtgaacgcagcagaaggaaaactagccgaagaaaaagcgatagcgattggccaggtttgtgatcaaatcattcaaggagaactagatgagcattttcctttagtcgtttggcaaacaggaagcggaacgcagagcaacatgaatgtcaatgaagttatcgcacacgttgccaacttaactttaggcgaaggacaaattcatccaaatgatgatgttaacatgtcacaaagctcgaacgacacatttccaacagcgatgcacattgccgcatacggggctttagtaacaaaacttttaccagaaataactaaaatggaagctgttttgacagagaagaaaaataaatatatgcatctcgttaaaattggtagaacgcatttacaagatgcaactcctttaacacttggtcaagaaattagtggctgggaagcatgtcttacaaataataaaaactatcttgaaacaagtatgaaagcaattttgccacttgcaattggcgggactgcagttggaacgggcttaaatgcctcacgtgattttggtgataaggttgccgaagaattgatgaaacaaacgggatatccttttacttctgattccaataagtattttgctttaactagtcatagtccgattaattttgttcatggcgccattcgtagccttgcttcggatctaatgaaaattgctaatgatatccgtttattagcaagtggaccacgtagcggcataggtgagctagagataccagctaatgaaccaggaagctctattatgcccgggaaagtaaaccctacccaatgtgaagcaattacgatggtagcggctcaagtcatgggaaatgatgtgacaattaatgttgccgcaagccaagggaactttgagttaaatgtctacaagccggttatcatttttaatttcctagaatctatcaaacttcttgcagatagcatgcgttcgttccgagtgcattgtttggaaggacttactgcgaatgaaaaagttattgaaacaaaagtaaatgactccctaatgcttgttacagcattgaatccgcatatcggctatgaaaaagctgctaaaattgccaaactggcttttgatgaaaatacgacattaaaagaagcggcaatcaaaaccggctttgtgacagaaaaagaatttgatttgtggataaatccattgaaaatgactaatttgtaa

SEQ ID NO: 29079 - protein, 455 aa, Listeria monocytogenes
MERIERDTLGEISVDATKYWGAQTERSKRNFAIGDNPMPIEIIYAFAQLKKATAKVNAAEGKLAEEKAIAIGQVCDQIIQGELDEHFPLVVWQTGSGTQSNMNVNEVIAHVANLTLGEGQIHPNDDVNMSQSSNDTFPTAMHIAAYGALVTKLLPEITKMEAVLTEKKNKYMHLVKIGRTHLQDATPLTLGQEISGWEACLTNNKNYLETSMKAILPLAIGGTAVGTGLNASRDFGDKVAEELMKQTGYPFTSDSNKYFALTSHSPINFVHGAIRSLASDLMKIANDIRLLASGPRSGIGELEIPANEPGSSIMPGKVNPTQCEAITMVAAQVMGNDVTINVAASQGNFELNVYKPVIIFNFLESIKLLADSMRSFRVHCLEGLTANEKVIETKVNDSLMLVTALNPHIGYEKAAKIAKLAFDENTTLKEAAIKTGFVTEKEFDLWINPLKMTNL

SEQ ID NO: 29080 - DNA, 1395 bp, Deinococcus radiodurans
  CDS (1)..(1395)
atgaccaaaacccgccaagaaaccgacacgatgggcaagatggacgtggacgccagccgctactggggcgcacagaccgagcgcagcatccacaacttcccgattgggcgcgacaccttcgtgtggggccgccccgtcatccgggcgctgggcatcctgaaaaagggcgcggcgcaggccaacgccgaactcggtgaactgcccgccgacgtggccgacctcatcgtgaaggccgccgacgaagtgattgccggcaaactcgacgaacactttccgctggtagtgttccagaccggctcgggcacccagagcaacatgaacgccaacgaggtgatttccaaccgcgccatcgaactcgccggcggcgaaatgggcagcaagaagccggtccaccccaacgaccacgtgaaccgcggccagagctccaacgacaccttccccactgccatgcacatcgcggtggtgctggaactcaacgagcggctgtacggcgcggtcggcaagctgcgcgacaccctgcacgccaaggccgagcagtacaaggacctcgtgaaagtgggccgcacccacctgcaagacgccacgcccatcacgctggggcaggaaatcggcggctgggtggcgcaactcgactacgcgctgtccgaagtcaagcacgcgggcgaaggcctgctcgacctcgccatcggcggcaccgccgtgggcaccggcctgaacgcgcaccccaaattcggtgatctggccgccaagaagtacgaagaagaaaccggctaccacttccgcagcgccgagaacaagttcgccgccctgagcgcccacgacgcgctggtgcagacctcggcggccctgcgtaccctggccggcgccctgatgaagatggcgaacgacgtgcgctggctggcgagcggcccgcgcaacggcatcggcgaaatcaccattcccgagaacgagcccggctccagcatcatgcccggcaaggtgaaccccacccagagtgaggccatgacgatggtcgccacccgcgtgttcggcaacgacgccaccgtcgcttttgccggcagccagggcaacttccagctgaacgtgttcaagccagtgatggttcacgccgtgctggaaagcattcgcctgatttccgacgcctgcctggccttcaacgaccactgcgcggtgggcatccagcccaacgaggccaagatcaaggaaaacctcgacaagaacctgatgcaggtgaccgccctcaatcgccacatcggctacgacaaggctgccgcgattgccaagaaggcccacaaggaaggcaccagcctcaaggacgccgcgctggccctgggctacgtgaccgaggacgaattcgcccagtgggtcgtgccgctgggcatgactcacaactga

SEQ ID NO: 29081 - protein, 464 aa, Deinococcus radiodurans
MTKTRQETDTMGKMDVDASRYWGAQTERSIHNFPIGRDTFVWGRPVIRALGILKKGAAQANAELGELPADVADLIVKAADEVIAGKLDEHFPLVVFQTGSGTQSNMNANEVISNRAIELAGGEMGSKKPVHPNDHVNRGQSSNDTFPTAMHIAVVLELNERLYGAVGKLRDTLHAKAEQYKDLVKVGRTHLQDATPITLGQEIGGWVAQLDYALSEVKHAGEGLLDLAIGGTAVGTGLNAHPKFGDLAAKKYEEETGYHFRSAENKFAALSAHDALVQTSAALRTLAGALMKMANDVRWLASGPRNGIGEITIPENEPGSSIMPGKVNPTQSEAMTMVATRVFGNDATVAFAGSQGNFQLNVFKPVMVHAVLESIRLISDACLAFNDHCAVGIQPNEAKIKENLDKNLMQVTALNRHIGYDKAAAIAKKAHKEGTSLKDAALALGYVTEDEFAQWVVPLGMTHN

SEQ ID NO: 29082 - DNA, 1389 bp, Neisseria meningitidis
  CDS (1)..(1389)
atgagcacccgtaccgaacacgacacgatgggcaatgtcgaagtcccatccgaagcctattggggcgcgcagacccagcgcagccgcaacaatttcaaaatcggtggcgaaaccctgccgcagccgttgatttatgctttggcattggtgaaaaaagccgccgctgccaccaatgtttccctcggtaggattaagcctgaacaggcggatttgattacgcaggcggcggatgatgtgttgagcggcaagctcgacgggcagttcccattggtagtgtggcagaccggttccggcacgcagtccaatatgaacatgaacgaagtgctggcaaaccgcgccaacgaaatcgccggtacgggtttggcggcttatcagcccgtccatcccaacgaccatgtgaaccacgcgcaatcgaccaacgacgcattcccgaccgctatccacgttgccgccgcgattgaaatcaaccgccacctcatccccgccgtaaaagccctgcgcgacacgttggacaaaaaagcccaagctttcgcccctatcgtcaaaatcggccgcacccacttgcaagacgcgacgccgctgactttgggacaggaattttccggctacgtttcccagcttgatcacggtttaggccgtctgaacgatgcgcttaaagacttgtatgaacttgctttgggcggtacggcggtcggcacgggtttgaacagccatcccgaatacgccgaaaaagccgccgccaaactcgccgaattgtccggcttgccgtttgtcagcgcgccgaacaaatttgaagccctgggcggacgcgatgccgccgttgccgcttcgggcgcattgaaaacgctggcggcaagcctgaacaaaattgccaacgacatccgttggctggcaagcggcccgcgttgcggtttgggcgaaatcaaaatccccgaaaacgagccgggttcgtccattatgccgggcaaagtcaacccgacccaatgcgaagcaatgacgatggtgtgctgccaagtgttcggcaacgacgttaccatcggtatggcgggcgcgtcgggcaatttcgagctgaacgtctatatgcccgttatcgcctacaacctcttgcaatccatccacctgttgggcgacgcgtgcaacagcttcaacgaacactgcgccatcggcatcgaacccgtgccggaaaaaatcgactatttcctgcaccattccctgatgctggttaccgcattaaaccgtaaaatcggttacgaaaacgccgccaaagtcgccaaaaccgcctacaaaaacaacaaatcgttgcgcgaaaccgccgttgagttgggcttgctgacgggcgaagaatttgacgaactggtcgttcctgccgatatggttcatccgcgctaa

SEQ ID NO: 29083 - protein, 462 aa, Neisseria meningitidis
MSTRTEHDTMGNVEVPSEAYWGAQTQRSRNNFKIGGETLPQPLIYALALVKKAAAATNVSLGRIKPEQADLITQAADDVLSGKLDGQFPLVVWQTGSGTQSNMNMNEVLANRANEIAGTGLAAYQPVHPNDHVNHAQSTNDAFPTAIHVAAAIEINRHLIPAVKALRDTLDKKAQAFAPIVKIGRTHLQDATPLTLGQEFSGYVSQLDHGLGRLNDALKDLYELALGGTAVGTGLNSHPEYAEKAAAKLAELSGLPFVSAPNKFEALGGRDAAVAASGALKTLAASLNKIANDIRWLASGPRCGLGEIKIPENEPGSSIMPGKVNPTQCEAMTMVCCQVFGNDVTIGMAGASGNFELNVYMPVIAYNLLQSIHLLGDACNSFNEHCAIGIEPVPEKIDYFLHHSLMLVTALNRKIGYENAAKVAKTAYKNNKSLRETAVELGLLTGEEFDELVVPADMVHPR

SEQ ID NO: 29084 - DNA, 1506 bp, Caenorhabditis elegans
  CDS (1)..(1506)
atgtctgcagtctctatgttacagggagaaatgcttgctcgtggaggcgccgtcattgcccgcggagcgtctcttgccactgcccgcaatttttcgcgcaccactgttccaatggctaagattcgtaaggaacgagatactttcggagagctcgaggttccagccgacaaatactatggagcccagaccgcccgttcccagatgaacttcaagattggaggaccagaagagcgtatgccaatcccagttatccacgctttcggaatcttgaagaaggccgccgcccttgtcaacaccgagttcggattagacaaaaaactggctgacgcgatttcccaagctgctgatgaggttgttgacggcaagctcgacgagcacttcccacttgttacatggcagactggttcaggaactcagtccaacatgaatgtcaatgaggttatctcgaatcgtgctatcgagatcctcggaggagagctcggatcgaagaagccagttcatccaaatgatcatgtgaatatgtcccaatcatcaaatgacacattcccaactgctatgcacattgccgtcggacgtgaagtcaactctcgtcttcttccagctctcaagaagcttcgcactgcccttcacaacaaggctgaagagttcaaagatatcatcaagattggacgtactcacacccaagatgctgttccactcactcttggacaagagttctcagcttacgtcacacagcttgataactctattgctcgtgttgaatcgactcttccacgactttatcaattggctgccggtggaaccgctgttggaactggactcaacacgcgcaagggattcgctgagaaggttgccgccactgtttctgaacttaccggattgccattcgttaccgctccaaacaaatttgaagccctcgccgcccatgatgctctcgttgaggttcacggagccctgaacacagtcgcagtttccttcatgaagattggaaacgatatcagatttttgggatctggaccaagatgcggactcggagagttatcactcccagaaaacgaaccaggaagctccatcatgccaggaaaggtcaacccaactcaatgtgaagccatcacaatggttgccgctcaagttatgggaaatcaagttgcagtcagtgtaggaggatctaatggacatttcgagttgaatgttttcaagccacttatcgttcgtaatgttcttcaatcaacacgtcttcttgctgacagcgctgtgagcttcactgatcattgtgtcgacggaatcgttgctaacaaagacaatattgccaagattatgcgtgaatcacttatgcttgtcactgctctcaacccacacattggctacgacaacgccgccaagattgctaagactgctcacaagaacggcaccacccttgtccaggaagccgtgaagctgggaatccttaccgaggagcagttcgctcaatgggtcaagccagaaaacatgctcggacctaagtaa

SEQ ID NO: 29085 - protein, 501 aa, Caenorhabditis elegans
MSAVSMLQGEMLARGGAVIARGASLATARNFSRTTVPMAKIRKERDTFGELEVPADKYYGAQTARSQMNFKIGGPEERMPIPVIHAFGILKKAAALVNTEFGLDKKLADAISQAADEVVDGKLDEHFPLVTWQTGSGTQSNMNVNEVISNRAIEILGGELGSKKPVHPNDHVNMSQSSNDTFPTAMHIAVGREVNSRLLPALKKLRTALHNKAEEFKDIIKIGRTHTQDAVPLTLGQEFSAYVTQLDNSIARVESTLPRLYQLAAGGTAVGTGLNTRKGFAEKVAATVSELTGLPFVTAPNKFEALAAHDALVEVHGALNTVAVSFMKIGNDIRFLGSGPRCGLGELSLPENEPGSSIMPGKVNPTQCEAITMVAAQVMGNQVAVSVGGSNGHFELNVFKPLIVRNVLQSTRLLADSAVSFTDHCVDGIVANKDNIAKIMRESLMLVTALNPHIGYDNAAKIAKTAHKNGTTLVQEAVKLGILTEEQFAQWVKPENMLGPK

SEQ ID NO: 29086 - DNA, 1413 bp, Halobacterium sp. NRC-1
  CDS (1)..(1413)
atgagcgaggattaccgcacggagcaggacagcctcggcgagatgcaggttcccgctgacgcctactggggggcacagacccagcgcgcgatcgagaacttcccgatctcggggatcgcgttcgggcggcggttcgtgcgcgcgctcggcgtcgtcaagaaggccgccgcgcaggcgaaccgcgacctcggcctcgttgacgacgagcgcgccgacgccatcgtcgcggccgccgacgaggtcatcgccggcgagcacgacgaccagttcccggtcgacgtcttccagaccgggtccgggacgtcctcgaacatgaacgccaacgaggtcatcgcgaaccgcgccgcggagctcctcggcgaggagatcggggatcgcgtcgtgcaccccaacgaccacgtgaactatggccagtccagcaacgacgtgatcccgaccgcgatgcacgtggcgagcctcgacgcgctcgtcaacgacgtcaaacccggcctggagacgctggcagcggaactcgacgacaaagcggacgcgttcgacggcgtcgtgaagaccgggcgcacgcacttgcaggacgccacgccggtgcggttgggccaggagttcggcggctaccgcacccaagtcgagaagggcatcgaccgcatcgaggccgttgccccgcgcctctcggagctcgcgctcggcggcaccgccgtcggcaccgggctgaacacccaccccgagttcccggagacggcggccggctacatcagcgaggagaccggcgttacgttccgtgaggcggacaaccacttcgaggcgcaggccgcccacgacgccatgaacgaggcccacggcgcgctgcgcacggtcgcggggtcgctgaacaagatcgccaacgacctccggctgcttgcctccggcccccgcaacgggctgggggagatcgagcagcccgagaaccagcccggctcctcgatcatgcccgggaagatcaaccccgtggtggcggaggcggtcaaccaggtccacaagcaggtcgtgggcaacgacgccgccatcgccgcgggggccgcggaggggcagatcgacttgaacctctacaagcccgtgctggcgcacaacttcctgcagtccgcggacatgctcgccaacgcgagcgctgccttcggcgagaagttcgtcgccaagctcgaagccaacgaggccgcctgcgaggcgcaggtcgagcgctcgatggcgctggcgaccgcgctcaaccccacgatcggctacgacaaggccagcgaggtcgcgaaggccgcgctgaaggaggggaaaacagtcacggaggtcgtcgtcgagaagggatacctctcggaggcggaggccgctgacgtgctcgaccccgaggggatgacccaccggggcatcctctccggcgacgacacgtag

SEQ ID NO: 29087 - protein, 470 aa, Halobacterium sp. NRC-1
MSEDYRTEQDSLGEMQVPADAYWGAQTQRAIENFPISGIAFGRRFVRALGVVKKAAAQANRDLGLVDDERADAIVAAADEVIAGEHDDQFPVDVFQTGSGTSSNMNANEVIANRAAELLGEEIGDRVVHPNDHVNYGQSSNDVIPTAMHVASLDALVNDVKPGLETLAAELDDKADAFDGVVKTGRTHLQDATPVRLGQEFGGYRTQVEKGIDRIEAVAPRLSELALGGTAVGTGLNTHPEFPETAAGYISEETGVTFREADNHFEAQAAHDAMNEAHGALRTVAGSLNKIANDLRLLASGPRNGLGEIEQPENQPGSSIMPGKINPVVAEAVNQVHKQVVGNDAAIAAGAAEGQIDLNLYKPVLAHNFLQSADMLANASAAFGEKFVAKLEANEAACEAQVERSMALATALNPTIGYDKASEVAKAALKEGKTVTEVVVEKGYLSEAEAADVLDPEGMTHRGILSGDDT

SEQ ID NO: 29088 - DNA, 1392 bp, Caulobacter crescentus
  CDS (1)..(1392)
atgaccgccacgcgtatcgagaccgacacctttggcccgatcgaagtcgccgccgaccgctactggggcgcgcaagctcagcgcagcctgggcaacttcaagatcggctgggaaaagcagcccctgcccgtcgtccgcgccctgggcatcgtcaagcgcgccgccgccgaggccaacctcgccttgggcaagctggacccgaagatcgccgagacgatcatcgccgccgccaacgaagtgatcgagggcaagctgaacgaccacttcccgctggtggtctggcagaccggctcgggcacccagtcgaacatgaacgccaacgaggtgatctcgaaccgcgccatcgagatgctgggcggtgagatgggcagcaagaagcccgtccaccccaacgaccacgtcaatatgagccagtcgtcgaacgacaccttcccgacggccatgcacatcgcctgcgccgaacaggtggtccacgacctgctgcccgcgctgaagcacctgcacaaggccctggccgccaaggccgccgagtggaaggacatcatcaagatcggccgcacccacacccaggacgccaccccgctgacgctgggccaggagttcggcggctacgctcagcagatcgagaacggcatcgctcgtatcgagatgaccctgccgatgctgatgcaactggcccagggcggcaccgccgtcggcaccggcctgaacgcccccgtgggcttcgccgagctggtcgccgagcagatcgccggcatcacgggcctaggcttcaccacggccccgaacaagttcgaggccctggccgcccacgacgccatggtcttcacccacggcgccatcaacacggtggccgccagcctgttcaagatcgccaacgacatccgcttcctgggctctggcccgcgcgccggtctcggcgagctttccctgccggaaaatgagccgggcagctcgatcatgccgggcaaggtcaatccgacccagtccgaagccctgacccaggtctgcgcccaggtgttcggcaaccactcgaccctgaccttcgccggcagccagggccatttcgagctgaacgtcttcaacccggtgatggcctataacttcctgcagtcggtccgtctggtcgccgacgcggcgatcagcttcaccgacaactgcgtggtcggcatcgagccgcgtgtcgacaacatcaagaagggcgtcgagaacagcctgatgctggtcacggccctgaacggcaagctcggctacgacgcctgcgccaagatcgccaagaccgcgcacaagaacggcaccaccctgcgcgaggaggccgtcggcggcggctatctgacgaacgaagagttcgaacagtacgtccgccccgaaaagatgatctcgccgggctga

SEQ ID NO: 29089 - protein, 463 aa, Caulobacter crescentus
MTATRIETDTFGPIEVAADRYWGAQAQRSLGNFKIGWEKQPLPVVRALGIVKRAAAEANLALGKLDPKIAETIIAAANEVIEGKLNDHFPLVVWQTGSGTQSNMNANEVISNRAIEMLGGEMGSKKPVHPNDHVNMSQSSNDTFPTAMHIACAEQVVHDLLPALKHLHKALAAKAAEWKDIIKIGRTHTQDATPLTLGQEFGGYAQQIENGIARIEMTLPMLMQLAQGGTAVGTGLNAPVGFAELVAEQIAGITGLGFTTAPNKFEALAAHDAMVFTHGAINTVAASLFKIANDIRFLGSGPRAGLGELSLPENEPGSSIMPGKVNPTQSEALTQVCAQVFGNHSTLTFAGSQGHFELNVFNPVMAYNFLQSVRLVADAAISFTDNCVVGIEPRVDNIKKGVENSLMLVTALNGKLGYDACAKIAKTAHKNGTTLREEAVGGGYLTNEEFEQYVRPEKMISPG

SEQ ID NO: 29090 - DNA, 1392 bp, Rickettsia conorii
  CDS (1)..(1392)
atgaaaaattacagaaccgaaagtgattcttttggagaaattcaaatagaagaaaaattttattggggggctcaaactcaaagatctttagaaaattttaaaataggcaagcaaaaaatgcctgaaattttaattcgtgctcttgctattttaaaaaaatgtgcagcacaggttaatcatgagtttggtgatttagaagctaaaatcgctataagtatagataaagcaacggatagaatcttagaaggcgaatttgaggataattttcctttagtagtttggcaaacaggttcaggaacgcaaacaaacatgaatatgaacgaggttattgcctctattgccaacgaagaattaacaggcaagaaaggcggcaaatctccggtacatcctaacgatcatgttaataaaggacaatcatccaacgactcttttccaaccgctatgcatatagcaaccgtacttgcaactaaacagcaactgataccagctttgaataatatactgacctctttgcaggataagtcaaaagattgggacaaaatcataaaaataggacgtacccacttgcaggatgcaactcctttaactcttaaacaggaattctccggatatattacacaaatagagtatgctttagaacgcatagaaaatgcactacaaaaagtttatctacttgcccaaggaggcacagcagtcggtacaggtattaactcaaaaataggctttgatataaaatttgccgagaaagtggcagagtttactaaacaaccctttaagacggctcctaataaatttgaaagtctagctgctcacgacgcactagtagaattttcaggaactcttaatactatagcagttagcttaatgaaaatagcaaatgatataagactgctcggctccggtccaagatgcggtcttggtgagctacatttacctgaaaatgaacctggttcttctattatgcccggtaaagtaaaccctacacaagtcgaagctttaacaatggtgtgcagtcaggtgatggggaatcatgttacggttactattgccggctcaaacggacatcttgaacttaacgtatttaaacccgtaataatatacaatatcctacaatctatagagctgttatccgatagcgtaaatagctttgttactcactgtgttaaaggattagaacccaatatagcacgcattaatgatttacgtgataaatctctaatgcttgttacagctcttaatccacatataggctatgataatgctgcaaaaattgctaaagaagcacataagcacggaatcactttaaaagaagcagctaaaaaactcaatcttctatcggaagcaaaatttgataaaatagtagtacctgaaaaaatggttagtcaatcttag

SEQ ID NO: 29091 - protein, 463 aa, Rickettsia conorii
MKNYRTESDSFGEIQIEEKFYWGAQTQRSLENFKIGKQKMPEILIRALAILKKCAAQVNHEFGDLEAKIAISIDKATDRILEGEFEDNFPLVVWQTGSGTQTNMNMNEVIASIANEELTGKKGGKSPVHPNDHVNKGQSSNDSFPTAMHIATVLATKQQLIPALNNILTSLQDKSKDWDKIIKIGRTHLQDATPLTLKQEFSGYITQIEYALERIENALQKVYLLAQGGTAVGTGINSKIGFDIKFAEKVAEFTKQPFKTAPNKFESLAAHDALVEFSGTLNTIAVSLMKIANDIRLLGSGPRCGLGELHLPENEPGSSIMPGKVNPTQVEALTMVCSQVMGNHVTVTIAGSNGHLELNVFKPVIIYNILQSIELLSDSVNSFVTHCVKGLEPNIARINDLRDKSLMLVTALNPHIGYDNAAKIAKEAHKHGITLKEAAKKLNLLSEAKFDKIVVPEKMVSQS

SEQ ID NO: 29092 - DNA, 1422 bp, Xylella fastidiosa
  CDS (1)..(1422)
atggagatgcagatgagcaacagtgatcgttacagaattgaacacgacagtatgggtgatctacgggtgccgatcgatgcgttgtggggtgcgcagacgcaacgtgctatcgagaactttccgatttccgggcggtcaatgcctcagggatttatccacgcattggggtttatcaaggcggctgcggcgaaggttaacgctgagctggggttgttaccaaagccaatggccaaggagattgaggccgctgcattggatgtcgctgcgggccgttatgatgcggattttccagtcgatatttaccagactggctcaggaacctcgtcgaatatgaacgctaatgaggtgattgcgacgctggccatgcgtgccaccaaggagcctatccaccccaacgaccatgtcaaccttggccaaagttctaatgatgtggttccaacagcgattcggatttccgcaacgttggcggttcagggacgattattaccggcgctcaagcatttacggaaaatgattaacaagcgtgcccgtggtttgggcagtgtggtgaagaccggccgtacccacctgatggatgcgatgccgctgacgttcgctcaagaattcggtgcctggtcggcacaaattgtctctgcggaggcgcgcttgaatgacaccctgaaacggttgcatcggctgccattgggagggacagcaattggtaccggtatcaatacggatccacatttcggccgcaatgcggtgaaggtactgtcagcattaacagggattcactttgagagtgcgaacaataagttcgagggattggcagcgcaagatgatttggttgagttatccggccagttcaatgcgttagcagtggcgttgatgaagattgctaatgatctacgctggatgaacgctggaccacttgctggcttgggagagattgagttgcccgcgttgcagccgggaagttcgatcatgccaggtaaggtaaatccggtgattccggaagctgtggtgatggtcgcctcgcaagtgattggccatcacactgcagtgaccgtggctgggcagagtggcaattttcagttgaatgtgacgttaccgctgattgcttacaacctattggagtctgcgacgttgcttggaaatgtggtgatgctgttggctgataaagtcatcgttggtctgaaggtgcgtcaggatcgagtgcaggaggtgctggagcggaatccgattttggtgacagcgttgaatccgatcattggctatgagaaagctgcggtgattgctaagcgtgcttataaggagcaccggccagtgcttgaggtcgcctgcgaggagagcaacctaaaccctgtggagttggcgcgcttactggatccgactgcgttgactgagggtgggatttatgtcgtcgggggaggtggtggataa

SEQ ID NO: 29093 - protein, 473 aa, Xylella fastidiosa
MEMQMSNSDRYRIEHDSMGDLRVPIDALWGAQTQRAIENFPISGRSMPQGFIHALGFIKAAAAKVNAELGLLPKPMAKEIEAAALDVAAGRYDADFPVDIYQTGSGTSSNMNANEVIATLAMRATKEPIHPNDHVNLGQSSNDVVPTAIRISATLAVQGRLLPALKHLRKMINKRARGLGSVVKTGRTHLMDAMPLTFAQEFGAWSAQIVSAEARLNDTLKRLHRLPLGGTAIGTGINTDPHFGRNAVKVLSALTGIHFESANNKFEGLAAQDDLVELSGQFNALAVALMKIANDLRWMNAGPLAGLGEIELPALQPGSSIMPGKVNPVIPEAVVMVASQVIGHHTAVTVAGQSGNFQLNVTLPLIAYNLLESATLLGNVVMLLADKVIVGLKVRQDRVQEVLERNPILVTALNPIIGYEKAAVIAKRAYKEHRPVLEVACEESNLNPVELARLLDPTALTEGGIYVVGGGGG

SEQ ID NO: 29094 - DNA, 1389 bp, Bacillus halodurans
  CDS (1)..(1389)
atgaacacacgaattgagcgagatacgctaggagaaatgcacgttccacaagacaaattatggggggcacaaacgcagcgaagctatgagaatttccatattgggacagaaaaaatgccgatggaaattatttatgcctttgccttgctaaaaaaagcagcagcaaacgtcaacaaaaagcttggacaactgtctgccgaaaaagcagatgccattacctgggctgcaaatgaagtgctagctggcaaacacgatgatcatttcccgcttttcgtttggcaaaccggtagcggcacgcagtcgaacatgaacatgaatgaagtccttgcccgcaggggaaaccagcttctgcaagaaaaagggctagatgttacaattcacccgaacgatgacgtgaaccgatcgcaaagctccaacgacacatttcctaccgccatgcatattgcggcttataataaactggacgatcacttactgcctacactccaaatgttcaaacaaacactccaccaaaaagcaaagcaatttgatgatgtgattaaattaggacgaacacacttacaggatgcgacccccttaaccctcggccaagaaattagtggctgggctcggatgctcgaaaagaccgagcaaatgatccgtgagagcatgatttatttgcaggaattagctatcggtggtacggctgtcggtacaggggttaacgcccatcccaagttcggagaaatggtggccgccgatatcgcaaatgaaaccgggaaacctttcaaatcagccgctaataaatttcacgcgctcacaagtcatgacgaactagtacacactcacggcgccctaaaagcgcttgctgccgatttgtttaaaattgcgaatgatattcgttggcttgcaagtgggcctaggggcggactaggagaactgatcattcctgctaatgagccgggaagctcaattatgccaggaaaggtcaatccaacacagagcgaggcattaacaatgatcacgtcgcaagtaatcggaaatgatgccacgatcgcttttgctgcaagtcaagggaactttgaactgaacgtatttaagccggtcattatttacaatttccttcagtccacaacgctgttaactgatggactccggacgttccatgacaaatgcttaatcggccttgaggcaaacgaaacgatcattaaaaagcatttaaatgagtcactcatgctcgtgacagcactcaaccctcacatcggttatgagaacgcagcaaaaattgcgaaaaaagcacatgccgaaggcttaactcttaaagaagccgcgatgcaaagcggcttgctaaccgaagaggagtttgaaaaaatggtcgatccggcaaaaatggttcacccacaaggctaa

SEQ ID NO: 29095 - protein, 462 aa, Bacillus halodurans
MNTRIERDTLGEMHVPQDKLWGAQTQRSYENFHIGTEKMPMEIIYAFALLKKAAANVNKKLGQLSAEKADAITWAANEVLAGKHDDHFPLFVWQTGSGTQSNMNMNEVLARRGNQLLQEKGLDVTIHPNDDVNRSQSSNDTFPTAMHIAAYNKLDDHLLPTLQMFKQTLHQKAKQFDDVIKLGRTHLQDATPLTLGQEISGWARMLEKTEQMIRESMIYLQELAIGGTAVGTGVNAHPKFGEMVAADIANETGKPFKSAANKFHALTSHDELVHTHGALKALAADLFKIANDIRWLASGPRGGLGELIIPANEPGSSIMPGKVNPTQSEALTMITSQVIGNDATIAFAASQGNFELNVFKPVIIYNFLQSTTLLTDGLRTFHDKCLIGLEANETIIKKHLNESLMLVTALNPHIGYENAAKIAKKAHAEGLTLKEAAMQSGLLTEEEFEKMVDPAKMVHPQG

SEQ ID NO: 29096 - DNA, 1386 bp, Vibrio cholerae
  CDS (1)..(1386)
atgactcgcgaataccgaattgaaaaagacagcatgggtgaggtcaaagtccctgctgatgcgctttatcaagcacaaactcaacgtgccgtagataactttacgttaagccgctacaccatgcctagcgcgtttattgctgccctcgcctacattaaacaagcggcggcgatgaccaatgcgcagttaggtcatttagaaggggacatcgcccaagcgattgccaatgcatcgcaagcggtgattgatggccagtatgcaaaacagttcccgattgatgttttccagacaggttcaggcaccagctccaatatgaacgccaatgaggtgattgccaccctcgcctcgcgtgaattgggctatgcggtgagtccaaacgatcatgtcaacatgggacaaagcagtaatgatgtgatcccaacagcaatccaagtcagtgcggccatcaatattgagcagcaactgctccccgccttggcgcatttaagtcaaactctcgcggataaacagtcagagctggctgatgtggtcaaaactggccgcacccatttgatggatgcgatgcccgtgactttcgcacaagaactgggtggatggaaaagccaaatcgaccacgccgcgcaaggcatcagccatgcgctttcccccatcaaagccttggcgcaaggcggcacagcggtcggcacaggcattaatgcggatccgcgttttgcacgtatttttgccgataacctcagtcaattgagtcatgttgcttttcagcccagcgacaattttttctataacctaagcagccaagactgcgtggtcggcctttctggtcagttgaaaaccgccgcggtcgcgctgatgaaaatcgctaacgatttgcgctggatgaactctggccctttggcggggttaggggaaattgagctgcaaggcttacaaccgggctcctcgatcatgccgggaaaagttaaccctgtgatcccggaagccgtgactatggtcgctgcgcaagtgattggcaatgacactaccattaccgtggctggccaatccggtaatttccagcttaatgtgatgctgcctgtgatcgcgcacaacctactggaatcaatagaattattgacaaatgcctgccatgcgctcgccgataaagccatcgcaacctttaaagttcgtcatgacaatctggaaaaagccttggctaaaaacccgattctcgtcaccgccttgaatcctgtcattggttatctcaaagcggctgatattgccaaaaaagcctaccagcaaggtcgcgcgattttggatgtcgctgcggaagagacggaccttgatcgcgccacgcttgaagcgctgcttgacccgaaaaagctcacacaaggtgggattgcccattaa

SEQ ID NO: 29097 - protein, 461 aa, Vibrio cholerae
MTREYRIEKDSMGEVKVPADALYQAQTQRAVDNFTLSRYTMPSAFIAALAYIKQAAAMTNAQLGHLEGDIAQAIANASQAVIDGQYAKQFPIDVFQTGSGTSSNMNANEVIATLASRELGYAVSPNDHVNMGQSSNDVIPTAIQVSAAINIEQQLLPALAHLSQTLADKQSELADVVKTGRTHLMDAMPVTFAQELGGWKSQIDHAAQGISHALSPIKALAQGGTAVGTGINADPRFARIFADNLSQLSHVAFQPSDNFFYNLSSQDCVVGLSGQLKTAAVALMKIANDLRWMNSGPLAGLGEIELQGLQPGSSIMPGKVNPVIPEAVTMVAAQVIGNDTTITVAGQSGNFQLNVMLPVIAHNLLESIELLTNACHALADKAIATFKVRHDNLEKALAKNPILVTALNPVIGYLKAADIAKKAYQQGRAILDVAAEETDLDRATLEALLDPKKLTQGGIAH

SEQ ID NO: 29098 - DNA, 1809 bp, Pseudomonas aeruginosa
  CDS (433)..(1809)
gaagaaaacaataatcaatctcattatcgtctggtgaggttgccatgtccttcgaggcgcacgacccgcaagcattggatcactggtactggctgggcacgcagatccgctgcgcgctcgatcccgacgaaccgcgcctgctcgaccagtacctcggcgaggcgcgctatctcgccggttgggaaggtgtggccgcctggccgctgttcgagaaagcctacaacctcctgctcgataccggtcgcgatccgatattgccctggcactggcgcagcctctgcctcgactacgcctaccggcccctctgcgaacttcagcgactgaccaccaacggcagccagcgacgccggctgcgccagctctccgtacgaatggccaggcaggacctggcgccgtcgatgagcttcgatcacccgcaacaaggaaaccaagatgactgacacccgcatcgaacgcgacagcatgggcgaactggcggtcccggcgaccgccctctatggcgcccagacccagcgcgcggtgaacaacttcccggtcagcggccaacgcatgccccaggccttcgtccgcgccctgctgctggccaaggccgcggcggcgcgggcgaacgtctccctgcagcaactggatgcaccgatgggcgaggcgatcgccgacacctgcctgcaactgctgcaggaggacttcatgcagcatttcccggtggatgtgttccagaccggctccggcaccagttccaacatgaacgccaacgaagtggtggcgaccctggccagtcgtcgcctgggcggcaaggtcaatccgaacgaccatgtgaactgcgggcagagcagcaacgacatcattccctcgaccatccacatcagtgccgccctcgagatcagcgaacgcctgctgccggcgctgcgccacctggagcagactatccagagcaaggccggcgaagtgcatgcctatgtgaagaccggccgcacccacctgatggatgcgatgccggtacgcatgagccaggtgctcggtggctgggcgcagcaggtgcgacaggccggcgtgcacatcgagagcgtacttcctgccttgcagcagttggcacagggcggcaccgcggtgggcaccgggatcaacgcccatcctcggttcgccgaacgtttcagccaggagctgaacgacctgaccgggctggcgttccgccccggcgacgacttcttcgccctgatcggttcgcaggacaccgcggtcgctgcgtccggccagttgaagaccctggcggtgaccctgatgaagctggccaacgacctgcgctggatgaactccgggccgcttgccgggctcggcgagatcgagctggaagcgctgcaaccaggctcctcgatcatgcccggcaaggtcaacccggtgatcccggaggccaccgcgatggtcgccgcccaggtgatcggcaatgacgctgccattgccgtcgccggccaatcgggcaacttcgaactgaacgtgatgctgccgctggtggcggacaacctgttgcacagcatccagttgctggccaacgtcagccggctgctggcggacaaggccatcgccagcttcaaggtcaaccagggcaagctcagcgaggcgttggcgcgcaacccgatcctggtcactgcgctgaacccgatcattggctaccagaaggctgcggaaatcgccaagcaggcctatcgcgagggacggccgatcatcgatgtggcgctggaaaacaccgatctggaccgtgcgcgcctggaggtgttgctggatccggaaaaactcacggctggcggcctctga

SEQ ID NO: 29099 - protein, 458 aa, Pseudomonas aeruginosa
MTDTRIERDSMGELAVPATALYGAQTQRAVNNFPVSGQRMPQAFVRALLLAKAAAARANVSLQQLDAPMGEAIADTCLQLLQEDFMQHFPVDVFQTGSGTSSNMNANEVVATLASRRLGGKVNPNDHVNCGQSSNDIIPSTIHISAALEISERLLPALRHLEQTIQSKAGEVHAYVKTGRTHLMDAMPVRMSQVLGGWAQQVRQAGVHIESVLPALQQLAQGGTAVGTGINAHPRFAERFSQELNDLTGLAFRPGDDFFALIGSQDTAVAASGQLKTLAVTLMKLANDLRWMNSGPLAGLGEIELEALQPGSSIMPGKVNPVIPEATAMVAAQVIGNDAAIAVAGQSGNFELNVMLPLVADNLLHSIQLLANVSRLLADKAIASFKVNQGKLSEALARNPILVTALNPIIGYQKAAEIAKQAYREGRPIIDVALENTDLDRARLEVLLDPEKLTAGGL

SEQ ID NO: 29100 - DNA, 1425 bp, Mycobacterium tuberculosis
  CDS (1)..(1425)
atggccgttgacgccgacagcgccaattaccgcatcgagcacgacaccatgggcgaagtccgggtgccggcaaaagcgttgtggcgcgcgcaaacccagcgcgcggtggagaacttcccgatatccggccgcgggttggagcgcacccagatccgcgcgctaggcctgctgaaaggcgcctgcgcgcaggtgaactccgacctcgggttgctggcgccggagaaagccgacgccatcatcgccgcggccgccgagatcgccgacggtcaacacgacgaccagtttcccatcgacgtcttccagaccggctcgggcaccagctccaacatgaacaccaacgaggtgattgcgtccatcgcggccaagggcggggtcacgttgcatcccaacgacgacgtgaacatgtcgcagtcgtccaacgacaccttcccgacggccacccacatcgcggccaccgaggccgcggtcgctcatctcatcccagcgctgcagcagctgcacgacgcattggccgccaaggctcttgattggcacacggtggtgaagtcgggccgaacgcatctgatggacgccgttccggtgacactcggccaggagttcagcggatatgcccgccagatcgaggccggcatcgagcgggtgcgcgcgtgtctgcccaggctgggcgagctggcgatcggcggcaccgcggtgggtaccggcctcaacgctcccgacgacttcggcgtcagagtggtcgcggtgctggtcgcgcagaccggtctgtcggaattgcgtacggcggctaattctttcgaagctcaggctgcccgcgacgggctggtggaggcgtccggggcgctgcgcacgatcgcggtatcgctgaccaagatcgccaacgacatccgctggatgggatcgggcccattgaccggcctggccgagatccaactgccagatctgcagccgggcagctcgatcatgccgggaaaggtgaatccggttctgccggaggcggttacgcaggtcgccgcgcaggtgatcggaaacgacgccgccatcgcctggggtggggccaacggcgcattcgaactcaacgtctacatcccgatgatggcccgcaacatcctcgagtccttcaagctgctgaccaatgtgtcacggctgttcgcccagcgctgcatagcagggctgaccgccaacgtcgagcacctgcggcggctggccgagtcctcaccgtcgatcgtgacaccgttgaattcggccatcggctacgaggaggcggccgccgtcgccaagcaagcactcaaggaacgcaaaacgattcgccaaaccgtgatcgaccgtggcctgatcggcgacaggctgtcgatcgaggatctggaccgccgtctggacgtgctggcaatggccaaggccgagcagctcgacagcgatcggctatga

SEQ ID NO: 29101 - protein, 474 aa, Mycobacterium tuberculosis
MAVDADSANYRIEHDTMGEVRVPAKALWRAQTQRAVENFPISGRGLERTQIRALGLLKGACAQVNSDLGLLAPEKADAIIAAAAEIADGQHDDQFPIDVFQTGSGTSSNMNTNEVIASIAAKGGVTLHPNDDVNMSQSSNDTFPTATHIAATEAAVAHLIPALQQLHDALAAKALDWHTVVKSGRTHLMDAVPVTLGQEFSGYARQIEAGIERVRACLPRLGELAIGGTAVGTGLNAPDDFGVRVVAVLVAQTGLSELRTAANSFEAQAARDGLVEASGALRTIAVSLTKIANDIRWMGSGPLTGLAEIQLPDLQPGSSIMPGKVNPVLPEAVTQVAAQVIGNDAAIAWGGANGAFELNVYIPMMARNILESFKLLTNVSRLFAQRCIAGLTANVEHLRRLAESSPSIVTPLNSAIGYEEAAAVAKQALKERKTIRQTVIDRGLIGDRLSIEDLDRRLDVLAMAKAEQLDSDRL

SEQ ID NO: 29102 - DNA, 1392 bp, Helicobacter pylori
  CDS (1)..(1392)
atgcaatttagaattgaacatgacacgatgggcgaaatcaaagtagatgacagccaatattggggggctcaaacgcaacgcagtcttgaaaactttaagatcggcactgaaaaaatgcctaaagaactcattggcgcgttcgccaaactcaaaaggagtttagcggttgtcaatcacaagttagggaaattaagcctggaaaaatcgcaagccattatcaaagcgtgcgattgcattttaaaaggcgagttgtgcggcgaattccccctagcgatatggcaaacagggagcgggactcaaacgaacatgaacctcaatgaagtcattgccaataaggctaccgaaattttagggggtaattttagggagaaaaaactcatccaccctaacgatgatgtgaacatgtctcaaagctccaacgacactttccctaccgcaatgcacgttgtgagcgtgctagaaatcacgcataaactgctgcctagtttagagaatctgttaaaaacctttaaagaaaaaagccaacaatttaaagagattgtcaaaatcgggcgcacgcatttacaagacgctacgcctttaactttggggcaagaatttagcgggtatgcgagcatgctagagcattctaaacaacaaattttagagagtttggagcatttaagggaattagccataggcgggactgccgtaggcacagggctaaacgctcataaggaattgagcgaaaaagtggctgaagaattgagccagtttagcggcgtgaaattcatctctgcacccaataaattccacgcgctcactagccatgacgctatcgcttatgcgcatggggcttttaaggctttagcggcgaatttaatgaaaatcgctaacgatattagatggcttgcgagcgggccgcgctgtggtttgggcgagcttaatatccctgaaaacgagccgggcagttctattatgcccggtaaagtcaatcccacgcaatgcgaagcgatgacaatggtagccgtgcaagtgatggggaatgataccgctattggcattgcggccagtcagggtaattttgaattgaatgtgttcaagccggtgattatttataacttcttgcaaagtttaaggctattgagcgacagcatggaaagtttcaatatccattgcgcgagcggtattgagcctaataaagaaaaaattgattattacttgcaccattctttaatgctagtaaccgcccttaatccgcatgtaggctatgaaaacgccgctaaaatcgctaaaaacgcccacaaaaaaggcatttctttaaaagaaagcgcgctggaactgaaactcttgagcgctgaagactttgaccaattcgtggtgcctgaaaagatgatcggacctaaggcttga

SEQ ID NO: 29103 - protein, 463 aa, Helicobacter pylori
MQFRIEHDTMGEIKVDDSQYWGAQTQRSLENFKIGTEKMPKELIGAFAKLKRSLAVVNHKLGKLSLEKSQAIIKACDCILKGELCGEFPLAIWQTGSGTQTNMNLNEVIANKATEILGGNFREKKLIHPNDDVNMSQSSNDTFPTAMHVVSVLEITHKLLPSLENLLKTFKEKSQQFKEIVKIGRTHLQDATPLTLGQEFSGYASMLEHSKQQILESLEHLRELAIGGTAVGTGLNAHKELSEKVAEELSQFSGVKFISAPNKFHALTSHDAIAYAHGAFKALAANLMKIANDIRWLASGPRCGLGELNIPENEPGSSIMPGKVNPTQCEAMTMVAVQVMGNDTAIGIAASQGNFELNVFKPVIIYNFLQSLRLLSDSMESFNIHCASGIEPNKEKIDYYLHHSLMLVTALNPHVGYENAAKIAKNAHKKGISLKESALELKLLSAEDFDQFVVPEKMIGPKA

SEQ ID NO: 29104 - DNA, 1395 bp, Pseudomonas aeruginosa
  CDS (1)..(1395)
atgagccggaccgaaaccgatagcctgggcaccatcgaggtgcccgacgacgcctactggggcgcccagacccagcgttcgctggagaacttcgccatcggcggccagcgcatgccgctcgccgtgatccacgccctggcgctgatcaagaaagccgccgcgcgggtcaacgaccacctcggcgaactgccgccggaagtcgcccggctgatcgaacaggccgccgacgaagtcctcgcaggccgccacgacgaacacttcccgctggtggtctggcagaccggcagcggcacccagaccaacatgaacgtcaacgaggtgatcgctggccgcgccaacgaactggccggcaatccgcgtggcggcaagtcgccggtgcatcccaacgaccacgtcaaccgcgcgcagagttccaacgacagcttccccaccgccatgcacatcgccgccgccaaggccgtgcacgaacaattgctgccggccatcgccgagctttccggcggtctcgccgaacagtcggcgcggcacgccagcctggtcaagaccgggcgcacccacctgatggacgccacgccgatcaccttcggccaggaactctcggccttcgtcgcccagctcgactacgccgagcgcgccatccgcgcggcgctgccggcggtctaccagttggcccagggcggcaccgcggtgggcaccgggctcaacgcgccgaagggcttcgccgacgccatcgccgcggaaatcgccgccgaatcgggcctgcccttcgtcgccgcgccgaacaagttcgccgccctggccggccacgagccgctggtcatcctctccggcgccctgaagagcctggcggtggccctgatgaagatcgccaacgacctgcgcctgctcggttccggcccacgcgccggcttcgccgaggtgaagctgccggccaacgagccgggcagctcgatcatgcccggcaaggtcaacccgacccagtgcgaggcgctgtcgatgctggcctgccaggtcatgggcaacgacagcacgatttccttcgccgccagccagggccatctgcaactcaacgtgttcaagccggtgatcgtctacaacctgctggagtccatccgcctgctcgccgacggctgccgcaacttcaacaagcattgcgtcgccggcctggagccggacgcccagcgcatggccgacctgctggagcgcggcctgatgctggtcaccgcactgaacccgcacatcggctacgacaaggccgccgaaatcgccaagaaggcctacgccgaaggcaccaccctgcgcgccgcggcgctgcagctgggctacctggacgaagcgcagttcgacgaatgggtacggccggagcagatgctggaggccggccaccatggttga

SEQ ID NO: 29105 - protein, 464 aa, Pseudomonas aeruginosa
MSRTETDSLGTIEVPDDAYWGAQTQRSLENFAIGGQRMPLAVIHALALIKKAAARVNDHLGELPPEVARLIEQAADEVLAGRHDEHFPLVVWQTGSGTQTNMNVNEVIAGRANELAGNPRGGKSPVHPNDHVNRAQSSNDSFPTAMHIAAAKAVHEQLLPAIAELSGGLAEQSARHASLVKTGRTHLMDATPITFGQELSAFVAQLDYAERAIRAALPAVYQLAQGGTAVGTGLNAPKGFADAIAAEIAAESGLPFVAAPNKFAALAGHEPLVILSGALKSLAVALMKIANDLRLLGSGPRAGFAEVKLPANEPGSSIMPGKVNPTQCEALSMLACQVMGNDSTISFAASQGHLQLNVFKPVIVYNLLESIRLLADGCRNFNKHCVAGLEPDAQRMADLLERGLMLVTALNPHIGYDKAAEIAKKAYAEGTTLRAAALQLGYLDEAQFDEWVRPEQMLEAGHHG

SEQ ID NO: 29106 - DNA, 1374 bp, Pseudomonas aeruginosa
  CDS (1)..(1374)
atgactgacacccgcatcgaacgcgacagcatgggcgaactggcggtcccggcgaccgccctctatggcgcccagacccagcgcgcggtgaacaacttcccggtcagcggccaacgcatgccccaggccttcgtccgcgccctgctgctggccaaggccgcggcggcgcgggcgaacgtctccctgcagcaactggatgcaccgatgggcgaggcgatcgccgacacctgcctgcaactgctgcaggaggacttcatgcagcatttcccggtggatgtgttccagaccggctccggcaccagttccaacatgaacgccaacgaagtggtggcgaccctggccagtcgtcgcctgggcggcaaggtcaatccgaacgaccatgtgaactgcgggcagagcagcaacgacatcattccctcgaccatccacatcagtgccgccctcgagatcagcgaacgcctgctgtcggcgctgcgccacctggagcagactatccagagcaaggccggcgaagtgcatgcctatgtgaagaccggccgcacccacctgatggatgcgatgccggtacgcatgagccaggtgctcggtggctgggcgcagcaggtgcgacaggccggcgtgcacatcgagagcgtacttcctgccttgcagcagttggcacaggccggcaccgcggtgggcaccgggatcaacgcccatccgcggttcgccgaacgtttcagccaggagctgaacgacctgaccgggctggcgttccgccccggcgacgacttcttcgccctgatcggttcgcaggacaccgcggtcgctgcgtccggccagttgaagaccctggccgtgaccctgatgaagctggccaacgacctgcgctggatgaactccgggccgcttgccgggctcggcgagatcgagctggaagcgctgcaaccaggctcctcgatcatgcccggcaaggtcaacccggtgatcccggaggccaccgcgatggtcggcgcccaggtgatcggcaatgacgccattgccgtcgctggccaatcgggcaacttcgaactgaacgtgatgctgccgctggtggcggacaccctgttgcacagcatccagttgctggccaacgtcagccggctgctggcggacaaggccatcgccagcttcaaggtcaaccagggcaagctcagcgaggcgttggcgcgcaacccgatcctggtcactgcgctgaacccgatcatcggttaccagaaggctgcggaaatcgccaagcaggcctatcgcgagggacggccgatcatcgatgtggcgctggaaaacaccgatctggaccgtgctcgcctggaggtgttgctggatccggaaaaactcacggctggcggcctctga

SEQ ID NO: 29107 - protein, 457 aa, Pseudomonas aeruginosa
MTDTRIERDSMGELAVPATALYGAQTQRAVNNFPVSGQRMPQAFVRALLLAKAAAARANVSLQQLDAPMGEAIADTCLQLLQEDFMQHFPVDVFQTGSGTSSNMNANEVVATLASRRLGGKVNPNDHVNCGQSSNDIIPSTIHISAALEISERLLSALRHLEQTIQSKAGEVHAYVKTGRTHLMDAMPVRMSQVLGGWAQQVRQAGVHIESVLPALQQLAQAGTAVGTGINAHPRFAERFSQELNDLTGLAFRPGDDFFALIGSQDTAVAASGQLKTLAVTLMKLANDLRWMNSGPLAGLGEIELEALQPGSSIMPGKVNPVIPEATAMVGAQVIGNDAIAVAGQSGNFELNVMLPLVADTLLHSIQLLANVSRLLADKAIASFKVNQGKLSEALARNPILVTALNPIIGYQKAAEIAKQAYREGRPIIDVALENTDLDRARLEVLLDPEKLTAGGL

SEQ ID NO: 29108 - DNA, 1317 bp, Sulfolobus solfataricus
  CDS (1)..(1317)
atgaaatataccgatactgcgcccaagctttttatgaatactggaaccaaatttcctagaagaattatctggtctatgggagttttaaagaagtcctgtgctaaagtcaacgcagatcttggattattagataaaaaaattgcggattcaattattaaggcatctgacgatttaattgatggaaaattagatgataagatagtgcttgatgtatttcaaacgggttcagggaccggacttaatatgaacgtaaatgaggttatagcagaagtagcttctagctattctaatcttaaagtacatccaaatgatcatgtaaattttggtcagtcctcaaacgatactgtgccaacagctataagaattgcagcagtagctgaggtaacaaataggctactgcctgcattacagcaaataatatcctctttaaataagaaggctgaggagtacaaggatgttataaaggctggtagaacccatttaagagacgcattaccagtaactttaggtcaagaactttcagcctacgcagacgctttccagcatgaacatgaacaagttatgaatattttggaatatgtgaaggaattgccaattggaggtactgcgactggtactgggctaaatagccacccagaattccaagaaagagttataaacgaaataaacagaattaccggtttaggatttaagccagctaataggtttagagcaatgagattgctcaccgatctcttattattaagcggagcactgaggaatattgcagtagacctatatagattagggcaagatataaggttaatgttttccggtcccttaactgggttaaatgaaattgatttacctacacaagaggagatagctggtagctcaataatgcctggtaaaactaatccagttacggttgaggctactttactaatctcagcacaagttgtgggattagatcatgcaaaccaattcgcatcaatgttaggcgaatttgagttatcaatgggaattccattagttggttataatatcgtaacccaagttaatttcatctcagaggctttagagaagatgtcaagattagtgattgatggaatggtagcaaatgtagagaagatgaagagatatgctgaatcctctccttcacttataaccatagtatctccagtaataggctatgataaagcaacagaaataggaaagaagttaaataagggaatgtccatacgtgaagcattaagggaattaggatatagcgataatgagataaataaaatattagacttaagcaaactagttaaaccagggttcacagctaaatga

SEQ ID NO: 29109 - protein, 438 aa, Sulfolobus solfataricus
MKYTDTAPKLFMNTGTKFPRRIIWSMGVLKKSCAKVNADLGLLDKKIADSIIKASDDLIDGKLDDKIVLDVFQTGSGTGLNMNVNEVIAEVASSYSNLKVHPNDHVNFGQSSNDTVPTAIRIAAVAEVTNRLLPALQQIISSLNKKAEEYKDVIKAGRTHLRDALPVTLGQELSAYADAFQHEHEQVMNILEYVKELPIGGTATGTGLNSHPEFQERVINEINRITGLGFKPANRFRAMRLLTDLLLLSGALRNIAVDLYRLGQDIRLMFSGPLTGLNEIDLPTQEEIAGSSIMPGKTNPVTVEATLLISAQVVGLDHANQFASMLGEFELSMGIPLVGYNIVTQVNFISEALEKMSRLVIDGMVANVEKMKRYAESSPSLITIVSPVIGYDKATEIGKKLNKGMSIREALRELGYSDNEINKILDLSKLVKPGFTAK

SEQ ID NO: 29110 - DNA, 1401 bp, Synechocystis sp
  CDS (1)..(1401)
atggtaaattcccaccgccttgaaaccgacagtatggggtccctggaagtccaagccgatcgcctgtggggagcgcaaacccaacgttccctgatgttttttgacattggtagcgatgtgatgccgccggatttaattcgggcctttgccatactcaaaaaggcagccgccattaccaatcaggatttgggtaaattaccagcggacaaggcagagttaatcattacggcagcggacgaaatcattgccgggcagtggttagaccatttccctctaaggatttggcaaacgggcagtggcactcaaaccaacatgaacgtgaacgaagtgattgccaatcgggcgatcgccatttgtgggggagaattgggcagtaaaaatcccatccatcccaatgaccacgtcaacatgtcccagtcgtctaacgatacttttcctacggcgatgcacattgcggcggtggcaggtttacaaaccaagttgattcccagtttgcaagctctgagagatagcctgaatgaaaaagcggaatgttttgcaggcatcactaaaattggccgcacccatttgatggacgcagtgcccctaacgttagggcaggaattttccggttacgtggcccagttagaccaagggctgacccaaattaattattgtttacccggtcttttggaattggccctggggggaacggcggtgggtacagggttaaatagtcatccccaatttgctaaaaaagtggccgaagaaattgcccagttaactggttataccttcatttctgcccccaacaaattcgccgccctagctggccacgaggcgatcgcctttgccagtggcgtgctgaaaagtattgccgcttccctgatgaaaattgccaatgatttgcgctggatggggtctgggccccgctgcggcttgggggaattagccttaccagccaatgaaccaggttcttcgatcatgcccgggaaagtaaaccccacccaatgcgaagccatgaccatggtttgtgtgcaggtaatggggaacgatgccaccattggttttgcggccagccaaggtaattttgagctcaatgtttttaagccagtgattattcataatttcctccattcgttacatttactcagcgatgcttgtgctagttttcgccaacatttagtggtgggattacaagtaaacgaaagcaaggttaaagactttttggacacctctttaatgttagtcaccgccctcaatccccacattggctacgacaatgcggccctcgtggctaaaactgcctttgcccaaggcattaccctcaaacaagccgcggtggatttaggtttactcaccccagcccagttcgacgcttgggtcgttccagagcagatgattgccccgattgctgactag

SEQ ID NO: 29111 - protein, 466 aa, Synechocystis sp
MVNSHRLETDSMGSLEVQADRLWGAQTQRSLMFFDIGSDVMPPDLIRAFAILKKAAAITNQDLGKLPADKAELIITAADEIIAGQWLDHFPLRIWQTGSGTQTNMNVNEVIANRAIAICGGELGSKNPIHPNDHVNMSQSSNDTFPTAMHIAAVAGLQTKLIPSLQALRDSLNEKAECFAGITKIGRTHLMDAVPLTLGQEFSGYVAQLDQGLTQINYCLPGLLELALGGTAVGTGLNSHPQFAKKVAEEIAQLTGYTFISAPNKFAALAGHEAIAFASGVLKSIAASLMKIANDLRWMGSGPRCGLGELALPANEPGSSIMPGKVNPTQCEAMTMVCVQVMGNDATIGFAASQGNFELNVFKPVIIHNFLHSLHLLSDACASFRQHLVVGLQVNESKVKDFLDTSLMLVTALNPHIGYDNAALVAKTAFAQGITLKQAAVDLGLLTPAQFDAWVVPEQMIAPIAD

SEQ ID NO: 29112 - DNA, 1401 bp, Thermus aquaticus
  CDS (1)..(1401)
atggaataccgggttgagcgggacaccatgggagaggtcaaggttccggcggaccgctactggggggcccagacccaacgctctctggagcacttccggatcggggcctggcgcttccggatgccgctggagatcatccgggcctacgggatgctgaagaaggccgccgccagagccaacctggagctgggggagctacccgaggagatcgccagggccatcatccaggcggccgaggaggtcatcgccgggaagctggacgaccacttccccctggtggtcttccagaccgggtccggaacccagaccaacatgaacgtcaacgaggtcatcgccaaccgggcctcggagatcctgggcaagcccctggggagcaagtacgtccaccccaatgaccacgtgaaccggggccagagctccaacgacaccttccccaccgccatgtacgtggccaccgtcttggctcttcaccagcacctttacccggcggtggagggcctcatcgccacctttgaggaaaaagccagggcctttgacggcatcgtcaaggtgggccgcacccacctcatggacgccgtccccatcaccctgggccaggaggtggggagctgggccgcccagcttaggaacaccctggccatggtcaaggaggcggaaaagggcctctacaacctggccatcggcggcaccgccgtgggcacgggcctcaacgcccacccccgcttcggggagctggtggcccggtatctggcggaggagaccggcctccccttccgggtggcggaaaaccgcttcgccgccctggccgcccacgacgagctggtccacgtcatgggggctctaaggaccctggccggggccctgatgaagatcggcaacgacatccgctggctggcctcggggccctacgggggtatcggcgagatcttcatccctgccaacgagcccgggagctccatcatgccgggcaaggtgaaccccacccaggtggaggccctaccatgggtggtggtgcgggtctttggcaacgaccaggccgtggccttcgccgggagccagggcaacttccagctcaacgtctacaagccggtcatggtggacgccgccttggagtccatcaagcttctgggcgacgctgtggcctcctttgaccagcacctggcccaggggattgagcccaacctggagcgcatagaggagcacctcaacaagaaccccatgctggccaccgccctcaacaaggccatcggctacgacaaggcggcggagatcgtcaagaaggccatcaaggagaagaagtccctgaagcaggcggccctggagctgggttacctcaccgaggaggagtttgaccggatcgtggtgcccatgcgcctggccaagccccacgaaaacgcttag

SEQ ID NO: 29113 - protein, 466 aa, Thermus aquaticus
MEYRVERDTMGEVKVPADRYWGAQTQRSLEHFRIGAWRFRMPLEIIRAYGMLKKAAARANLELGELPEEIARAIIQAAEEVIAGKLDDHFPLVVFQTGSGTQTNMNVNEVIANRASEILGKPLGSKYVHPNDHVNRGQSSNDTFPTAMYVATVLALHQHLYPAVEGLIATFEEKARAFDGIVKVGRTHLMDAVPITLGQEVGSWAAQLRNTLAMVKEAEKGLYNLAIGGTAVGTGLNAHPRFGELVARYLAEETGLPFRVAENRFAALAAHDELVHVMGALRTLAGALMKIGNDIRWLASGPYGGIGEIFIPANEPGSSIMPGKVNPTQVEALPWVVVRVFGNDQAVAFAGSQGNFQLNVYKPVMVDAALESIKLLGDAVASFDQHLAQGIEPNLERIEEHLNKNPMLATALNKAIGYDKAAEIVKKAIKEKKSLKQAALELGYLTEEEFDRIVVPMRLAKPHENA

SEQ ID NO: 29114 - DNA, 2489 bp, Saccharomyces cerevisiae
  CDS (830)..(2296)
taatcacttctacgagtctagtagatctcttctccttcctataagtggttaatgtattcttcgagaagctcatcatttttttttttcattttttttttttttttcagttttctacaatttcatcaaatcaatggttaaaccgggcagaaaaactaccaagcgttacttttactgatgttagtactactaccgcagttattgcgactactacattaactataactatacaagaaaaaaagtaaagagggctcgtaaagcaaagcttggtatctcctacatagtcaatacatagtagtgagtcgcctatagccattctgtaatgccatttgttaagacgtgtccttaaacccttccgaatcgccgcgggcgacatcataatgtcagtacctaataatggttattattcgtaccctgtggttagagagctatggaagctagcagtaaatgtctctagttcttgctatcactaccatattggagaggcttcaggcccctcccctgagccgatcctcggaatgactaccccgattcccggaatgggcgttcgatgattggctctttcctgtaaagcctttttgcgtttcttataggctatatataatcttcatcactgttgtagacgttaaacaagcatccaacaggaggccggaccgaacacacgggggagtgactctagctctttcttctgggatattcatatcgtttctccattacatacagtcatttttttgcatttttaaattcgtgacttttagtactgcagctgttttttttctcacgtcaagaaattccataaagtctaactattaaacggataagagatacaatcatgttgagatttaccaattgtagttgcaagactttcgtaaaatcgtcatataagcttaatataagaagaatgaactcctcgttcagaactgaaaccgatgcatttggtgagatacacgtgcctgctgataagtactggggtgcccaaactcaaagatcctttcaaaacttcaagattggtggcgctcgtgaaagaatgccattgcctttggtgcatgcatttggtgttttgaagaaatctgccgcgattgtgaatgagtctctggggggattggatcccaagatctccaaggctattcaacaggccgctgacgaagtggcttctggtaagctagacgaccactttccattggttgttttccaaacgggttccggtacccagtctaacatgaatgctaatgaagttatttccaatcgtgccattgagatcctaggaggcaagattggatctaaacaagtccatccaaacaatcattgcaaccaatctcaatcatccaatgatactttccccactgtcatgcatatcgctgccagtttgcaaattcaaaacgagttgatacctgagttgaccaatttaaagaacgcccttgaagccaaatccaaggaatttgaccatattgtgaagatcggtagaacacacttgcaagatgccacgcctttgacactaggtcaagagttttccggttacgtgcaacaagttgagaacggtatccaaagagtggcacattctttgaaaacattgagtttcctggcacaaggtggtactgccgttggtacagggttgaacaccaagcccggattcgatgtcaagatagccgagcaaatttccaaagaaactggactaaagtttcaaaccgcccctaataagttcgaggctttggctgctcacgacgccattgtcgaatgtagcggtgctctaaacacccttgcttgttctcttttcaaaatagcgcaagatataagatacttagggtccgggccacgttgcggctaccatgaactaatgctgccagagaatgaaccaggttcctcaatcatgcctggtaaagttaacccaacccaaaacgaggcattgactcaagtgtgtgtgcaagtcatgggtaacaatgcagctatcacgtttgccggctctcaaggtcaattcgagttaaatgtcttcaagccagtcatgatcgccaatctattgaattcgatcaggttaattactgatgccgcatattcatttagagtgcactgtgttgaaggtatcaaagccaatgagcctcgtattcatgagttgttgactaaatctttaatgttagtcaccgctttgaaccctaagatcggttatgatgccgcttccaaggtcgccaagaatgctcataagaagggcattaccttgaaggaaagtgcattggaattgggtgtattgactgaaaaggaatttgatgaatgggttgttcctgaacacatgctaggtcctaaataaacgagctaaatacctaataatatacaagttttttatgtcttattatatgaaggaaaataaggaagtggagagaatttgtgattcagcaatggtccctccgctaaggtcccgcctctggccagttatgtcagaagaggagcataggcatacattccatttttgatggcttaatggggcccataaatttacatca

SEQ ID NO: 29115 - protein, 488 aa, Saccharomyces cerevisiae
MLRFTNCSCKTFVKSSYKLNIRRMNSSFRTETDAFGEIHVPADKYWGAQTQRSFQNFKIGGARERMPLPLVHAFGVLKKSAAIVNESLGGLDPKISKAIQQAADEVASGKLDDHFPLVVFQTGSGTQSNMNANEVISNRAIEILGGKIGSKQVHPNNHCNQSQSSNDTFPTVMHIAASLQIQNELIPELTNLKNALEAKSKEFDHIVKIGRTHLQDATPLTLGQEFSGYVQQVENGIQRVAHSLKTLSFLAQGGTAVGTGLNTKPGFDVKIAEQISKETGLKFQTAPNKFEALAAHDAIVECSGALNTLACSLFKIAQDIRYLGSGPRCGYHELMLPENEPGSSIMPGKVNPTQNEALTQVCVQVMGNNAAITFAGSQGQFELNVFKPVMIANLLNSIRLITDAAYSFRVHCVEGIKANEPRIHELLTKSLMLVTALNPKIGYDAASKVAKNAHKKGITLKESALELGVLTEKEFDEWVVPEHMLGPK

SEQ ID NO: 29116 - DNA, 1395 bp, Acinetobacter sp
  CDS (1)..(1395)
atgcaaactcgaattgaacacgacaccatgggtgaggttgaggtcccaaacgatgcactttggggagctcagacgcaacgcagtttgcaaaattttaagatcggtcaggaaagactcccacgagcgatgattcgtgcaatgggacttgtcaagaaggcagcagcgattaccaatgcagaactcgggcagttgccagaggatctgagccaatatatcgttggtgcggcagaagaagtaattgcaggtgactgggactcgcaatttcctttggtggtctggcaaacgggttcaggcacacaaagtaatatgaattgtaatgaagtgattgccaatattgcgaaccaaaaattaggaaatgctttaggttctcaatcacctgtgcatccgaacgatcatgtcaatcgtgctcagtcgacaaacgattctttcccaactgccatacatgttgctgcatcattacaaatcaacgaattgcttattcccgctgtaaaaagcctaaaagagaccttgaagaaaaaatcagatgaattttctgatattgtcaaaattggtcgcacgcatttacaggatgcaacaccgttaacattagggcaagagtttagtgggtatgtatcgcagctcgatcatgggttaaagcgattacagcaagcgcttgagggtttatacgagcttccgttaggtggaacggctgtgggtacaggtttaaatgcacatcctgattatgcagtgaatgcagctcaacaacttgctaaactgacaagtctgccattcgttacggcacctaataaatttgaagctttagctggacgtgatgctgcggtatttgcatctggtgcactgaaaactctcgctgtaagcttaaacaaaattgcaaatgatattcgttggctggcaagtggtccgcgttgcggatttggtgaaattcgtattccagaaaacgaaccaggctcaagcattatgccaggcaaagtaaatccaacgcaaagtgaagctatgacgatggtggttgcgcaggtgttaggcaatgatacaacgatcaatgttgcaggtgcttctggtaactttgaactgaatgtcttcatgcctgtaatcgcatttaatcttcttcagtcaattcagcttctaggtgatgcttgtaatagttttaacgaacattgtgcagtaggtatcgagccaaatagagaaaagattgattattttctgcataattcattaatgttggtgacggcattgaatcctgttattggttatgaaaacgctgcaaaagtagcaaaaacggcttacaaagaaaataaaacgttaaaacaggttgctgtagaactaaatttagtcacagaacagcagtttgatgaaatcgttcgtcctgaaaagatggtatctccaaataccaagtaa

SEQ ID NO: 29117 - protein, 464 aa, Acinetobacter sp
MQTRIEHDTMGEVEVPNDALWGAQTQRSLQNFKIGQERLPRAMIRAMGLVKKAAAITNAELGQLPEDLSQYIVGAAEEVIAGDWDSQFPLVVWQTGSGTQSNMNCNEVIANIANQKLGNALGSQSPVHPNDHVNRAQSTNDSFPTAIHVAASLQINELLIPAVKSLKETLKKKSDEFSDIVKIGRTHLQDATPLTLGQEFSGYVSQLDHGLKRLQQALEGLYELPLGGTAVGTGLNAHPDYAVNAAQQLAKLTSLPFVTAPNKFEALAGRDAAVFASGALKTLAVSLNKIANDIRWLASGPRCGFGEIRIPENEPGSSIMPGKVNPTQSEAMTMVVAQVLGNDTTINVAGASGNFELNVFMPVIAFNLLQSIQLLGDACNSFNEHCAVGIEPNREKIDYFLHNSLMLVTALNPVIGYENAAKVAKTAYKENKTLKQVAVELNLVTEQQFDEIVRPEKMVSPNTK

SEQ ID NO: 29118 - DNA, 1452 bp, Candida glabrata
  CDS (1)..(1452)
atgttgagggctagcagtagggcaaagacatcgctcatcgggtacagcgcgcggatgatgcattacagagtagagacggacactttcggcgagatcaaggtacccgcggacaagtactggggcgcgcagacgcagcggtcgttccagaacttcaagatcggcggcgcgcgcgagcgcatgccggagcccatcgtgagggcgttcggtgtgctgaagaagtcagccgccatagtcaacgagaagctcgggacgctagacagcgagatcgcggggcccatccagcaggccgctgacgaggtcgccaagggcaagctcaacgaccacttccccttggtggtgttccagaccgggtcaggcacgcagtctaacatgaacgccaacgaggtcatctccaacagggcgattgagctgatcggcggcgagctcggctccaagaagatccacccaaacaaccactgcaatcaggcgcagtcctccaacgacactttcccctcggtgatgcacatcgccgcggtcacggagatcaccaactccctcttgccggagatcacccagctgaaggacgccctccacaagaaggccgaggagttccaggacatcgtcaagatcggcagaacacacctgcaggacgccacaccgctgaccctcggacaggaattcagcggctacgtccagcagctcgtcaacggcatcgcaagaatcgagaacaccctgccacacctgaagtacctcgcacaaggtggtaccgctgtcggcacagggctgaacacgaaggagggcttcgacaagctgatcgccgagcagatctccaaggaaacgggcatcgacttcaaaaccgcccctaacaagttcgaagctctcgcagctcacgacgcgatcgtcgaggccagcggtgccctgaacaccgtggcttgctctctgttcaagatcgcacaggacatcaggtacctgggctccggccctcgttgcggctacggtgaactgcacttgccagagaacgagccaggttcctccatcatgcctggtaaggtcaacccaacacagaacgaggccatgacccaggtctgtgtccaggtcatgggtaacaacgcagctgtgaccttcgcgggcgccaacggtcagttcgaactgaacgtcttcaagccggtcatgatctcaaacttgttgagctccatcagattgctggcagacgcttgccactccttcagagtccactgtgtcgaaggcatcgaggcaaaccgcgagaagatcaaccacaacttgcacaactcattgatgctggtcaccgctctgaacccaaagatcggctacgacgccgcctccaagatcgcaaagaacgctttcaagaagaacatcaccttgaaagagtccgccttggagttgaaatacttgacctcagaagagttcgacgaatgggtcattcctgaaaacatggttggaccaaccaagtaa

SEQ ID NO: 29119 - protein, 483 aa, Candida glabrata
MLRASSRAKTSLIGYSARMMHYRVETDTFGEIKVPADKYWGAQTQRSFQNFKIGGARERMPEPIVRAFGVLKKSAAIVNEKLGTLDSEIAGPIQQAADEVAKGKLNDHFPLVVFQTGSGTQSNMNANEVISNRAIELIGGELGSKKIHPNNHCNQAQSSNDTFPSVMHIAAVTEITNSLLPEITQLKDALHKKAEEFQDIVKIGRTHLQDATPLTLGQEFSGYVQQLVNGIARIENTLPHLKYLAQGGTAVGTGLNTKEGFDKLIAEQISKETGIDFKTAPNKFEALAAHDAIVEASGALNTVACSLFKIAQDIRYLGSGPRCGYGELHLPENEPGSSIMPGKVNPTQNEAMTQVCVQVMGNNAAVTFAGANGQFELNVFKPVMISNLLSSIRLLADACHSFRVHCVEGIEANREKINHNLHNSLMLVTALNPKIGYDAASKIAKNAFKKNITLKESALELKYLTSEEFDEWVIPENMVGPTK

SEQ ID NO: 29120 - DNA, 1389 bp, Bartonella quintana str
  CDS (1)..(1389)
atggttgaaacacgtcaggaaacagatagctttggaacgatttcagtacgtcaagatcgttattggggagcacaaactgaacgttctctgcataattttaatattggcacagaaaaacaacctctcaccatcatctatgccttaagccttatcaaaaaagctgcagctgttgtcaatatggaaaaaggcaagcttgcacaaaacatcggaaaagcaatcattactgccgccgatgaagtgctcgcaggagcatttgatacgcattttccactttctgtctggcaaactggttctggcacacaaagtaatatgaacgtcaatgaagtcatcgccaaccatgccagcatgcttttgggaggaaaacttggcagtaaagcacccgttcaccccaatgatcacgtaaatatgagccaatcgtcaaacgattcctttcccacagcacttcacattgccaccacactccaaacacgccaacacttatttcccatccttgacgctcttattactactttaagaaaaaaagaagaagaatttgccgatatcatcaaaatcggacgcacccatacccaggatgcaacacctctgacattaggacaggaattttcaggttatcgcgcagcactagaagccaaccgccaacgcattgaaagtgcgcttgccgatgtccaaatgcttgcccaaggagggacagctgttggaacaggactcaatgcaccgcaaggttttgacgttgcttttgcgcaaacaatcagcaccctcacaggaataacctttaagactgccagcaataaatttgaagcactcgcccatcatggagcccttgcacattttcatggaagcttgaatgcattagcagctgatctgtttaaaattgccaatgacattcggtttttgggatccggtccacgctcagggttgggtgaactaagccttccagaaaatgaaccaggatcttccattatgccaggcaagatcaatcccacgcagtgtgaagcaatgactatggttgcttgccaggttttcggcaatcataccagtataacatttgccgcaagccagggacattttgaactcaatgtttataaacctgttattggctataatgttttacagtcgattacgcttcttggtgattgcatgcgttcttttgacatgcattgcattcaaggattacgtgccaatcgagtccatattcactctctcatggaacgctctctcatgttaataacagctcttgcaccggaaattggctatgaaaaagctgccgaaattgctaaagcagcacataaaaatgacacgactttgcgtactgaagctatcaaagcgggagtttctggagatgattatgatcggctggttgatcccaaaaagatgatccacccgcaataa

SEQ ID NO: 29121 - protein, 462 aa, Bartonella quintana str
MVETRQETDSFGTISVRQDRYWGAQTERSLHNFNIGTEKQPLTIIYALSLIKKAAAVVNMEKGKLAQNIGKAIITAADEVLAGAFDTHFPLSVWQTGSGTQSNMNVNEVIANHASMLLGGKLGSKAPVHPNDHVNMSQSSNDSFPTALHIATTLQTRQHLFPILDALITTLRKKEEEFADIIKIGRTHTQDATPLTLGQEFSGYRAALEANRQRIESALADVQMLAQGGTAVGTGLNAPQGFDVAFAQTISTLTGITFKTASNKFEALAHHGALAHFHGSLNALAADLFKIANDIRFLGSGPRSGLGELSLPENEPGSSIMPGKINPTQCEAMTMVACQVFGNHTSITFAASQGHFELNVYKPVIGYNVLQSITLLGDCMRSFDMHCIQGLRANRVHIHSLMERSLMLITALAPEIGYEKAAEIAKAAHKNDTTLRTEAIKAGVSGDDYDRLVDPKKMIHPQ

SEQ ID NO: 29122 - DNA, 1389 bp, Bartonella henselae
  CDS (1)..(1389)
atggttgaaacacgtcaagaaacggatagctttgggacgatttcagtccgtcaagaccgttattggggcgcacaaactgaacgctcattgcataattttaatattggcatagaaaaacaacccctcaccatcatctatgccttaagccttatcaaaaaagcagcagctgttgtgaatatggaaaaaggcaaactcgcaaaaaacattggaaaagccatcattactgctgccgatgaagtgctttccggtgcatttgacacgcatttccccctttctgtttggcaaacaggttctggaacacaaagcaatatgaacgtcaatgaagtgatcgccaatcatgccaatatgcttttgggaggaaaattgggtagcaaaacacctgtgcatcccaatgatcacgtcaatatgagccaatcgtcaaacgattcctttcccacagcacttcacattgctactaccctacaaacgcgccaacacctctttcctatccttgacgcacttattaccactttaaagaaaaaagaagaagaatttgccgatatcatcaaaattggacgtactcatacccaggatgccacacccttaactttagcgcaagaattttcgggctatcgcactgcactcgaagccaaccgccaacgcattgaaaatgctctttgtgatgttcaaatgcttgcccaaggaggtacagctgttggaacagggctgaacgcaccgcaaggctttgacatagcttttgcgcaaacaatcagtacatttacaggaataccctttaaaaccgctagcaataaatttgaagccctcgctcatcatggagctcttgcgcatttccatggtagcttaaatgcattagcagctgatctgtttaaaattgccaatgacattcggtttttgggatccggtccacgctcaggcttgggggaactaagcttaccagaaaatgaaccaggatcttccatcatgccaggcaaggttaaccccacacagtgtgaagcaatgaccatggttgcttgccaagtctttggcaatcataccagtgtaacatttgccgcaagccaagggcattttgaactcaacgtttataaacctgtcattggctacaatgttttacaatcgattacgcttcttggggattgcatgcgctcttttgatcttcattgtattcaaggattacgcgccaatcgagttcacattcattctctcatggaacgttctctcatgttggtgacagcgcttgcaccagaaattggctatgaaaaagctgccgcaattgccaaagcagcgcataaaaatgacacaactttgcgtaccgaagcactcaaactaggagtttctggagaagattatgatcggttggttgatcccaaaaagatgatccatccacaataa

SEQ ID NO: 29123 - protein, 462 aa, Bartonella henselae
MVETRQETDSFGTISVRQDRYWGAQTERSLHNFNIGIEKQPLTIIYALSLIKKAAAVVNMEKGKLAKNIGKAIITAADEVLSGAFDTHFPLSVWQTGSGTQSNMNVNEVIANHANMLLGGKLGSKTPVHPNDHVNMSQSSNDSFPTALHIATTLQTRQHLFPILDALITTLKKKEEEFADIIKIGRTHTQDATPLTLAQEFSGYRTALEANRQRIENALCDVQMLAQGGTAVGTGLNAPQGFDIAFAQTISTFTGIPFKTASNKFEALAHHGALAHFHGSLNALAADLFKIANDIRFLGSGPRSGLGELSLPENEPGSSIMPGKVNPTQCEAMTMVACQVFGNHTSVTFAASQGHFELNVYKPVIGYNVLQSITLLGDCMRSFDLHCIQGLRANRVHIHSLMERSLMLVTALAPEIGYEKAAAIAKAAHKNDTTLRTEALKLGVSGEDYDRLVDPKKMIHPQ

SEQ ID NO: 29124 - DNA, 1389 bp, Bacillus thuringiensis serovar konkukian str
  CDS (1)..(1389)
atggagtacagaattgaaagagatacattaggagaaataaaagttccagctgataaattatgggcagcacaaacacaacgtagtaaagaaaacttcccgattggaacagagcaaatgccgcttgaaattgtaaaagcatttgcaattttaaagaagagtgcagcacttagcaatcaaaaattaggaaagttatcagaagaaaaagcagaagcaattgtggcagcagctgacgaagtgattgcagggaaatggaatgaacattttccgcttgtcgtgtggcaaacaggtagtggtacacaatcaaacatgaatgtgaatgaagtaattgcaaatcgtgggaatcaaattttgaaagaaaagggatctgacgtacatattcatccgaatgatgatgtgaacatgtcccaaagttcaaatgatacatttccaacagcgcttcatgtagcatgtgtaatagcagtagaaaatcacgtattaccagctattacgaaattaaaagaaacgttagcagaaaaagtaactgcatttgaacatattataaaaattggtcgtacacatttacaagatgcgacaccgttaacattaggacaagaaattagtggatggcaccgtatgcttgaaaaaacagagcgtatgattgcagagagcaatacatatatgaaagagcttgcgattggtggtacagcagttggaacaggtattaacgctcatcctaaatttggtgagatggtatcagaggaaattagccaatttacaggtaaacaatttatttctgcaccaaataagttccacgcattaacgagccatgatgaagttgtgtatacgcatggtgcattaaaagcattagcagcggatttaatgaagatcgctaacgatgtacgttggcttgcaagtggtccacgtagtggtcttggagaaattattattccagcaaatgaaccgggaagctctattatgccaggtaaagtaaatccaacgcaaagtgaagcattaacgatggttgtagcgcaagtgatgggaaatgacgcaacaatcggatttgctgcgagtcaaggtaattttgagttgaacgtatttaaacctgttattgcatataacttcttacaatccgctcacttattagcagatgcaattgtttcatttaatgataattgtgcagttggtattgaagctgatgaagaagtcattaaagagaatgtgaatcgttcattaatgcttgttacagcattaaacccgcatatcggatatgaaaatgcagcgaaaattgcgaagcatgctcataaagaagggttaactttaaaagaagcagcattgcaatctggactactaacagaagagcaatttgatgaaattgtcgatccgaaaaaaatgattgctccgaaagagtaa

SEQ ID NO: 29125 - protein, 462 aa, Bacillus thuringiensis serovar konkukian str
MEYRIERDTLGEIKVPADKLWAAQTQRSKENFPIGTEQMPLEIVKAFAILKKSAALSNQKLGKLSEEKAEAIVAAADEVIAGKWNEHFPLVVWQTGSGTQSNMNVNEVIANRGNQILKEKGSDVHIHPNDDVNMSQSSNDTFPTALHVACVIAVENHVLPAITKLKETLAEKVTAFEHIIKIGRTHLQDATPLTLGQEISGWHRMLEKTERMIAESNTYMKELAIGGTAVGTGINAHPKFGEMVSEEISQFTGKQFISAPNKFHALTSHDEVVYTHGALKALAADLMKIANDVRWLASGPRSGLGEIIIPANEPGSSIMPGKVNPTQSEALTMVVAQVMGNDATIGFAASQGNFELNVFKPVIAYNFLQSAHLLADAIVSFNDNCAVGIEADEEVIKENVNRSLMLVTALNPHIGYENAAKIAKHAHKEGLTLKEAALQSGLLTEEQFDEIVDPKKMIAPKE

SEQ ID NO: 29126 - DNA, 1368 bp, Picrophilus torridus DSM 9790
  CDS (1)..(1368)
atgagaacagagcacgatgttataggcagtgttgagcttgatgattctgtttactatggcataaatacatacagggccatgaacaattttaaaatatcaggaataaaggaggatgatgaccatataaaggcaatagcaatggtcaagaaggcagctgcctatggaaaccatagagccgggaagcttaacgatgagctttacagtgcaatagaccaggcgtgtgacctggttatatcaggaaaatacaatgaccagtttgttatagatgtttaccaggcaggtgcaggaacctcatttaacatgaacgcaaacgaggttattgccaatatagcactggaaaaacttggccataaaaagggcgattataagataatacatccaaatgacactgtaaatatgagccagtcaacaaatgatatatacccaacaatgatgcgtgttgcaataatgataaaggctcctgaccttctggaatcaatgaaccagctgataatgtctctgaacaggaagggcgaggaattctcaaagatatacaaaacaggaagaacacacctgcaggacgccgttcgtgttacacttggcgatgagttccgtgcctgggcctatgcccttgcaaaggatatgaaggaaataaaaaatgccctggattacatattagaattaaacataggcggaacggctgttggaaacggcgccaatacacctgatggatacagggattacgccgttgaggcactttcaaatatgttaaaggtgaactttagaacctctggaaacatgatgggtgttatgcagtttatgactgatttttccaggttcatgaactctcttgcgaacactgcaatagaccttggcaagatctctgatgatttaaggcttctatactcgggacctggagccggaatccgtgagatactgttgccggcagtgcagcaggggtcatcaataatgcctggaaagataaatccatcaataccggaggcaatgaacatgatatgcaattccgtacttggtgcccagcaggcggtaaacatgtcggcaaaggcagggcagcttgaattaaacgtctttatgccaaatatagattatgagataacaagatcaataacaatacttaaaaatggcatggacatgctcagggaaagggccatagatggtataaaaccggatttaaagcactgcaggatgcatctgcagaacagctttggatctgccgcattgcttaatccataccttggctatgataccgttgctgcaatagttgaaagggcccttgaaaccggcgagaatatcagggatcttgtcctgcaaacaggaaaaataactgaggagcagtacgataaaatattctcgttcatgaatgaatga

SEQ ID NO: 29127 - protein, 455 aa, Picrophilus torridus DSM 9790
MRTEHDVIGSVELDDSVYYGINTYRAMNNFKISGIKEDDDHIKAIAMVKKAAAYGNHRAGKLNDELYSAIDQACDLVISGKYNDQFVIDVYQAGAGTSFNMNANEVIANIALEKLGHKKGDYKIIHPNDTVNMSQSTNDIYPTMMRVAIMIKAPDLLESMNQLIMSLNRKGEEFSKIYKTGRTHLQDAVRVTLGDEFRAWAYALAKDMKEIKNALDYILELNIGGTAVGNGANTPDGYRDYAVEALSNMLKVNFRTSGNMMGVMQFMTDFSRFMNSLANTAIDLGKISDDLRLLYSGPGAGIREILLPAVQQGSSIMPGKINPSIPEAMNMICNSVLGAQQAVNMSAKAGQLELNVFMPNIDYEITRSITILKNGMDMLRERAIDGIKPDLKHCRMHLQNSFGSAALLNPYLGYDTVAAIVERALETGENIRDLVLQTGKITEEQYDKIFSFMNE

SEQ ID NO: 29128 - DNA, 1392 bp, Parachlamydia sp
  CDS (1)..(1392)
atggactatcgaacagaaaaagacaccttaggagaagttagagtttctgcagactgttattatggagctcaaacgaagcgttcctacgataatttttcgattggaatagaaaaaatgcctaaggaagtaattcatgcgcttgctctaatcaagaaagcggccgccttaactaacgaacagcttggtttattaccaaaaaataaacaactcgtgatttgtgaagtttgcgacgaaattttatctggctgcttagatgatcaatttccgttatctgtttggcagacagggtctggaacgcaaacaaacatgaacctcaatgaagtgattagtaatagggccattgaaaagctgggtggggtgcttggttctaaatatccgatccatcccaatgatgatgtcaacttatctcaatcgtctaatgatgtgtttccttcagccatgcatattgcggtgatgtttgatatatctaagaagttgttaccaagtttaagagaactaaaagaaactttagaagcgaaagttgaagcttttaaagatattgtaaaaattgggcgtacgcatttaatggatgcgacccctttaacacttggacaagaattttcggggtatgtcagccaaatagagcatggaatacaagctctaaaaaatacgtttgcgcatctttctgaattggccttgggagcaactgctgtgggaacgggaatgaatacgcatcccaactacgcaaaattagtggctgaaaaaattagtgagttgtccggatttaattttgtttctgccaggaataaatttgagtcgctcgcgactaatgacgctcttgtagaagttagcggggctttaaaaagggtggccgtttcagtgtttaaaattgccaatgatattcggtggctttcttcaggccctagatgtgccataggagaaatcgttattcctgctaatgaaccaggctcatcgattatgccaggaaaagttaatcctacacaaagtgaagccttaatgatgattgccattcaagtaatggggaatgatgggatcattggttttgcaggttcgcaaggcaatctagaattgaatgtttttcgccctcttattatttataacttaattcaatctattcgattattgagcgatgctatttctaattttaaccaaaaatgtgttgtcggaatagaggctaaccaaacaagaattgcagaacatctgaatcgttccttaatgttagcaactgctcttaatcatgcaattggttatgatcgtgcaagtcaaattgtaaaaaaagcatacttagaaaatataacattaaaagaagctgcactagctttagcctttttaaccgaagatgaatttgatcagattatggatcctaaaaaaatgattgggccaatgacttaa

SEQ ID NO: 29129 - protein, 463 aa, Parachlamydia sp
MDYRTEKDTLGEVRVSADCYYGAQTKRSYDNFSIGIEKMPKEVIHALALIKKAAALTNEQLGLLPKNKQLVICEVCDEILSGCLDDQFPLSVWQTGSGTQTNMNLNEVISNRAIEKLGGVLGSKYPIHPNDDVNLSQSSNDVFPSAMHIAVMFDISKKLLPSLRELKETLEAKVEAFKDIVKIGRTHLMDATPLTLGQEFSGYVSQIEHGIQALKNTFAHLSELALGATAVGTGMNTHPNYAKLVAEKISELSGFNFVSARNKFESLATNDALVEVSGALKRVAVSVFKIANDIRWLSSGPRCAIGEIVIPANEPGSSIMPGKVNPTQSEALMMIAIQVMGNDGIIGFAGSQGNLELNVFRPLIIYNLIQSIRLLSDAISNFNQKCVVGIEANQTRIAEHLNRSLMLATALNHAIGYDRASQIVKKAYLENITLKEAALALAFLTEDEFDQIMDPKKMIGPMT

SEQ ID NO: 29130 - DNA, 1401 bp, Bdellovibrio bacteriovorus
  CDS (1)..(1401)
atgatggcagagggcggattcagaatcgaaaaagacaccatgggtgaagtgaaagttcccgcagacaagttctggggagcacagacccaaaggtccacagaaaacttccgcatcgggggcgatcgtttcccgcgcgagatgatccgggccttgggtgtcttgaagaagtccgccgctatcaccaacgaaaaactgggtctgcttgatccgaaaaaagcctcggtcatcgtgaaagccgccgatgaagtgatcgtcggcaaactcgacgcccatttcccgctggtggtgtggcagacgggttcaggcacacagaccaacatgaatgccaacgaagttatcgccaatcgtgcgatggacatgatgggcatcaaacttcccagcaaggaagttcatcccaatgatgatgtgaacaagggccagtcttcgaatgacactttccccaccgccatgcacattgctgtgggcgagcagattcatcatcgcctgattccgatgctggaaaagctgcacaaagctctggaaaacaaacagaaagaatttaaagacatcgtgaaaatcggtcgcacccatttgatggatgcaacccccctgaccctggggcaggagttttccggttacagcacccaggtgaaacactccatccagcgcgtgaaaaacaccttgccgcatctgtacgagctggcattgggcgggacggcggtgggaacgggtttgaacacgcatccgaaatttgcggttgaagccgctgcggaaatcgctcgcgagacggggattgcctttgtttcggctgaaaacaagtttgaagccctggcggcccatgacgctttggtggaagtcagcggggcgctgaactcggtcgcggtgtccctgatgaaaattgcgaacgacatccgcctgctgggttccggcccgcgctgcgggatcggggagcttcatttgcccgaaaatgaaccgggaagctccatcatgccgggcaaagtgaatcccacccagagcgaggctatgaccatggtctgtgcccaggtgatgggaaatcacgtggccgccacaattggcggggcgacggggcattttgagctgaacgtgtttaagcccgtgattgtgttcaatgttctgaattccgtgcgcctgttggcggacgcggcagaatccttcaccgatcactgtgtggtgggcattgaagccaaccgtaaacagattcagaagcatctggagcagtctttgatgctggtgacggcactgaatcctcacattggctatgacaacgcagccaaaattgccaaaactgcccataaaaacggcacaacactgcgcgaagaagccatcaatcttggactgctctctggcgaagaatttgataagatagtaaaaccggaaaacatggtcggccccagccgatag

SEQ ID NO: 29131 - protein, 466 aa, Bdellovibrio bacteriovorus
MMAEGGFRIEKDTMGEVKVPADKFWGAQTQRSTENFRIGGDRFPREMIRALGVLKKSAAITNEKLGLLDPKKASVIVKAADEVIVGKLDAHFPLVVWQTGSGTQTNMNANEVIANRAMDMMGIKLPSKEVHPNDDVNKGQSSNDTFPTAMHIAVGEQIHHRLIPMLEKLHKALENKQKEFKDIVKIGRTHLMDATPLTLGQEFSGYSTQVKHSIQRVKNTLPHLYELALGGTAVGTGLNTHPKFAVEAAAEIARETGIAFVSAENKFEALAAHDALVEVSGALNSVAVSLMKIANDIRLLGSGPRCGIGELHLPENEPGSSIMPGKVNPTQSEAMTMVCAQVMGNHVAATIGGATGHFELNVFKPVIVFNVLNSVRLLADAAESFTDHCVVGIEANRKQIQKHLEQSLMLVTALNPHIGYDNAAKIAKTAHKNGTTLREEAINLGLLSGEEFDKIVKPENMVGPSR

SEQ ID NO: 29132 - DNA, 1434 bp, Rhodopseudomonas palustris
  CDS (1)..(1434)
atgatcatggcccgcacgccccgctctccccgccccgcgcgttctgccgccacgcgaagcgagaccgatagtttcggtccgatcgatgtcgccgccgaccgttactggggcgcgcagaccgagcgttcgcggcaaaacttccgcatcggcaccgagcggatgccgatcggcatcatccgggcgctggcaatcgtgaaactggccgcggccgagaccaacaaggagctcggcctgctcgacaaccgccgcgccggcgccatcgtccgcgccgcccgcgaagtgatcgacggcacccatgacgatcacttcccgttggtggtgtggcagaccggctccggcacccagaccaacatgaacctcaacgaggtaattgctaatcgcgccaacgaactgctcggcggcgagcggggatcgaagaagccggtacatcccaacgatcacgtcaacatgagccagtcgtcgaacgactcgttcccgaccgcgatgcatatcgccgccgcgcaagcgattacggccgacctgatcccagcgctgacgctgctgcacgatgcgttacgcaagaaggagaaggcgttcgccaagatcgtcaagatcggccggactcacacccaggacgccaccccgctgacgctcggccaggaattttccggctacgcggcacagctcgccagcggcatcgcgcggatcaaatcggcgctgaaggagctgtatccgctggcgcagggcggcaccgcggtcggcaccggactgaacacgcatccgaaattcgccaaggcgttcgccaagcgcgccgcggcgattaccaagctgccgttcgtcaccgcgccgaacaaattcgaagcgctcgccgccaacgacgcctacgtgttcgtgcacggcgcactgaacgccgccgccaccgcgctgtttaagatcgccaacgacatccgcctgctcggctccggcccgcgctccgggcttggcgaactgatcctgccggagaacgagcccggctcatcgatcatgcccggcaaggtcaacccgacccagtgcgaggcgatgaccatggtgtgctgccaggtgttcggcaatcagaccaccctcaccgtcgccggcagccagggtcacttcgaactcaacgtctacaagccggtgatggcgcaggcgatgctgcagtcgatcgggctgctcgccgatgccgcacgctcgttcacgaccaactgcgtcgatggcatccgcgccgacgagcagcggatcggcgaactgatgcagcgctcgctgatgctggtgaccgcgctggcgccgagcatcggctacgacaatgccgccaagatcgccaaggcggcgcatcagcgtggtacgaccttgaaggacgaagcggtgcgttcggaactgatcagcgccgccgaattcgaccggctggtgcggccggacaaaatgacgcatccgggctga

SEQ ID NO: 29133 - protein, 477 aa, Rhodopseudomonas palustris
MIMARTPRSPRPARSAATRSETDSFGPIDVAADRYWGAQTERSRQNFRIGTERMPIGIIRALAIVKLAAAETNKELGLLDNRRAGAIVRAAREVIDGTHDDHFPLVVWQTGSGTQTNMNLNEVIANRANELLGGERGSKKPVHPNDHVNMSQSSNDSFPTAMHIAAAQAITADLIPALTLLHDALRKKEKAFAKIVKIGRTHTQDATPLTLGQEFSGYAAQLASGIARIKSALKELYPLAQGGTAVGTGLNTHPKFAKAFAKRAAAITKLPFVTAPNKFEALAANDAYVFVHGALNAAATALFKIANDIRLLGSGPRSGLGELILPENEPGSSIMPGKVNPTQCEAMTMVCCQVFGNQTTLTVAGSQGHFELNVYKPVMAQAMLQSIGLLADAARSFTTNCVDGIRADEQRIGELMQRSLMLVTALAPSIGYDNAAKIAKAAHQRGTTLKDEAVRSELISAAEFDRLVRPDKMTHPG

SEQ ID NO: 29134 - DNA, 1458 bp, Rhodopseudomonas palustris
  CDS (1)..(1458)
atggcgagcgagactgtgacaccgaccctgcgtgacgtgccgatcggcctcacggcgacaggccagcgccgcgaattcgacagcatgggcagcgtcgacgttccggcggatcgttattggggcgcgcagacgcagcgctcgttgcagcatttctcgatcggcggcgaccgcatgccgaaagcggtgtaccacgcctatggctacgtcaagaaagcctgcgcgctggtcaaccacgccgcgggccggctgccggcctggaagaccgaggccatcgtccgcgcagccgacgagacgatctcgggcgcgctggacgatcactacccgctgttcgtttggcagaccggctccggcacccagagcaacatgaacgtcaacgaagtcgtctccaaccgggcgatccagctgctcgggggtacgctcggcacgcagcagccggtcggccccaatgacgacgtcaatatgggtcagtcgtcgaacgacaccttcccgaccgccatgcacatcgcggcggtgacagcgatcgacgatcaggtcgtgccgcggctttccaagctgatcgagattatcgaacagaaagccgacggctggatggacgtggtcaagatcggccgcacccatctggaagacgccgtgccgctgacggtcggccaggaatggcacggctgggccggtcaattgcgcgacgcccgcgatgcgatcgaagccagccgcgccggcctgtatcagctcgcggtcggcggcaccgcggtcggcaccggcctcaacgcccccaagggcttcgctgccgacgttgctgccaggatcgccgagctgaccggcaagccgttcgtcaccgcaccgaacaagtttgccgcgcagggctcgctcgacgcgatggtccgcgcccacggcgcgctgcgcgatctcgcggtggcgctgatgaagatcgccaacgacatgcgctggctcgcttctggtccgcgctgcggcttcggcgaattgctgctgccgagcaacgagcccggctcctcgatcatgcccggcaaggtcaacccgacgcaatgcgaggcgatggtgatgatctgcatccaggtgatgggcaacgacagcgccgtcgccttcgccggcagccagggcaatttcgaactcaacgcgatgcggccggtgatcatcaacaacttcctgcattcggcgcgcatcctcgccgacggctgtgagaagttccggacctattcggtcgagggcaccgagctcaaccgcgatcgtgtcgcgcagtacgtcgaaggcagcgtgatgctggtcaccgcgctgtcaccggtgatcggctatcagaacgccgcgcatatcgccgaagatgcgatcgccaagaatctcacgctgaagcaggcggcactcgcctccggcaaggtcgacgaggcgacgttcgaccgcatcgtccggccgatcgacatggtcggcagcggtcttgcgggcgcctga

SEQ ID NO: 29135 - protein, 485 aa, Rhodopseudomonas palustris
MASETVTPTLRDVPIGLTATGQRREFDSMGSVDVPADRYWGAQTQRSLQHFSIGGDRMPKAVYHAYGYVKKACALVNHAAGRLPAWKTEAIVRAADETISGALDDHYPLFVWQTGSGTQSNMNVNEVVSNRAIQLLGGTLGTQQPVGPNDDVNMGQSSNDTFPTAMHIAAVTAIDDQVVPRLSKLIEIIEQKADGWMDVVKIGRTHLEDAVPLTVGQEWHGWAGQLRDARDAIEASRAGLYQLAVGGTAVGTGLNAPKGFAADVAARIAELTGKPFVTAPNKFAAQGSLDAMVRAHGALRDLAVALMKIANDMRWLASGPRCGFGELLLPSNEPGSSIMPGKVNPTQCEAMVMICIQVMGNDSAVAFAGSQGNFELNAMRPVIINNFLHSARILADGCEKFRTYSVEGTELNRDRVAQYVEGSVMLVTALSPVIGYQNAAHIAEDAIAKNLTLKQAALASGKVDEATFDRIVRPIDMVGSGLAGA

SEQ ID NO: 29136 - DNA, 1404 bp, Corynebacterium diphtheriae
  CDS (1)..(1404)
atgactgagcagcagtaccgcatcgagcacgacaccatgggtgaagttaaggtgcctatcgacgccctctggcgcgcacagacccagcgcgctgttgagaacttcccaatttctggccgtggcctcgaagccgcacagatccgcgctatggggctgctcaaggccgcttgtgctcaggttaataaggaccgcggacttctggctccagagcaggctgatgcaatcatcgccgcagctaccgaggtagccgagggcaagcacgacgaccagttccctatcgacgtcttccagaccggttccggcacctcgtcgaacatgaactccaacgaggttatcgcctcgatcgctaaggctaacggcgttgaggttcaccctaacgaccacgtcaacatgggccagtcctccaacgacaccttcccaactgctactcacatcgccgcaactgaggccgccgtcaaggacctcattccaggtctgaaggttctccatgcctccctagccaagaaagctgccgagtgggagaacgttgtaaagtccggccgtacccacctaatggatgccgttccagttaccttgggccaggagttctccggctacgctcgccagattgaggctggcatcgagcgcgtcgaggcatgcttgccacgtcttggcgagctctccatcggcggcaccgctgtaggcaccggcctgaacaccccagcagacttcggccagaaggtcactgccgagctcgttaagctgaccggggtttctgaacttcgcgagtgcgtgaaccactttgaggctcaggcaagccgcgacggcctcgtcgagttctccggcgcaatgcgcaccatcgctgtgtctttgaccaagattgctaacgacatccgctggatgggatccggcccgctgactggcctcggcgagatccacttgccagacctgcagccaggttcttccatcatgccaggcaaggtcaacccagttctgtgcgaaaccgcaactcaggtggcagctcaggttattggtaacgacgcagccatcgctttcggcggcgcacagggcgcattcgagctcaacgtcttcattccaatgatggcccgcaacgtcctcgagtcctctcgcctgttggctaacaccgcccgcgtattcgcagagcgtcttgtcgacggcatccatccaaatgaggagcgcatgcgcaccttggccgagtcttccccatcgatcgttaccccactgaactccgctatcggctatgaagctgcagcgaaggtggcaaagaccgcgctaaaggaaggcaagaccatccgccagactgtcatcgacttgggctttgttgatggcgaaaagctcaccgaggaagagctggacaagcgcctcaacgttctcgcaatggccaacaccgatcgcgacaagtaa

SEQ ID NO: 29137 - protein, 467 aa, Corynebacterium diphtheriae
MTEQQYRIEHDTMGEVKVPIDALWRAQTQRAVENFPISGRGLEAAQIRAMGLLKAACAQVNKDRGLLAPEQADAIIAAATEVAEGKHDDQFPIDVFQTGSGTSSNMNSNEVIASIAKANGVEVHPNDHVNMGQSSNDTFPTATHIAATEAAVKDLIPGLKVLHASLAKKAAEWENVVKSGRTHLMDAVPVTLGQEFSGYARQIEAGIERVEACLPRLGELSIGGTAVGTGLNTPADFGQKVTAELVKLTGVSELRECVNHFEAQASRDGLVEFSGAMRTIAVSLTKIANDIRWMGSGPLTGLGEIHLPDLQPGSSIMPGKVNPVLCETATQVAAQVIGNDAAIAFGGAQGAFELNVFIPMMARNVLESSRLLANTARVFAERLVDGIHPNEERMRTLAESSPSIVTPLNSAIGYEAAAKVAKTALKEGKTIRQTVIDLGFVDGEKLTEEELDKRLNVLAMANTDRDK

SEQ ID NO: 29138 - DNA, 1338 bp, Thermoproteus tenax
  CDS (1)..(1338)
atggactttgaagagagggcgaggagggtctatctggacactggaactaagttccagaggcctattatctggagcatggggctcatcaagtacgcggccgcctacgccaacgccgagctgggcctcctgccccggaggctggccgccgccatcatgggggcctccctggaggtaatggagggggtccacgacgctgaggtttatgtggacgtctttcagaccggctctggcacaggtctcaatatgaacatcaacgacgtgattgcgcggagagcctcggagatcgcaggctccagagttcatcctaacgaccacgttaatatgggccagtcctccaacgacgtagtgccgagcgccgtcagaatcgccgcgatcaagacggcggaggacgagctgatgcctgcgttgagcgccttgataggccgcttgagcgagaaatcggccgagttctccaaagtagtcaagcccggcagaacccacttaagagacgccttgcccgtcacgctcggccaagagctgggcgcctatgcggacgctcttgctcacggctgtcgggagctacgagacgtactcgcctatgtcggagagataccgctggggggcactgccgtcggcacaggtttcgggacgcatccccgcttcagacgtctggctattgacgccataaacaagacctcgggcctgcggctctccgaggggaacacgttcagaggaatgaggctcttgaccgatgtattgtatctatccgcagcgctccggaacatcgcggtagagctcatgagactagcgcaagacgtaagactcatgttctccggtcctactgcgggcctcgccgagatcgacctcccctcgcaggctgaagtgccagggagctctatgatgcccggcaaaataaacccagtcacggccgaggccgttatgttggccgcggcccagatcgtcggactggaccacgcgaaccaagccgccgccggcctaggcgagtttgagctcgccatgggcatcccgttgatagggtacaacgtagtggcccagattaacctcctatctgaagcatcgggaaagctctcagagctcgtaatagccgatatgaagccgcggagagaccgcttgagggacctcgcagagaggtcgcccgcgttggccacagctctggcgccagcgttgggatacgagggggtctcccaggttgtaaggaagatttccgagggcaaatccatcagagtggccttagaggaggtgggccgcccggatctggcgcaggagatccccgacgtcgataatatggcgcaggctccggaggcggagaggcggatcgattgtgatagctacaaatag

SEQ ID NO: 29139 - protein, 445 aa, Thermoproteus tenax
MDFEERARRVYLDTGTKFQRPIIWSMGLIKYAAAYANAELGLLPRRLAAAIMGASLEVMEGVHDAEVYVDVFQTGSGTGLNMNINDVIARRASEIAGSRVHPNDHVNMGQSSNDVVPSAVRIAAIKTAEDELMPALSALIGRLSEKSAEFSKVVKPGRTHLRDALPVTLGQELGAYADALAHGCRELRDVLAYVGEIPLGGTAVGTGFGTHPRFRRLAIDAINKTSGLRLSEGNTFRGMRLLTDVLYLSAALRNIAVELMRLAQDVRLMFSGPTAGLAEIDLPSQAEVPGSSMMPGKINPVTAEAVMLAAAQIVGLDHANQAAAGLGEFELAMGIPLIGYNVVAQINLLSEASGKLSELVIADMKPRRDRLRDLAERSPALATALAPALGYEGVSQVVRKISEGKSIRVALEEVGRPDLAQEIPDVDNMAQAPEAERRIDCDSYK

SEQ ID NO: 29140 - DNA, 1368 bp, Listeria monocytogenes str
  CDS (1)..(1368)
atggaacgaatagagcgagatacgcttggagaaatttctgtagatgcgacgaaatattggggagcgcaaacagaacgaagtaaaaggaactttgctattggtgataatcctatgccgatagaaattatatatgcttttgctcaattaaagaaagccactgcaaaagtaaacgcagcagaaggaaaactatccgaagaaaaagcgatagcgattggccaggtttgtgatcaaatcattcaaggagaactagatgagcattttcctttagtcgtttggcaaaccggaagcggaacgcagagcaacatgaatgtcaatgaagttatcgcacatgttgccaacttaactttaggcgaaggacaaattcatccgaatgatgatgtcaacatgtcgcaaagctcgaacgacacatttccaacagcgatgcatatcgctgcatacggggctttagtaacaaaacttttacctgaaataactaaaatggaagctgttttggcagagaagaaaagtaaatacatgcatctcgttaaaattggcagaacacatttgcaagacgcaaccccattaacacttggccaagaaattagtggctgggaagcatgtcttacaaataataaaaactatcttgaaacaagtatgaaagcaattttgccacttgcgattggtgggacggcagttggaactggcttaaatgcctcacgtgattttggtgataaggttgccgaagaattgatgaaacaaacgggatatccttttacttctgattccaataagtattttgctctaactagtcatagtccgattaattttgttcatggatccattcgtagccttgcttcggatctaatgaaaattgctaatgatatccgtttattagcaagtggaccacgtagcggcataggtgagttaacgatcccagttaatgaaccaggaagctccattatgccaggaaaagtaaatcctactcaatgtgaagcaatgacgatggtagcggctcaagtcatgggaaatgatgtgacaattaatgttgctgccagccaaggaaactttgaactcaatgtctacaagccagttatcatttttaatttcttagaatctgtcaaactgctttcagatagcatgcgttcgttccgattgcattgtttggaaggactcactgcgaatgaaaaagttattgaaacaaaagtaaatgactccctaatgcttgtgacagcattgaatccgcatatcggctatgaaaaagctgccaaaattgccaagctggcttttgatgaaaatacgacattaaaagaagcggcaatcaaaaccggttttgtgacagaaaagcaatttgatttatggattgatccgttaaaaatgactaatttgtaa

SEQ ID NO: 29141 - protein, 455 aa, Listeria monocytogenes str
MERIERDTLGEISVDATKYWGAQTERSKRNFAIGDNPMPIEIIYAFAQLKKATAKVNAAEGKLSEEKAIAIGQVCDQIIQGELDEHFPLVVWQTGSGTQSNMNVNEVIAHVANLTLGEGQIHPNDDVNMSQSSNDTFPTAMHIAAYGALVTKLLPEITKMEAVLAEKKSKYMHLVKIGRTHLQDATPLTLGQEISGWEACLTNNKNYLETSMKAILPLAIGGTAVGTGLNASRDFGDKVAEELMKQTGYPFTSDSNKYFALTSHSPINFVHGSIRSLASDLMKIANDIRLLASGPRSGIGELTIPVNEPGSSIMPGKVNPTQCEAMTMVAAQVMGNDVTINVAASQGNFELNVYKPVIIFNFLESVKLLSDSMRSFRLHCLEGLTANEKVIETKVNDSLMLVTALNPHIGYEKAAKIAKLAFDENTTLKEAAIKTGFVTEKQFDLWIDPLKMTNL

SEQ ID NO: 29142 - DNA, 1407 bp, Desulfovibrio vulgaris
  CDS (1)..(1407)
atgatgacaccggccgtacgcatcgaacatgacagcatgggggctgtggaggttcccgccgaccgctactggggggcccagacgcagcgcgcactggagcatttccgcatcggcacggaacggatgccgcaggagatggtgcaggcgctagggctcatcaagagggcggcggccgagaccaatgccgcgttggagctcctgccccggcagactgcggacgccgtggcgcgtgccgccaccgaggtggcgtccggtgcactgcccaaccattttcccctctgtgtgtggcagacaggtagcggcacccagaccaacatgaatgtcaacgaggtggtggccaaccgtgcatgtgaactgctgggcggtgtgcgtggcgaccggaaactcgtgcaccccaacgaccacgtcaacctctgccagtcgtccaacgatgtctttcctgcggccatgcacatcgcagcggcgctgggcctgcgcagcatgctgctgccctcgcttcaagcgctggaggccgaactggaggcacgggcacacgagttcgcgggtctggtgaaggtgggccgaacccacttgcaggacgcggttcccctcactctggggcaggaattctcggggtatgcggctcagcttgcgttgtgccgccgtcaactggagggcatgatgcccctcttgtgcgccctcgcgctggggggcactgccgtgggcaccgggctcaatgcccatcccgagttcgcgcggcgtgccgtggcgcgtctggcggggtacaccggcctgccgttcctgccagtggacaatcctttcgccgctcttgcggggcacgaggcccttgtggcctatagcggtgccctgcgtacgctggcagtggcccttttcaaggtgggcaacgacatccggttgctggcgtccggcccgcgctgcggtatcggtgaactggaactgcctgccaacgaacccggttcttccatcatgcccggcaaggtgaaccccacccagtgcgaggccctgaccatggtggcggtgcaggtcatgggtctggacaacgccgtgggcatcgccggttcgcaagggcatctcgaactcaacgtgttcaagccactcatcgcgagaaatgtgctcgaatcggcgcgtctgctggccgacagcatgcgttcattccgtatgcatgcggtgcgggggctgcgggcggtgcccgaacgcatcgcctcgcatgtcgaccggtcgctcatgctcgtcacggccctgtcgcggcatgtgggctatgaccgggcggcagaggtcgcccatcttgcccatgccgagggactgacgctacgggaggcgtgcctgcgccttggcctcatggacggcgaagccttcgacagggccgtcgaccctgtccggatggcgcacccgcacgacatgggctga

SEQ ID NO: 29143 - protein, 468 aa, Desulfovibrio vulgaris
MMTPAVRIEHDSMGAVEVPADRYWGAQTQRALEHFRIGTERMPQEMVQALGLIKRAAAETNAALELLPRQTADAVARAATEVASGALPNHFPLCVWQTGSGTQTNMNVNEVVANRACELLGGVRGDRKLVHPNDHVNLCQSSNDVFPAAMHIAAALGLRSMLLPSLQALEAELEARAHEFAGLVKVGRTHLQDAVPLTLGQEFSGYAAQLALCRRQLEGMMPLLCALALGGTAVGTGLNAHPEFARRAVARLAGYTGLPFLPVDNPFAALAGHEALVAYSGALRTLAVALFKVGNDIRLLASGPRCGIGELELPANEPGSSIMPGKVNPTQCEALTMVAVQVMGLDNAVGIAGSQGHLELNVFKPLIARNVLESARLLADSMRSFRMHAVRGLRAVPERIASHVDRSLMLVTALSRHVGYDRAAEVAHLAHAEGLTLREACLRLGLMDGEAFDRAVDPVRMAHPHDMG

SEQ ID NO: 29144 - DNA, 1389 bp, Bacillus cereus
  CDS (1)..(1389)
atggagtacagaattgaaagagacacattaggagaaattaaagttccagctgataaattatgggcagcacaaacacaacgtagtaaagaaaactttccgattggcacagagcaaatgccgcttgaaattgtaaaagcatttgccattttaaagaagagtgcagcacttactaataaaaaattaggaaagttatcagaagaaaaagcagaagcaattgtgacagcagctgacgaagtgattgcagggaaatggaatgaacattttccacttgtcgtatggcaaacaggtagtggtactcagtcaaatatgaatgtgaatgaagtaattgcaaaccgagggaatcaaattttgaaagagaagggatttgacgtacatattcatccgaatgatgatgtgaacatgtctcaaagttcaaatgatactttcccaactgcgcttcatgtagcatgtgtactcgcagtagaaaatcacgtgttaccagcaattacgaaattaaaagaaacgttagcagaaaaagtaaaagcatttgaaaatattataaaaattggtcgtacacatttacaagatgcgacaccgttaacattaggacaagaaattagtggatggcaccgtatgcttgaaaaaacagagcgtatgattgcagagagcaatacatatatgaaagagcttgcgattggtggtactgcagttggaacaggtataaacgcccatcctaaatttggtgagatggtatctgaggaaattagccaatttacaggtaagcaatttatttctgcaccaaataaattccatgcattaacgagtcatgatgaagttgtatatacacatggggcattaaaagcattagcagcggatttaatgaagatcgctaacgatgtgcgctggctggcaagtggtccacgtagtgggctaggagaaattattattccagcaaatgagccaggaagctctattatgccaggaaaagtaaatccaacgcaaagtgaagcgttaacgatggttgtagcacaagtgatgggaaatgacgcaacaattggatttgcagcgagccaaggcaattttgagttaaatgtatttaaacctgttattgcatataacttcttacaatctgctcacttattagcagatgcaattgtttcatttaatgataattgtgcagttggtattgaagcagatgaagaagtcattaaagagaatgtgaatcgttcattaatgcttgttacagcattaaacccgcatatcggatatgaaaatgcagcgaaaattgcgaagcatgctcataaagaagggctaactttaaaagaagcagcgttgcaatctggactactaacagaagtacaatttgatgaaattgtcgatccgaaaaaaatgattgctccgaaagagtaa

SEQ ID NO: 29145 - protein, 462 aa, Bacillus cereus
MEYRIERDTLGEIKVPADKLWAAQTQRSKENFPIGTEQMPLEIVKAFAILKKSAALTNKKLGKLSEEKAEAIVTAADEVIAGKWNEHFPLVVWQTGSGTQSNMNVNEVIANRGNQILKEKGFDVHIHPNDDVNMSQSSNDTFPTALHVACVLAVENHVLPAITKLKETLAEKVKAFENIIKIGRTHLQDATPLTLGQEISGWHRMLEKTERMIAESNTYMKELAIGGTAVGTGINAHPKFGEMVSEEISQFTGKQFISAPNKFHALTSHDEVVYTHGALKALAADLMKIANDVRWLASGPRSGLGEIIIPANEPGSSIMPGKVNPTQSEALTMVVAQVMGNDATIGFAASQGNFELNVFKPVIAYNFLQSAHLLADAIVSFNDNCAVGIEADEEVIKENVNRSLMLVTALNPHIGYENAAKIAKHAHKEGLTLKEAALQSGLLTEVQFDEIVDPKKMIAPKE

SEQ ID NO: 29146 - DNA, 1395 bp, Wolbachia pipientis wMel
  CDS (1)..(1395)
atggatagaaagacgagaatagaatcagacagcttaggggaagtaaaagtaccaagtgaacattactggggagcacagactcagcgttctttagaaaattttaagattggcacagaaaaaatgccagagcctctgattaaagcattagcaatagtaaaacttgcagcagcgcgtgttaatatgaaacatggtgttatagatgatagggtaggggacgcaatttgcacagccgcgagggaagtaatagatggcaaatttaataatgaatttccgcttgttgtttggcaaaccggatccggaacgcagactaatatgaatatgaatgaagtgatcagcaatcgtgcaatagagattttaggtggtaatttgggtagtaaatctccaatacatccaaatgatcatgtgaattatggtcagtcgtcaaatgacacctttccaacagcaatgcatatagcagcagcagagcaaataaactgcttgcttattccaaatcttgaaaaattgcataaggtgctggataataaggttcaggaatttaaagatataataaaagtaggacgtactcatctgcaagatgcaacgcccctaacactaggacaggagttttctggctatgcagcccagattaaaaaggggatagagagagtaaaatcaactttaagtggtatatacgagcttgcacaaggtggcactgcggttggcacgggactcaatactaaaaagggttttgctgaagattttgcaaagcaagttgcaggaattactaaccttccatttacttcagcaggcaataaatttgaagcgctagcagcaaatgatgctttagttgagctcagtggaacactcaatacagtagcagtcagtttaatgaaaattgcaaatgatataaggttgcttggttctggtccaagatgcggaattggggaaataatgttaccggaaaatgagcctggttcttcaattatgccaggtaaagtgaatccaactcagtgtgaagcggtgactatggtatgcactcaagttatgggaaatcatgttgctgtaaccattagtggttcaaacggtcattttgaattgaatgtgtttaagccagtgataatttacaatgttttgcagtctataagacttttagctgacgcaagtttaaattttacagaaaaatgtgtagttggtattaaagcaaatgaagagaggataaaagatttactgaatcagtcgttgatgttggtcactatattaaatacgcatatagggtacgacaatgcagcaaaaatagcgaagcttgcttataaagaaaatatcactctaaaggaagcagcagcaaaacttcaactgctcactgaggaagagtttgaaaggatagtgaaaccagaagaaatggtaaattatttgtaa

SEQ ID NO: 29147 - protein, 464 aa, Wolbachia pipientis wMel
MDRKTRIESDSLGEVKVPSEHYWGAQTQRSLENFKIGTEKMPEPLIKALAIVKLAAARVNMKHGVIDDRVGDAICTAAREVIDGKFNNEFPLVVWQTGSGTQTNMNMNEVISNRAIEILGGNLGSKSPIHPNDHVNYGQSSNDTFPTAMHIAAAEQINCLLIPNLEKLHKVLDNKVQEFKDIIKVGRTHLQDATPLTLGQEFSGYAAQIKKGIERVKSTLSGIYELAQGGTAVGTGLNTKKGFAEDFAKQVAGITNLPFTSAGNKFEALAANDALVELSGTLNTVAVSLMKIANDIRLLGSGPRCGIGEIMLPENEPGSSIMPGKVNPTQCEAVTMVCTQVMGNHVAVTISGSNGHFELNVFKPVIIYNVLQSIRLLADASLNFTEKCVVGIKANEERIKDLLNQSLMLVTILNTHIGYDNAAKIAKLAYKENITLKEAAAKLQLLTEEEFERIVKPEEMVNYL

SEQ ID NO: 29148 - DNA, 1413 bp, Mycobacterium paratuberculosis
  CDS (1)..(1413)
atggccactgacgacggcgacaccgactaccgcatcgagcgcgacaccatgggcgaggtccgggtacccgcaaaagcgttgtggcgcgcgcaaacccagcgcgcggtcgagaacttcccgatctcgggccggggcctggaacgcacccagatccgcgccctgggcctgctgaagggcgcctgcgcgcaggtcaacaaggatctggggctgctggcgccggagaaggccgacgcgatcatcgccgcggccgccgagatcgccgacggtcgccacgacgaccagtttcccatcgacgtcttccagaccggctcgggcaccagctcgaacatgaacaccaacgaggtgatcgcgtccatcgcggccgccaacggggtgaccgtgcatcctaacgacgacgtcaacatgtcgcagtcgtcgaacgacaccttccccaccgcaacccacatcgcggccacggaagccgcagtgcgccatctgattccggcgctgcaggtgctgcacgacgccctggcgagcaaggcccgcgagtggcacaccgtggtcaagtcgggccgcacccacctgatggacgccgtgccggtgacactcggccaggagttcagcggctacgcccgccagatcgaggccggcatcgaacgggtgcgggccacgctgccccggctgggtgagctggcgatcggcgggaccgcggtgggcaccggcctcaacgctcccgacggcttcggcgccaaggtggtcgagacgctgatcgcctccaccggattgagcgaattgcgcacggcgacaaactcgttcgaggcccaggcggcgcgcgacgggctggtcgaggcctccggcgcgctgcgcaccatcgcggtgtcgctgaccaagatcgccaacgacatccgctggatgggctcggggccgctgaccggcctggccgagatcgcccttcccgatctgcagccgggcagctcgatcatgccgggcaaggttaatccggttatccccgaagcggttacgcaggtcgccgcgcaggtgatcggcaacgacgcggcggtggccgtcggcggcttgtcgggcgccttcgagctcaacgtgtacatcccgatgatggcccgcaacatcctggagtcgttcaagctgctgaccaacgtgtcgaggctgttcgccgagcgctgcatcagcgggctgagcgccaacgtggagcacctgcgcgagctcgccgaatcctcaccgtccatcgtgacgccgctgaactcggcgatcggctacgaggaggcggcggcggtggccaagcaggcgctcaaggagcgcaagacgattcggcagaccgtcatcgaccgcgggctgatcggcgacaagctgtcgctcgaggagctcgaccgccggctcgacgtgctggccatggccaaggtcaagccgcaggactga

SEQ ID NO: 29149 - protein, 470 aa, Mycobacterium paratuberculosis
MATDDGDTDYRIERDTMGEVRVPAKALWRAQTQRAVENFPISGRGLERTQIRALGLLKGACAQVNKDLGLLAPEKADAIIAAAAEIADGRHDDQFPIDVFQTGSGTSSNMNTNEVIASIAAANGVTVHPNDDVNMSQSSNDTFPTATHIAATEAAVRHLIPALQVLHDALASKAREWHTVVKSGRTHLMDAVPVTLGQEFSGYARQIEAGIERVRATLPRLGELAIGGTAVGTGLNAPDGFGAKVVETLIASTGLSELRTATNSFEAQAARDGLVEASGALRTIAVSLTKIANDIRWMGSGPLTGLAEIALPDLQPGSSIMPGKVNPVIPEAVTQVAAQVIGNDAAVAVGGLSGAFELNVYIPMMARNILESFKLLTNVSRLFAERCISGLSANVEHLRELAESSPSIVTPLNSAIGYEEAAAVAKQALKERKTIRQTVIDRGLIGDKLSLEELDRRLDVLAMAKVKPQD

SEQ ID NO: 29150 - DNA, 1407 bp, Lactobacillus johnsonii
  CDS (1)..(1407)
atggtgaaaaaaggttatcgtgttgaaagtgatacattaggcccagtagaaattcctaaaaaggcattgtggggtccacaaacacaaagaagtaaggataatttccatactggagcgttaatgccaattggtattattcgtgcgcttcttcaaataaagctagctgctgctcaagctaatattgaagcaggaactgaaacagaagaaaaaggacgtgccattattgaagcaattcatcaactacttgatttaaacaatgaagaattgcaaccatattttccattgcatgtctatcaaactggatcaggtacccaaactaatatgaatgttaatgaagtggtggctaatcttgctaataaaaatcatcccggtttagatattttacctaatgatgatgtgaacatgggacaatcatcaaatgatacttttccaactgcaatgaatttagttgcaacacaagcgttagatgacttaaaaccttctattaaacacttgattaaagaactaaaagtgaaacaagatgagtattggacaacggttaaagtaggaagaacccacttgcaagatgcggttccattgacttttggtcaggaactatcaggctatatttctgctcttaatcatgatttatcctacattaacgagttagaagaaacactttatgaattaccaattggaggaactgcggttggcactggacttaatgcagctcctggtatggcagaagatatcgctgagcgtttatcaagaaagtatggacataattttaaagttgatacaaataaattctttggtttagcaaatcactcaggcttaaatgttgtgcatggcgctttaaaagctttggcagctgatatgttcaaaattgctcaagatattcgtttcttaggatctggcccaagagctggtttaggagaacttaatttacctgcaaacgaacctggttcatcaattatgccaggtaaagtaaatccgactcaagcagaagctgttaccatggcatgtttgagagtctttggaaatgatacaactattactatggctgcatctcaaggaaactttgaaatgaatgtctttaagccagtgatgattgcagcatttttagagtctgccaatgttttatctggaactatttctggctttgcagataagatgattcatggtatgactgttaataaagaaagaatggctaaggatgtagcaaattcattaatgacagttactgcactttcaccacatattggttaccatgaagctgctactattgcacagactgcagctaaaaataatacgactttgcgtacagcggctttaaagagcggcttagttactaaagaacaatatgataagtggatgaaaccaattaccatgactaatgcaatgaatactaagccaattgatgattag

SEQ ID NO: 29151 - protein, 468 aa, Lactobacillus johnsonii
MVKKGYRVESDTLGPVEIPKKALWGPQTQRSKDNFHTGALMPIGIIRALLQIKLAAAQANIEAGTETEEKGRAIIEAIHQLLDLNNEELQPYFPLHVYQTGSGTQTNMNVNEVVANLANKNHPGLDILPNDDVNMGQSSNDTFPTAMNLVATQALDDLKPSIKHLIKELKVKQDEYWTTVKVGRTHLQDAVPLTFGQELSGYISALNHDLSYINELEETLYELPIGGTAVGTGLNAAPGMAEDIAERLSRKYGHNFKVDTNKFFGLANHSGLNVVHGALKALAADMFKIAQDIRFLGSGPRAGLGELNLPANEPGSSIMPGKVNPTQAEAVTMACLRVFGNDTTITMAASQGNFEMNVFKPVMIAAFLESANVLSGTISGFADKMIHGMTVNKERMAKDVANSLMTVTALSPHIGYHEAATIAQTAAKNNTTLRTAALKSGLVTKEQYDKWMKPITMTNAMNTKPIDD

SEQ ID NO: 29152 - DNA, 1467 bp, Ashbya gossypii
  CDS (1)..(1467)
atgctcagactaagcagaggttgtgtaggaagcagcgcagcgcgtaggttgatgtcgacagcaggagcgccacagcagttcagggtcgagacggacgccttcggggagatccgggtgccagcagacaagtactggggcgcgcagacacagcggtcgctggagaacttccggatcggcggagcgcgcgagcgcatgccggagccggtggtgcgcgcgttcggcgtgctcaagaagtctgcggcggtggtcaacgagcagctgggcacgctggagccgggcattgcgaaggcgatccagcaggcggcggacgaggtggcccagggccagctgatggagcacttcccgctggtggtgttccagaccgggtcgggcacgcagagcaacatgaacgccaacgaggtgatctcgaaccgcgcgattgagctgctgggcggagagctgggcagcaagcaggtgcaccccaacaaccactgcaaccaggcgcagtcgtcgaacgacacgttcccgtcggtgatgcacatcgcggcggtgacggagatcacgcgctcgctgctgccggagctggaggcgctgcgcgtgtcgttccagcgcaagacggacgagtttgcgcacatcgtcaagatcgggcgcacgcacctgcaggacgcgacgccgctgacgctgggccaggagttcagcggctacacacagcagatcgccaacggcatcgcgcgcgtcgagcacgcgcaggagagcctgcgcttcctcgcgcagggcggcaccgccgtgggcacgggcctcaacacgcgccgcggcttcgcggagcagatcgcggcccaggtgtcccgcgagaccggcctcgagttccgcaccgcgcccaacaagttcgaggcgctggccgcgcacgacgccgtcgtcgaggcctccggcgcgctcaacacgcttgcctgctcgctgttcaagatcgccaacgacatccgctacctcggctccggcccccgctgcggctacggcgagctctcgctgcccgagaacgagcccggctcctccatcatgcccggcaaggtcaacccgacccagaacgaggccctcacgcaggcctgcgtccaggtcatgggcaacaacgccgccatcaccttcgcgggcgcgtccggccagttcgagctcaacgtcttcaagcccgtcatgatcgccaacctgctcagctccgtccgcctgctcgccgacgccgcgcgctccttccgcgtccactgcgtcgacggcatccaggacaacgaggaccgcatcgccaagctgctgcacgagtcgctgatgctggtcacagctctgaaccccaagatcggctacgacgccgcctccgcggtcgccaagaacgcccacaagaagggcatcaccctccgcgcgtccgcgctcgagcttggcgtcctgaccgacgcggagttcgacgagtgggtcgtccccgagaagatgattggtccccgcgactaa

SEQ ID NO: 29153 - protein, 488 aa, Ashbya gossypii
MLRLSRGCVGSSAARRLMSTAGAPQQFRVETDAFGEIRVPADKYWGAQTQRSLENFRIGGARERMPEPVVRAFGVLKKSAAVVNEQLGTLEPGIAKAIQQAADEVAQGQLMEHFPLVVFQTGSGTQSNMNANEVISNRAIELLGGELGSKQVHPNNHCNQAQSSNDTFPSVMHIAAVTEITRSLLPELEALRVSFQRKTDEFAHIVKIGRTHLQDATPLTLGQEFSGYTQQIANGIARVEHAQESLRFLAQGGTAVGTGLNTRRGFAEQIAAQVSRETGLEFRTAPNKFEALAAHDAVVEASGALNTLACSLFKIANDIRYLGSGPRCGYGELSLPENEPGSSIMPGKVNPTQNEALTQACVQVMGNNAAITFAGASGQFELNVFKPVMIANLLSSVRLLADAARSFRVHCVDGIQDNEDRIAKLLHESLMLVTALNPKIGYDAASAVAKNAHKKGITLRASALELGVLTDAEFDEWVVPEKMIGPRD

SEQ ID NO: 29154 - DNA, 1323 bp, Anopheles gambiae str
  CDS (1)..(1323)
atgaagagcaggactgaacacgacagcttcggcgcaatcgccgtgccggccgatcggctgtggggagcccagacccagcgctccctgcagcacttcgacatctccggcgagcgccagccgatggcgctgatccacgccctggcccgcatcaagtcggcctgtgcccgggtcaaccacgccaacgggctgctgcccgcccgcacggcgcaggccatcatgagtgccgccgacgagatcctgtgcggccagcatgatgaggagttcccgctgcgggtatggcagaccggctcaggcacccagaccaacatgaacctcaacgaggtgctggccaaccgggccagcgagctgcttggcggcctgcgcggcgaggggcggctggtgcaccccaacgacgaggtgaacaagagccagtcgagcaatgacgtcttcccgagtgccatgaacctggcagccgtcacggccatcaccgggcacctgctgcccgccttgacgactctgagtaccaccctggccggcaaggcggcggctttcgacaacatcgtcaagataggccgcacccatctgcaggatgccaccccgctcaccctggggcaggagttctccggctgggtcgcccagctcgagcagggggagcgccatatccgggccgccctgccccatctgtgcgagctggccctcggcggcacagccgtcggcaccggcctcaacaccccgcccggcttcgccgaggcggtggccgccaccctggccgagcagaccggcctgccgctgacgctggctgcctccctcatgaagatcgctaacgacgtgcgctggctggcgagcggcccccgcagtgggctgggggagcttatcatcccggaaaacgagccaggctcatccatcatgcctggcaaggtcaatccgacccagtgcgaggcgctcaccatgctgtgcgcccaggtgatgggcaacgacgtggccatcaacatcggcggcgccagcggcaacttcgagctcaacgtgtttaggccgatgatcgcccacaacttcctgcagagcgtgcggctgctggcggacggcatgcagagcttccaccatcattgcgccgtcggcatcaccccgaaccggccccgcatcgacgagctgctggcccgctccctgatgctggtgacggcgctcaacccccatatcggctatgacaaggcggcagagatcgccaagcgggcccaccatgaggggctcagcctgcgggaggcggccatcgcctccggccacctgacggcgcagcagttcgatgcctgggtggtgccggccgacatggtgggtcggcgcggcggctga

SEQ ID NO: 29155 - protein, 440 aa, Anopheles gambiae str
MKSRTEHDSFGAIAVPADRLWGAQTQRSLQHFDISGERQPMALIHALARIKSACARVNHANGLLPARTAQAIMSAADEILCGQHDEEFPLRVWQTGSGTQTNMNLNEVLANRASELLGGLRGEGRLVHPNDEVNKSQSSNDVFPSAMNLAAVTAITGHLLPALTTLSTTLAGKAAAFDNIVKIGRTHLQDATPLTLGQEFSGWVAQLEQGERHIRAALPHLCELALGGTAVGTGLNTPPGFAEAVAATLAEQTGLPLTLAASLMKIANDVRWLASGPRSGLGELIIPENEPGSSIMPGKVNPTQCEALTMLCAQVMGNDVAINIGGASGNFELNVFRPMIAHNFLQSVRLLADGMQSFHHHCAVGITPNRPRIDELLARSLMLVTALNPHIGYDKAAEIAKRAHHEGLSLREAAIASGHLTAQQFDAWVVPADMVGRRGG

SEQ ID NO: 29156 - DNA, 1602 bp, Neurospora crassa
  CDS (1)..(1602)
atgcttcgatcgatgcgcactgccggccgcctggccaagcctcgggctgctgctgccgctgctagcacatgcctctctggcaccgcccgcgttgcttcaaatgccgccagctcctcctccaaggccgccgtcagcttctccgttgctcccaagaccactgctcgttacttctccagctcctccgccatggccaagaacaccagaatcgagaccgacgcctttggcgagattgaggtcgaggatgacaagtactggggcgcccagacccagcgctctctgagcaacttcaagatcaaccagccccaggaccgcatgccccctcccatcatcaaggctttcggtatcctcaagggcgctgccgccaaggttaacacgcgctacggccttgaccccaagattgccgaggccatccagcaggccgccaaggaggtcgccgacctcaagctcctcgaccacttccccctcgtcgtctggcagaccggctccggcacccagtccaacatgaacgccaacgaggtcatctccaaccgtgccattgagatcctcggcggcgtcaagggctccaagaagcctgtgcaccccaacgaccacgtcaaccgctccgcctcgtccaacgacaccttccctaccgtcatgcacatcgccgccgtcctcgaggtcgagggtgagctcctgcccgcgctcaagtccctccgcgacgccctccaggccaaggtggacgagttcgaggccaagaagatcatcaagatcggccgcacccacttgcaggacgccacccccttgactctcgcccaggagttctctggctacgttgcccagctcgacttcggcatcaagcgcgtcgaggagtccctccccgacctccgcctgctcgcccagggcggcaccgccgtcggcaccggcatcaacacgtacattggcttcgccgaggccattgccgaggaagtcaccaagatgaccggcaccgagttcaagacggcccccaacaagtttgaggctctcgccgcgcacgacgccctcgtccacgctcacggcgccctcaacaccctggctgcctctttgaccaagatcgcccaggacatccgctacctcggctccggcccgcgctgcggcctcggcgagctcaacctgcccgagaacgagcccggctcgtccatcatgccgggcaaggtcaaccccacccagtgcgaggccttgaccatggtctgcgcgcaggtgatgggcaaccacgtggccaccaccattggcggcatgaacggccagttcgagctgaacgtgtacaagcctctgatcatccgcaacttcttgcactctgtccgcctgttggccgatggcatgcgctccttcgagaagaacttggtccacggcttgacggccaacgaggagaggattgccaagatcatgaaggagagtctgatgctggttacttgcttgaaccccaagattggctacgacatggcgtccaaggtggccaagaacgcgcacaagaagggcttgacgctcaagcagtcggcgctcgagctgggtgcgttgacggaggaggagtttgatgccttggtgaagcccgagttgatgattggtcctcagccttacaagggttag

SEQ ID NO: 29157 - protein, 533 aa, Neurospora crassa
MLRSMRTAGRLAKPRAAAAAASTCLSGTARVASNAASSSSKAAVSFSVAPKTTARYFSSSSAMAKNTRIETDAFGEIEVEDDKYWGAQTQRSLSNFKINQPQDRMPPPIIKAFGILKGAAAKVNTRYGLDPKIAEAIQQAAKEVADLKLLDHFPLVVWQTGSGTQSNMNANEVISNRAIEILGGVKGSKKPVHPNDHVNRSASSNDTFPTVMHIAAVLEVEGELLPALKSLRDALQAKVDEFEAKKIIKIGRTHLQDATPLTLAQEFSGYVAQLDFGIKRVEESLPDLRLLAQGGTAVGTGINTYIGFAEAIAEEVTKMTGTEFKTAPNKFEALAAHDALVHAHGALNTLAASLTKIAQDIRYLGSGPRCGLGELNLPENEPGSSIMPGKVNPTQCEALTMVCAQVMGNHVATTIGGMNGQFELNVYKPLIIRNFLHSVRLLADGMRSFEKNLVHGLTANEERIAKIMKESLMLVTCLNPKIGYDMASKVAKNAHKKGLTLKQSALELGALTEEEFDALVKPELMIGPQPYKG

SEQ ID NO: 29158 - DNA, 1632 bp, Rhodopirellula baltica
  CDS (1)..(1632)
atgcagtctgcccacccaactttcggccgccgtgtcttgcgattcgtttcctacgattcgaccgaacgccagatagtagcagaaaccatcgcagagtttgggtttcgggcgtcgttcgcgccgtttcagtggattgctaccatgaccggcatcacggtttttgcttttgacgacccgtttttcctccttgttgatccagctatcgctatgaccgattttcgaaccgaacgcgactcgatgggcgaagtccgcgtgccgcaaaacgcttactacggtgcccagactcaacgtgcggtcgagaactttcctgtcagcggctggcaactcccgccgtcgatgatcgcggcgatgggacgcgtcaaattggcatgcgggatcgccaaccgcgatctcggaaagttgacgggttcgggcaagaacccgcttagcgatggtcaagtcgaatcgatgttgtcggcggccaaggaagtcgccgagggacagttggcggatcagttccccgtggacgtgttccagacgggcagcggcaccagcagcaacatgaacatcaacgaagtgctgtccaatcgcgcgatcgaaatcgatggcggcgaccggatggcggaggaaaagtcgatccaccccaacgatcacatcaacatggggcaatcgaccaacgacaccttcccaaccgcgattcatgttgcggccgcttacgaaatcgaaaatcgattgttgccagcattgcgacgcatgcacgaatcgctgacggaaaaagcccaggcttgggacaagatcatcaagatcggacgcactcacctgatggacgcaacgccgttgcgattgggacaggagtttggcggatttgctcgtcaaattgaattgtcgatcgcccgcgccgaagcggcccgcgacgcggtgctggaattgcccgtcggtggcacggcggttggcagcggtatcaacactcaccctgaatttggtgctcgcgtcgcggccagcttgtcagagcaaaccggcatcgctttcatcgaagcggtcaaccatttcgaaggcaacgcgaaccgcgatggtttggtggattcacacggtggattgaagtgcgtcgctcaaacgttgctcggtctggcgaacaacatccgctggctgggcagcggacctcgttgcggtttttatgaagtcaaactgccgactcgccaaccgggaagctcgatcatgcccggaaaggtcaatccggtgatgtgcgagtcgctgatgcaggtcgccgcccgcgtgatcggcaacgacacttgcatgacggtcagcggaggctgcggcggcaacttccagctcaacatcatgatgcccgtgatggctcacaccatcttggagtccatcgagttgttggccggtggtgtcaccgcgttcatcgatttctgcttggatggcatggaacccaacgaagaagcttgcgaagcctcggtggagcagagcctctccatgtgcaccagtctgaacccgttgatcggatacgaacaagccgctgcgctggccaaggaagcgttcaagtccggtcaaacgattcgcgaactgtgcaaagaaaaagggatcttggccgacgacgttctgaccgaagcgttggatccttggaaaatgaccgagccgcaagcatag

SEQ ID NO: 29159 - protein, 543 aa, Rhodopirellula baltica
MQSAHPTFGRRVLRFVSYDSTERQIVAETIAEFGFRASFAPFQWIATMTGITVFAFDDPFFLLVDPAIAMTDFRTERDSMGEVRVPQNAYYGAQTQRAVENFPVSGWQLPPSMIAAMGRVKLACGIANRDLGKLTGSGKNPLSDGQVESMLSAAKEVAEGQLADQFPVDVFQTGSGTSSNMNINEVLSNRAIEIDGGDRMAEEKSIHPNDHINMGQSTNDTFPTAIHVAAAYEIENRLLPALRRMHESLTEKAQAWDKIIKIGRTHLMDATPLRLGQEFGGFARQIELSIARAEAARDAVLELPVGGTAVGSGINTHPEFGARVAASLSEQTGIAFIEAVNHFEGNANRDGLVDSHGGLKCVAQTLLGLANNIRWLGSGPRCGFYEVKLPTRQPGSSIMPGKVNPVMCESLMQVAARVIGNDTCMTVSGGCGGNFQLNIMMPVMAHTILESIELLAGGVTAFIDFCLDGMEPNEEACEASVEQSLSMCTSLNPLIGYEQAAALAKEAFKSGQTIRELCKEKGILADDVLTEALDPWKMTEPQA

SEQ ID NO: 29160 - DNA, 1440 bp, Helicobacter hepaticus ATCC 51449; identical to SEQ ID NO: 11102
  CDS (1)..(1440)

SEQ ID NO: 29161 - protein, 479 aa, Helicobacter hepaticus ATCC 51449; identical to SEQ ID NO: 11103

SEQ ID NO: 29162 - DNA, 1422 bp, Xylella fastidiosa
  CDS (1)..(1422)
atggagatgcagatgagcaacagtgatcgttacagaattgaacacgacagtatgggtgatctacgggtgccgattgatgcgttgtggggcgcgcagacgcaacgtgctatcgagaactttccgatttccgggcggtcaatgcctcagggatttatccacgcattggggtttatcaaggcggctgcggcgaaggttaacgctgagctggggctgttaccaaagtcaatggccaaggagattgaggccgctgcattggatgtcgctgcgggccgttatgatgcggaatttccagtcgatatttaccagactggctcaggaacctcgtcgaatatgaacgctaatgaggtgattgcgacgctggccatgcgtgccaccaaggggcctatccaccccaacgaccatgtcaaccttggccaaagttctaatgatgtggttccaacagcgattcggatttccgcaacgttggcggttcagggacgattattaccagcgctcaagcatttacgcaaaatgattaacaagcgtgcccgtggtttgggcagtgtggtgaagaccggccgtacccacctgatggatgcgatgccgctgacgttcgctcaagaattcggtgcctggtcggcacaaattgtctctgcagaggcgcgcttgaatgacaccctgaaacggttgcatcggctgccattgggagggacagcaattggtaccggcatcaatacggatccacatttcggccgtaatgcggtgaaggtactgtcagcattgacagggattcactttgagagtgcgaacaataagttcgaaggattggcagcgcaagatgatttggttgagttatccggccagttcaatacgttagcagtggcgttgatgaagattgctaatgatctacgctggatgaacgctggaccgcttgctggcttgggagagattgagttgcccgcgttgcagccgggaagttcgatcatgccaggtaaggtaaacccggtgattccggaagcagtggtgatggtcgcctcgcaagtgattggccatcacactgcagtgaccgtggctgggcagagtggcaattttcagttgaatgtgacgttaccgctgattgcttacaacctattggagtctgcgacgttgcttggaaatgtggtgatgctgttggctgataaagtcatcgttggcctgaaggtgcgtcaggatcgagtgcaggaggtgctggagcggaatccgattttggtgacagcgttgaatccgatcattggctatgagaaagctgcggtgattgctaagcgtgcttataaggagcaccggccagtgcttgaggtcgcctgcgaggagagcaacctaaaccctgtggagttggcgcgcttacttgatccggctgcgttgactgagggtgggattcatgtcgtcgggggaggtggtggataa

SEQ ID NO: 29163 - protein, 473 aa, Xylella fastidiosa
MEMQMSNSDRYRIEHDSMGDLRVPIDALWGAQTQRAIENFPISGRSMPQGFIHALGFIKAAAAKVNAELGLLPKSMAKEIEAAALDVAAGRYDAEFPVDIYQTGSGTSSNMNANEVIATLAMRATKGPIHPNDHVNLGQSSNDVVPTAIRISATLAVQGRLLPALKHLRKMINKRARGLGSVVKTGRTHLMDAMPLTFAQEFGAWSAQIVSAEARLNDTLKRLHRLPLGGTAIGTGINTDPHFGRNAVKVLSALTGIHFESANNKFEGLAAQDDLVELSGQFNTLAVALMKIANDLRWMNAGPLAGLGEIELPALQPGSSIMPGKVNPVIPEAVVMVASQVIGHHTAVTVAGQSGNFQLNVTLPLIAYNLLESATLLGNVVMLLADKVIVGLKVRQDRVQEVLERNPILVTALNPIIGYEKAAVIAKRAYKEHRPVLEVACEESNLNPVELARLLDPAALTEGGIHVVGGGGG

SEQ ID NO: 29164 - DNA, 1386 bp, Vibrio parahaemolyticus
  CDS (1)..(1386)
atgaccaccgaatttcgtatcgaaaccgacagcatgggcgaagtaaaagtcccggcgaatgccttgtatcaagcgcaaactcagcgtgctatcgataacttcgcattcagccagcacaccatgccaagcggtttcatccaagctttggcccacatcaagcaaacggcagcgctgaccaacgcacaactagggttactggaaggtgatattgccaatgcgattgcagacgccgcgcaagccattattgatggccagcatctcgatcagttccctatcgacctgttccaaaccggttctgggacaagctccaacatgaacgccaatgaagtgattgccacgctcgcgtctgaattgcttggcggcaacgtcaccccgaatgaccacgttaacatgggtcaaagcagtaacgatgtggtgccgacggcgattcaagtcagctcagcacttgctattgaacacaagttgttgcctgcactggctcatcttagccaaagcctagaaaccaagaagcaagctttgcaaggtgtggtaaaaacaggccgaactcatttgatggacgccatgccaatcactttcgcgcaagagctgggcggctggcaattccagattgaacacgctaaacaagccattgaacaaacactgccgatggtgaaagcccttgctcaaggcggcactgccgttggcacagggatcaacgccgatccgcgttttgcctctctgtttgcagacaacctcactcagtccactcgagtcacctttacttcaagcgacaatttcttcttcaacctcagcagccaggatgcgatcgtcgcactgtctggacagctcaaaacagcagcagttgcgatcatgaagatcgcaaacgatcttcgctggatgaactctggcccattggctggcttgggtgaaatcgaactgcaaggcttacagccgggttcatcaatcatgccgggcaaagtaaacccggttattcctgaagccgcagccatggcgtcagcgcaagtgattggcaacgatgcaaccatcaccatcgcgggtcagtctggcaacttccagttgaatgttatgctacctgtgattgcgcataatattttggagagcattgagctcgttgcgaacagtgcgaccgcccttgccgataaggcgattgcgacctttgacgttcgacaagataacctcgatattgctttggccaagaatccgattttagtcaccgcactaaacccggtgatcgggtatttgaaagcggcagaagtcgcgaaaaaagcctacaaacaaggacgagccatcattgatgtggccgaagaggaaacggatttaaaccgcgaaacgcttgaaaggctgcttaatccagccaaattgactcaaggtggcgtggctgagtaa

SEQ ID NO: 29165 - protein, 461 aa, Vibrio parahaemolyticus
MTTEFRIETDSMGEVKVPANALYQAQTQRAIDNFAFSQHTMPSGFIQALAHIKQTAALTNAQLGLLEGDIANAIADAAQAIIDGQHLDQFPIDLFQTGSGTSSNMNANEVIATLASELLGGNVTPNDHVNMGQSSNDVVPTAIQVSSALAIEHKLLPALAHLSQSLETKKQALQGVVKTGRTHLMDAMPITFAQELGGWQFQIEHAKQAIEQTLPMVKALAQGGTAVGTGINADPRFASLFADNLTQSTRVTFTSSDNFFFNLSSQDAIVALSGQLKTAAVAIMKIANDLRWMNSGPLAGLGEIELQGLQPGSSIMPGKVNPVIPEAAAMASAQVIGNDATITIAGQSGNFQLNVMLPVIAHNILESIELVANSATALADKAIATFDVRQDNLDIALAKNPILVTALNPVIGYLKAAEVAKKAYKQGRAIIDVAEEETDLNRETLERLLNPAKLTQGGVAE

SEQ ID NO: 29166 - DNA, 1377 bp, Pseudomonas syringae pv
  CDS (1)..(1377)
atgagtaatacccgtatcgaacgcgacagcatgggccaattacaggtcccggccgaggccctttacggcgcgcagactcagcgtgcggtggaaaattttccgatcagccatcagcgtatgcccaggctgttcattcgcgcgctactgctggccaaagcggccgctgcacaggcgaaccttgagctggagcagatcagcgaagggcagagccaggcgattgtcggtgccgtgaaagagctgttggccagcgactacatgactcatttcccggtcgatatcttccagaccggttccggcaccagcaccaacatgaacgccaacgaagtgctcgcaacgctggcaacgcggttactgggcgaagaggtcaaccccaacgatcacgtcaactgcgggcaaagcagcaacgacatcatcccgaccacgattcacgtcagcgccgcgctggcactccatgaacaactgctgccagcgcttgcgcatctggtgcaggtcaccgagcacaaggccgtgcaagtccacgccttcgtcaagaccggccgcacacacctgatggacgccatgcccgtgcgcatgagccaggtgctcaatggctgggcgcagcagattcgcgccaacatcgaacatctgcagggtttgcagcccagcctgcaagcactggctcagggcggcacggcggttggcaccggaatcaatgcgcatcccgagtttgcagcacgcttcagtcgccaattgagcacattgaccggcgtgcagttcgcaccgggcaaggacctttttgcgctgatcggctcgcaagacacagcggtagcagtgtctggtcagctaaaggccacggcggtgtcgctgatgaaaattgccaacgacctgcgctggatgaactccgggccgctggcagggctgggtgagatcgagcttgaggccctgcaaccgggctcgtcgatcatgcccggcaaggtcaacccggtgatccccgaggcgactgcgatggtggccgcgcaggtcatcggcaacgacgcgaccatcaccgtggcggggcagtccggcaactttgagctgaacgtgatgctgccgatcatcgcccagaacctgctcagcagcatcgagctgttggccaacgccagccggcttctggcggacaaggcagttgccagcttcaaggtcaatgaatccaggctccaggaagcgctgtcacgtaacccgattctggtcaccgcgctcaacccgatcatcggttatcagaaggccgccgaaatcgccaaggccgcttacaagcagggtcgcccggtgattgacgtcgctctggagcacaccgatttgcagcgcagcgagctggaagtgttgctcaatcccgaaaaactcaccgctggcggcatctga

SEQ ID NO: 29167 - protein, 458 aa, Pseudomonas syringae pv
MSNTRIERDSMGQLQVPAEALYGAQTQRAVENFPISHQRMPRLFIRALLLAKAAAAQANLELEQISEGQSQAIVGAVKELLASDYMTHFPVDIFQTGSGTSTNMNANEVLATLATRLLGEEVNPNDHVNCGQSSNDIIPTTIHVSAALALHEQLLPALAHLVQVTEHKAVQVHAFVKTGRTHLMDAMPVRMSQVLNGWAQQIRANIEHLQGLQPSLQALAQGGTAVGTGINAHPEFAARFSRQLSTLTGVQFAPGKDLFALIGSQDTAVAVSGQLKATAVSLMKIANDLRWMNSGPLAGLGEIELEALQPGSSIMPGKVNPVIPEATAMVAAQVIGNDATITVAGQSGNFELNVMLPIIAQNLLSSIELLANASRLLADKAVASFKVNESRLQEALSRNPILVTALNPIIGYQKAAEIAKAAYKQGRPVIDVALEHTDLQRSELEVLLNPEKLTAGGI

SEQ ID NO: 29168 - DNA, 1380 bp, Pseudomonas putida
  CDS (1)..(1380)
atgatgagtgatacccgtatcgagcgtgacagcatgggtgagctgcaggtgccggcccaggccctctacggcgcccagacccagcgcgcggtcgacaacttcccgatcagcggccagcgtatgccggcccagttcattcgtgccttgttgctggccaaggccgctgcggccaaggccaacgtcgaactggagcaactgtctgccgggcagggccaggctatcgtcaaggctgtcgagcaattgctggccgaggacttcatccagcacttcccggtggatgtgttccagacaggctctggcaccagttcgaacatgaacgccaatgaggtgatcgccaccttggctacccatgtactgggtgaggcggtcaatgccaatgaccacgtcaactgtggccagagcagcaatgacatcattccgaccaccatccatgtcagcgccgcgttggccctgcacgagcagttgctgccagccctggcgcacctggtacaggtgatcgaggtcaagtcggcacaagtacatcaatacgtgaagaccggtcgtactcacctgatggacgcgatgcccgtgcgcatgagccaggtgctggatggctgggctgcgcagatcaatgctgccaagtcgcacatcgaaggtgtgctgccgcacttgcaggcgctggcccagggcggaaccgccgtgggtaccggcatcaacgcccatccgcagttcgctgtcggtttcgctcgccagctcagtggcctgaccaaggtcgagttcacgcccggccagaacctgttcgcactgatcggctcgcaggacactgccgtggctttgtctggccagctcaagaccaccgctgtggcgttgatgaaaatcgccaacgatctgcgctggatgaactccggcccgctggccggtctgggcgaaatcgagctgcaagctctgcagccgggctcttcgatcatgccaggcaaggtcaacccggtgatcccggaggccactgccatggtcgccgcccaagtgattggcaacgacgcgaccatcgccgtcgcaggtcaagccggtaacttcgagctgaacgtgatgctgccggtgatcgcccgcaacctgctggaaagcatcgagctgatggccaatgtcagccgcttgctggccgacaaagccatcgccagcttcaaggtcaacgaagacaaactcaaggaagccctcgcgcgcaacccgattctggtcacggcgttgaatccgatcatcggctacctcaaggccgccgaaatcgccaagaccgcctacaagcagggtcgtccaatcatcgatgtggcgctggagcacaccgacctgtcccgcgaccagcttgaagcgctgctggacccggaaaaactcaccgccggcggtatctga

SEQ ID NO: 29169 - protein, 459 aa, Pseudomonas putida
MMSDTRIERDSMGELQVPAQALYGAQTQRAVDNFPISGQRMPAQFIRALLLAKAAAAKANVELEQLSAGQGQAIVKAVEQLLAEDFIQHFPVDVFQTGSGTSSNMNANEVIATLATHVLGEAVNANDHVNCGQSSNDIIPTTIHVSAALALHEQLLPALAHLVQVIEVKSAQVHQYVKTGRTHLMDAMPVRMSQVLDGWAAQINAAKSHIEGVLPHLQALAQGGTAVGTGINAHPQFAVGFARQLSGLTKVEFTPGQNLFALIGSQDTAVALSGQLKTTAVALMKIANDLRWMNSGPLAGLGEIELQALQPGSSIMPGKVNPVIPEATAMVAAQVIGNDATIAVAGQAGNFELNVMLPVIARNLLESIELMANVSRLLADKAIASFKVNEDKLKEALARNPILVTALNPIIGYLKAAEIAKTAYKQGRPIIDVALEHTDLSRDQLEALLDPEKLTAGGI

SEQ ID NO: 29170 - DNA, 1383 bp, Lactobacillus plantarum WCFS1
  CDS (1)..(1383)
atgacagaatatcgagttgaatcagatactttaggcgaagttaaaattcctgcgaacgccttatggggtgctcagacagaacggagtcgccataactttccgactggtacgaagatgccgttggaaatgattcgggcattacttcaaattaagcgggccgcagcgattgcgaataaagaagttgaagcaatgactgctgaaaaagctgatttaatcgtggctgccattgataagttattagcgctcgacgatgaagatttgcgtaaggactttccgctggttgtttaccaaactggttcggggacgcaaacgaatatgaacgttaatgaagtggtcgcacacatggctggtaagatcaatcctgatattgaaatcttgccgaacgacgatgttaaccatggtcaaagctctaacgatatcttcccaacggcgatgaacattacggccgcagttgccgtggataagctgattgccgcagcggaacacttattagcggaattgaagatcaaacaaaagaagtactggcgggtagtaaagattggccggacccatcttcaagatgcaacgccattaacttttggccaagaagtgagtggttgggccagtgcgattgaacatgatattgcctacttaaaacagttgaatccaacgttaggcgagcttgcaatgggtgggaccgccgttgggactggtctaaatgctgcccctcattttgctgaaaatattgcggcggcgatgagcaaattgtatgggattgaatttacggctgattccaataagttctatggtttggcccatcattctggtttaaacgtggttcacggggccatcaagaccctagcagccgatttgatgaagattgccaatgatgtgcggttcttggcaagcggtccacgggccggttatgacgaattaaacattccggctaacgaacccggctcatcaatcatgcctgggaaagttaacccaacccaagctgaagccatcactatggcagcggtacgagttatggggaatgacgtggtcgtcgatttagcttctagccaaggtaattttgaaatgaacgtttacaagaccgttttgattgatgctttccttgaatctgctgaattgttagctggaacgattaccggcttcactgaccgaatgattgctggtttgacggtcaaccaagaccggatggcagagttagtcgacagttccttgatgacggttacggcattgtcaccacatattggctatcatgatagtgcgatgattgctcaagcagctgaaaaagcggggacgacattgcgtgaagcagctatcaagtctggcaaagtaaccgcggaacaattcgatgaatggatggttccactggatatgacgaatattgatgattaa

SEQ ID NO: 29171 - protein, 460 aa, Lactobacillus plantarum WCFS1
MTEYRVESDTLGEVKIPANALWGAQTERSRHNFPTGTKMPLEMIRALLQIKRAAAIANKEVEAMTAEKADLIVAAIDKLLALDDEDLRKDFPLVVYQTGSGTQTNMNVNEVVAHMAGKINPDIEILPNDDVNHGQSSNDIFPTAMNITAAVAVDKLIAAAEHLLAELKIKQKKYWRVVKIGRTHLQDATPLTFGQEVSGWASAIEHDIAYLKQLNPTLGELAMGGTAVGTGLNAAPHFAENIAAAMSKLYGIEFTADSNKFYGLAHHSGLNVVHGAIKTLAADLMKIANDVRFLASGPRAGYDELNIPANEPGSSIMPGKVNPTQAEAITMAAVRVMGNDVVVDLASSQGNFEMNVYKTVLIDAFLESAELLAGTITGFTDRMIAGLTVNQDRMAELVDSSLMTVTALSPHIGYHDSAMIAQAAEKAGTTLREAAIKSGKVTAEQFDEWMVPLDMTNIDD

SEQ ID NO: 29172 - DNA, 1642 bp, Drosophila melanogaster
  CDS (73)..(1527)
cttttcctggcctgtacttttcggcctaaatatttcatttcgtaacacatatacacattaaaattttccaaaatgtctttcgatcagaaggagattttcagtttgatgtacaaactggctcggctaatagtgccggatactcgagttgaatatgattcgatgggtgccgtgcacattcctctcgatcgaatgttcggtccgcaaaccatgagatccctgatgaaatttccaattggcggagttgaggaacgaatgccacgacccctaataaaagccctgggcatagtgaagaaatcagctgcggagacgaacaaaatccattgtctggaggagcatctatgcgatgccatttccaaggcctgcgatgatgttatatcgggcaaactctatgacgaggaacactttccgttggttatatggcaggatggaagcggcgagcacacaaacatgaacgtaaacgaggttatatgcaatcgagccatcgaaattctgggcggtcagatgggctccaaggagccggtggatcccaatgaacatgtcaacatggcgcaaagttcccatgacaccttctcgacagccgtgcgcatcgccgtggccatgcagttgcaggagacgctgtatcccagcttaaggacctttattgatttgctgggcaagaagtcgaacgattggatggatttgatcaagattggtagaacgcatctgatggacgcagttcctctgtccctcggccaggagttcagtggctatcagcagcaacttgtgaacggaaggacgcgattggactgtgccatgtgccgattgtatcagttgcccatgggcggcaccagtgtgggcaccaaagtggacaccaaggcggaatattctgcgcagtgcatcaagcgtatagccgagctaacattcctaccctttgtcgagtccccgaacttttttgaatccatctccgcctgcgattgcctggtggaactgcacggtgaactcaacacgattgcagcgagtgtgatgaagatagcgaatgatatacgattccttggatcgggaccacgttgcggatttggtgaactacatctgccggagaacgaaccaggtagttccataatgcccggcaaagtgaatcccacgcaatgcgaggccatgtccatgatctgtgcccaggtgatgggcaaccatgtggccgtctccatgggtggttcctctggccactttcagctgaacacctttatgcccatgattgcctccaatgttttgcgctcgattacacttttgggcgatggcatgaagtccttttgcaccaattgcctcgagggcatcgagcccaataggagcaagattggtagcatcgtcaaggagtccctgatgctggtcactgccctcagtccacacattggctacgaacgatccgctgcgatcgccaaggcagcgcatcacaatggaaccactttggaacaggaggccatacttgatggcattcaacgggaggacttcagggagtgggtgcagcccagcaagatgctgggtcccgaatagtcgaaatggccacaaaacagtatcataatttaaataaattgtttcaattattatgtcgagctttaaaatttaataaatgcggtcaattggctctgtaaaaaaaaaaaaaaaaaaa

SEQ ID NO: 29173 - protein, 484 aa, Drosophila melanogaster
MSFDQKEIFSLMYKLARLIVPDTRVEYDSMGAVHIPLDRMFGPQTMRSLMKFPIGGVEERMPRPLIKALGIVKKSAAETNKIHCLEEHLCDAISKACDDVISGKLYDEEHFPLVIWQDGSGEHTNMNVNEVICNRAIEILGGQMGSKEPVDPNEHVNMAQSSHDTFSTAVRIAVAMQLQETLYPSLRTFIDLLGKKSNDWMDLIKIGRTHLMDAVPLSLGQEFSGYQQQLVNGRTRLDCAMCRLYQLPMGGTSVGTKVDTKAEYSAQCIKRIAELTFLPFVESPNFFESISACDCLVELHGELNTIAASVMKIANDIRFLGSGPRCGFGELHLPENEPGSSIMPGKVNPTQCEAMSMICAQVMGNHVAVSMGGSSGHFQLNTFMPMIASNVLRSITLLGDGMKSFCTNCLEGIEPNRSKIGSIVKESLMLVTALSPHIGYERSAAIAKAAHHNGTTLEQEAILDGIQREDFREWVQPSKMLGPE

SEQ ID NO: 29174 - DNA, 1699 bp, Drosophila melanogaster
  CDS (141)..(1544)
gcctttcaatgcccgagcacgcctcagttaacatcgagcagcagccgtcgtcgagtggtcgtcctctgatttgttcactctgattgccatagtctcaatttggcttcacttacttactatctgtcatatctgcatctgaaatggcctcccaggagtttcgcgtggagagcgacacctttggcgaactgaaggtgcccgcggataagtactatggcgcccaaacgatgcgatcccagatcaatttccccatcggcggagccaccgaacggatgcccaaacccgtggtccaggccatgggcatcctgaagaaggccgccgccgaggtgaacaaggagttcggactggacagcaaggttagcgaggcgatctcgaaggcggccgacgatgtgatctctggcaagctatacgacgaccacttcccgctggtcatctggcagacgggctcgggcacgcagagcaacatgaatgtgaatgaggtgatcagcaatcgtgccattgagctgctgggcggcaaactgggctccaagacgcccgtgcatcccaacgatcatgtgaacaaatcgcagagctccaacgataccttccccaccgccattcacatctcggtggcgctggagctgaacaacaaccttaagccggcgattaagacgctgcacgatgcgctgcgtgccaagtcggaggagttcaaggacattatcaagatcggacgcacgcatacgatggatgcggtgccattgacgctgggccaagagttcagcggctatgcccagcaattggcctacgcccaggagcgcatcgatgcctgtctgccgcgcgtctatgagctggctctgggcggcactgctgtgggtacgggtctgaacacacgcaagggattcgccgagaagtgcgctgcaaagatcgccgagctgaccagcctgcccttcgttaccgcgcccaacaagttcgaggcactggctgcccgcgatgccatggtggaggtgcatggtgtgctcaacacgatcgccgttagcctgatgaagattgccaacgatattcgtttccttggctccggaccgcgttgcggtttgggtgagctctcgctaccggagaacgagccaggtagctccatcatgcccggcaaggtgaatcccacgcaatgcgagtcgctgacaatgctctccgcccaggtgatgggcaatcaggtggcggtgaccatcggtggatccaatgggcacttcgagctgaatgtattcaagcccctgatcgtgtccaatgtgctgcgctccattcggctattgtctgatggcagcaggaccttcactgccaactgtgtgaatggcatccaggcgaaccgcgagaatattgccaagatcatgaacgagtcgctcatgctggtgaccgctctgaatccgcacattggttacgacaaggctgcgaaaattgcaaagacggcgcacaagaatggcaccacactcaaggaggaggccatcaatttgggttacctgacggagcagcagttcaacgactgggtgcgacccgaacagatgctgggacccaagtgaagtggagccaagtaggccgacgacgaaatccatcattcaatcatcgctgtcatcggaatcgcagtgtgattttctagatcagatcgttttgttgtatatgaatcgctcggaaacacagaaccaataataattgaaaatgctgaagcaaaacaatg

SEQ ID NO: 29175 - protein, 467 aa, Drosophila melanogaster
MASQEFRVESDTFGELKVPADKYYGAQTMRSQINFPIGGATERMPKPVVQAMGILKKAAAEVNKEFGLDSKVSEAISKAADDVISGKLYDDHFPLVIWQTGSGTQSNMNVNEVISNRAIELLGGKLGSKTPVHPNDHVNKSQSSNDTFPTAIHISVALELNNNLKPAIKTLHDALRAKSEEFKDIIKIGRTHTMDAVPLTLGQEFSGYAQQLAYAQERIDACLPRVYELALGGTAVGTGLNTRKGFAEKCAAKIAELTSLPFVTAPNKFEALAARDAMVEVHGVLNTIAVSLMKIANDIRFLGSGPRCGLGELSLPENEPGSSIMPGKVNPTQCESLTMLSAQVMGNQVAVTIGGSNGHFELNVFKPLIVSNVLRSIRLLSDGSRTFTANCVNGIQANRENIAKIMNESLMLVTALNPHIGYDKAAKIAKTAHKNGTTLKEEAINLGYLTEQQFNDWVRPEQMLGPK

SEQ ID NO: 29176 - DNA, 1404 bp, Xanthomonas campestris
  CDS (1)..(1404)
atgagcgagagtttcaggatcgaacacgacagcatgggcgagttgcaggtgcctgccgatgcgttgtggggtgcgcagacccagcgcgctgtgcagaacttcccgatttccggccagccgatgccgcgcggtttcattcgcgcgctggggttgatcaaggccgcggccgcaggcgtcaacgccgatctcgggctgctgtccaaatcggtggccaaggtggtgcaggaagccgccttgcaggtggcgcagggcgcgcacgatgcacatttcccgatcgatgtgtatcagaccggctctggtacgtcgtcgaacatgaatgccaacgaggtgattgccacgctggccacccgcgccggcaaggacgcggtgcaccccaatgaccacgtcaatctcgggcagagttccaacgacgtggtgcccaccgccattcgcgtctcggcattgctggcggtgcaggagcagctgcagccggcgctcaagcacctgcgcaagaccatcgacaagcgcgccaagggtctggacaagatcgtcaagaccggccgcacgcatctgatggatgcgatgcccctgacctttggtcaggagttcggcgcgtggtctgcgcagctcagttcagcgcaggagcgcatcgacgacagcctgaagcggctgcgccggttgccgctgggcggcactgcgattggcaccggcatcaacgccgatccgcgcttcggcggcaaggtggccaaggccttgtccacgttgagcagcgtcaagttcgaaagtgccgagaacaagttcgaaggcctggcggcgcaggatgatgcggtggaattgtcgggccagctcaatgcgctggcggtggccttgatcaagatcgccaacgacctgcgctggatgaatgccgggccgctggcagggctgggcgagatcgaattgccggcgctgcagccaggcagttcgatcatgccgggcaaggtgaatccggtgattcccgaagcgaccgtgatggtgtgcgcgcaggtcatcgggcaccacgccgcgatcacggtggccgggcagaccggcaattttcagttgaacgtggcgttgccgctgatcgccgcgaacctgctggattcgatcaacctgctcagcaacgtctcgcgcctgctcgccgataccgccattgccggattgaaggtgcgccaggagcgcgtgcgcgaggccctggaccgcaacccgatcctggtgaccgcgctcaacccgatcatcggctacgaaaaggctgccgcgatcgccaagcgcgcctacaaggagcagcgcccggtgctggatgtggccaaggaagacagcggtctgagcgaggcagagctgcgccgtttgctggatccggcggcgttgacacgcggcggcatccaggcgggtggcggtggtggcggctga

SEQ ID NO: 29177 - protein, 467 aa, Xanthomonas campestris
MSESFRIEHDSMGELQVPADALWGAQTQRAVQNFPISGQPMPRGFIRALGLIKAAAAGVNADLGLLSKSVAKVVQEAALQVAQGAHDAHFPIDVYQTGSGTSSNMNANEVIATLATRAGKDAVHPNDHVNLGQSSNDVVPTAIRVSALLAVQEQLQPALKHLRKTIDKRAKGLDKIVKTGRTHLMDAMPLTFGQEFGAWSAQLSSAQERIDDSLKRLRRLPLGGTAIGTGINADPRFGGKVAKALSTLSSVKFESAENKFEGLAAQDDAVELSGQLNALAVALIKIANDLRWMNAGPLAGLGEIELPALQPGSSIMPGKVNPVIPEATVMVCAQVIGHHAAITVAGQTGNFQLNVALPLIAANLLDSINLLSNVSRLLADTAIAGLKVRQERVREALDRNPILVTALNPIIGYEKAAAIAKRAYKEQRPVLDVAKEDSGLSEAELRRLLDPAALTRGGIQAGGGGGG

SEQ ID NO: 29178 - DNA, 1404 bp, Xanthomonas axonopodis
  CDS (1)..(1404)
atgagcgaacgtttcaggaccgaacacgacagcatgggcgaattgcaggtgcccgccgacgcgttgtggggcgcgcagacccagcgcgcggtgcagaatttcccggtgtccgggcagccgatgccgcgcggtttcattcgcgcgctgggcttgatcaaggccgcggcagccggcgtcaacgccgagcttggattgctgccgaagtcgatcggcaagaccgtgcaggccgctgcattgcaagtggccgagggcagcttcgatgcgcagtttcccatcgatgtgtaccagaccggttcgggcacctcgtccaacatgaatgccaatgaggtgattgccaccctggccacgcgtgccggcaaggatgcggtgcatcccaacgaccacgtcaatctgggccagagttccaacgatgtggtccccaccgccattcgcgtgtcggcattgctggcggtgcaggaacatctgcaaccggcgctcaagcatctgcgcaagaccatcgacaagcgcgccaaatcgcttgataagatcgtcaagaccggtcgcacgcatttgatggacgcgatgccgctcacctttggtcaggagttcggcgcgtggtcggcgcagctgagttcggcgcaggagcgtatcgacgacgcgctcaagcgcttgcgacgcttgccgctgggcggcacggcgatcgggaccggcatcaatgccgacccgcgcttcggtggcaaggtcgccaaggccttgtccaccctgagcggagccaggttcgagagcgcggaaaacaagttcgaaggactcgccgcgcaggacgatgcggtggagttgtctggccaactcaacgcgctggcggtggcactgatcaagatcgcaaacgacttgcgctggatgaatgccggcccgttggcgggcctgggcgaaatcgaactgccggcgctgcagcctggcagctcgatcatgccaggcaaggtcaatccggtgattcccgaagccaccgtgatggcgtgcgcgcaggtgatcggccaccacactgccatcaccatcgccgggcaaaccggcaacttccagttgaacgtgacgttgccgctgatcgcctacaacctgctggattcgatcaccttgctgggcaacgtttcgcgcctgttggccgacaccgccattgccggtctgaaggtgcgtcaggagcgcgtccgcgaggcgttggaccgcaaccccatcttggtgacggcactgaaccccatcatcggttacgaaaaggccgcggcgatcgccaagcgtgcctacaaggagcagcggtcggtactggatgtggccaaggaagacagcgggctcggcgaagcggaactgcggcgattgctcgacccgacggcattgacacgcggcggtatccatgccggcggcggtagcgggggctga

SEQ ID NO: 29179 - protein, 467 aa, Xanthomonas axonopodis
MSERFRTEHDSMGELQVPADALWGAQTQRAVQNFPVSGQPMPRGFIRALGLIKAAAAGVNAELGLLPKSIGKTVQAAALQVAEGSFDAQFPIDVYQTGSGTSSNMNANEVIATLATRAGKDAVHPNDHVNLGQSSNDVVPTAIRVSALLAVQEHLQPALKHLRKTIDKRAKSLDKIVKTGRTHLMDAMPLTFGQEFGAWSAQLSSAQERIDDALKRLRRLPLGGTAIGTGINADPRFGGKVAKALSTLSGARFESAENKFEGLAAQDDAVELSGQLNALAVALIKIANDLRWMNAGPLAGLGEIELPALQPGSSIMPGKVNPVIPEATVMACAQVIGHHTAITIAGQTGNFQLNVTLPLIAYNLLDSITLLGNVSRLLADTAIAGLKVRQERVREALDRNPILVTALNPIIGYEKAAAIAKRAYKEQRSVLDVAKEDSGLGEAELRRLLDPTALTRGGIHAGGGSGG

SEQ ID NO: 29180 - DNA, 1329 bp, Pyrobaculum aerophilum
  CDS (1)..(1329)
atgtattacgtcgcaaaagccagccagctttttatagagagcgggacgaaattccaacgcgatataatatgggcaatgggcgtcatgaaattcgccgcggccagggcaaacgccgaattaggcttgttgagctgggagaaggcgtatgcaattatggatgtggcgagggagattatggaggggcttcacgacgggcgtattgtcgtagacgtcttccagacgggatctggcacggggcttaacataaatgtaaacgaggtaattgcgcagagggctttggagaaattcggcatctccctccaccccaatgacgacgtaaatctcggccagtcctcaaatgacgtagtgccaactgccataaggctcgcggtgattaaggcatggagcgataaactgaggccaaagctaattaagttaattgacgcgttaggcgccaaggcggaggagtttaagactgttgtgaaggcggggcggacgcatttaagagacgccttgcccgtcaccttcggccaagagctctcaggataccgcgacgctttcgccagaaatctcaaggcccttgagtctttgggggagtttgtaaaggaggtgccaataggcggcactgcggtgggaactggcgtgaacacgcacccctccttcggggagagggttgtggagattataaacgccgagacgggcttggcgataaagaggggaaacccctttactgaaatgaagcttttgacagatatcctcctcttctccggcggcttgagggcgctggctgtggatctgttacggctctgccaagacttaaggcttatgttctccgggccttacacaggcttgggggagatcgaactgccctcgcaagaggaggtgcccggctctagcgccatgccgggcaagactaatcccgtcacgcttgaggctacaatgcaagccgttgtttacgtgctggggcttgacgaaacagtgaaatgggccgcgtcgcttggggagttcgagctggccatggggatacctgtggccggctgggccacggtaagggaggtggaggtgctggccgaggctttggggaaaattactgatctcgtgattctgaatatgaagcctaaagtggacatcatgaagagttacgccgagagatccgcggcgctaatcactttactcgcgccgataatggggtacgacaaggccagggaggtggcggggagatcaattagagatgtgttgagagaaatgggattagacgagtcagaaattgaaaaattgcttgatcccgcgaatttgactactccaggttttaaggttaggcgacggcataaaaacggctctcagagctaa

SEQ ID NO: 29181 - protein, 442 aa, Pyrobaculum aerophilum
MYYVAKASQLFIESGTKFQRDIIWAMGVMKFAAARANAELGLLSWEKAYAIMDVAREIMEGLHDGRIVVDVFQTGSGTGLNINVNEVIAQRALEKFGISLHPNDDVNLGQSSNDVVPTAIRLAVIKAWSDKLRPKLIKLIDALGAKAEEFKTVVKAGRTHLRDALPVTFGQELSGYRDAFARNLKALESLGEFVKEVPIGGTAVGTGVNTHPSFGERVVEIINAETGLAIKRGNPFTEMKLLTDILLFSGGLRALAVDLLRLCQDLRLMFSGPYTGLGEIELPSQEEVPGSSAMPGKTNPVTLEATMQAVVYVLGLDETVKWAASLGEFELAMGIPVAGWATVREVEVLAEALGKITDLVILNMKPKVDIMKSYAERSAALITLLAPIMGYDKAREVAGRSIRDVLREMGLDESEIEKLLDPANLTTPGFKVRRRHKNGSQS

SEQ ID NO: 29182 - DNA, 1320 bp, Sulfolobus tokodaii
  CDS (1)..(1320)
atgatgaaatacactgagactgcaccaaaactttttatgaacacaggaactagatttcctagaaaaataatctgggctatgggacttataaaatacgcggcagcgaaagttaattctgatcttaaccagttagaaaaagaaatagctaaaggtattatgcaagcagcaaaagaagttatggaaggaaaacatgatgataaaatagttttagatgtatttcaaacaggctctggtactggactaaatatgaatattaatgaagtgatagcagaaagggcaactgaaatgattggaaaaaaagttcacccaaatgatcacgtaaatttagggcaatcatctaacgatactgttcctactgcaataagaatagcagcaacttcagcagttgaagaacaacttataccagcacttagtaaatttgtttctattcttaatagaaaaagtgaagaatttaaggatattgtgaaatctggaaggactcatttaagggacgcgttaccagttaccttaggtcaagagctttcagcatatgcagacgctttctaccacgatatgaccaatttacaacaagtactagaatatgttaaggagcttcctattggtggcactgcagtaggtactggattaaactcacatccagaatttcaactgagagttattcaagaggttaataatgaaactggattaggcttcaaaccagctaataagtttagaggattaaggcttttaacggacttacttagtctaagcggtattatgagaacaattgcggtagatctttacagacttggacaagatattagattaatgttttctggaccaatgactggtttcaatgaaatagatctacctactcaagaagaaatagctggaagtagtattatgccgggtaaaacaaacccagttactgtggaggcaacattattagtctcagctcaagtagtaggattagatcatgccaatcaatttgcatcaatgttaggcgagtttgagttagccatgggcgttcctttgattggatataatgtggttactcaaataaacttacttacagaggcattaaataaatttggagatttggtaattaatggtatggttcctaatatagaaagaatgaaaagatatgctgaaagcagtccttcattagttaccgtaatatcacctattattggttatgataaggctagcgaaatagggaagagattaagcaaaggaatgtctataagagaagcattaaaagagttaggctttaaggatgatgaaatagatagaatactagatttatcaaaattagttaagccaggttttcctgcaaaatga

SEQ ID NO: 29183 - protein, 439 aa, Sulfolobus tokodaii
MMKYTETAPKLFMNTGTRFPRKIIWAMGLIKYAAAKVNSDLNQLEKEIAKGIMQAAKEVMEGKHDDKIVLDVFQTGSGTGLNMNINEVIAERATEMIGKKVHPNDHVNLGQSSNDTVPTAIRIAATSAVEEQLIPALSKFVSILNRKSEEFKDIVKSGRTHLRDALPVTLGQELSAYADAFYHDMTNLQQVLEYVKELPIGGTAVGTGLNSHPEFQLRVIQEVNNETGLGFKPANKFRGLRLLTDLLSLSGIMRTIAVDLYRLGQDIRLMFSGPMTGFNEIDLPTQEEIAGSSIMPGKTNPVTVEATLLVSAQVVGLDHANQFASMLGEFELAMGVPLIGYNVVTQINLLTEALNKFGDLVINGMVPNIERMKRYAESSPSLVTVISPIIGYDKASEIGKRLSKGMSIREALKELGFKDDEIDRILDLSKLVKPGFPAK

SEQ ID NO: 29184 - DNA, 1374 bp, Thermoplasma volcanium
  CDS (1)..(1374)
atgagaactgaaagggatgtaattggagaaatacagcttgaagatactgtattttacggtataaatactgctagggccaaggaaaatttcaggataaccggcctgacctccgattctgaccacatcgtttctattgcacagataaaaaaagcagcagccatggctaatgcggaagctggtgcactggacaaggaaaaagctgaatttatagagaaagcgtgtgatgagatcataagtggaagataccacgaccaatttgttatagatgtttaccaggccggtgctggaacatctttcaacatgaacgcaaatgaggtaattgcaaacgttgcacttacattaatgggcaagaacaaaggagattactcagtaatacaccccaacgaccacgtcaacatgagccaatcaacaaatgacgtttatcctacaatgatgcggctaacggtgacgaaaaaagtgaagaaacttaaggaggccatttccgacttaatagaaagcctggaaaagaaatccaaggaacttaggggtataccaaaaccaggcaggacgcaccttcaggatgcagcacctgtaacggttggattggaattttctgcctacgcatatgcaataaaaaaggatagagatgaaattactgatgcccttgattatataatggaattaaacataggggggacggcagtcggcacgggcataaatacatcaaaaaattatcaggagaacgttgtaaagcatatagctgagataacgagggaaaatttcaggaagagcagcaatctgatgggaattatgcagtttatgactgatttttcgagagtgatgaatgctgttacgaacctagcactagatattgaaaagatagctaatgacataaggcttctctactcaggtcctgggacaggtatacatgaaataataatacccgcggtgcagcaaggttcgtccataatgcctggaaaaataaatccgtccatagcagaggcaatgaacatgatatgccattcggttataggtgcgcaacaggcagtaaacatgagcgtacaggccgggcaactggaactaaatgtaatgatgcctaatatagattacgagctaacgagatcaatcgacataatgagaaacggcctaataatgttcaaagaaaaactcatcgacgggatcaaggccaacgtaaacacatgcagagaacatctcgcaaatagctttggatccgctgcactcttgaatccataccttggctatgataatgttgcaaagatagtcagagaagccgtcgaaactggtaaatcaataaaatcattagtgttagcaactggtaaaatcacagaagagcagtatatgaaaattatggaaagtggagtcccaaaggattga

SEQ ID NO: 29185 - protein, 457 aa, Thermoplasma volcanium
MRTERDVIGEIQLEDTVFYGINTARAKENFRITGLTSDSDHIVSIAQIKKAAAMANAEAGALDKEKAEFIEKACDEIISGRYHDQFVIDVYQAGAGTSFNMNANEVIANVALTLMGKNKGDYSVIHPNDHVNMSQSTNDVYPTMMRLTVTKKVKKLKEAISDLIESLEKKSKELRGIPKPGRTHLQDAAPVTVGLEFSAYAYAIKKDRDEITDALDYIMELNIGGTAVGTGINTSKNYQENVVKHIAEITRENFRKSSNLMGIMQFMTDFSRVMNAVTNLALDIEKIANDIRLLYSGPGTGIHEIIIPAVQQGSSIMPGKINPSIAEAMNMICHSVIGAQQAVNMSVQAGQLELNVMMPNIDYELTRSIDIMRNGLIMFKEKLIDGIKANVNTCREHLANSFGSAALLNPYLGYDNVAKIVREAVETGKSIKSLVLATGKITEEQYMKIMESGVPKD

SEQ ID NO: 29186 - DNA, 1374 bp, Thermoplasma acidophilum; identical to SEQ ID NO: 11134
  CDS (1)..(1374)

SEQ ID NO: 29187 - protein, 457 aa, Thermoplasma acidophilum; identical to SEQ ID NO: 11135

SEQ ID NO: 29188 - DNA, 2112 bp, Helicobacter pylori
  CDS (658)..(2049)
tctaaatctttagccaaacccaaactaaaaagcagtaacaaggctgttaaaaggcgtattaaaacgccccccttataaaacacgcttataaaagatagcatgcacttataaatccaagcttgttttagcgcgataaactttgccttctttggatttaatatccaccctcacctgccatgtcccgttcatagaaagattggttttagcttcataaaggccgtttttttcactcacttgtgccatttctttcatcgctggcatgccgggcatttcaggcatcataaactgcaccctaacgatagctttttctaaagccttaccttttaaagtggggctgagtatgaaagtgttatcgcctttaatggggttacccacggatttgattttcacttccaagtcattggcttttagggtttgctcccatgcgtttaaactcataacccccaacacgctcattaaaaataaagcggctaactttttcatcgttttgacctttacattaagataacaagaaaattcttgttgcgaacggataataaccctcttttgtgtaaaaattgtggaaatggtttttaaaaaaatgggggttttaagtagaaggtataagagtttatgctatttttttaaggttttaaaatcaaatttcaaaggattagtatgcaatttagaatcgaacatgacacgatgggcgaaatcaaagtagatgatagccaatactggggggctcaaacgcaacgcagtcttgaaaactttaaaatcggcactgaaaaaatgcctaaagaactcattggcgcgtttgccaaactcaaaaggagtctggcggttgtcaatcaccagttagggaaattaagcttggaaaaatcgcaagccattatcaaggcgtgcgattgcattttaaaaggcgagctgtgcggcgagttccccttagcgatatggcaaacagggagcgggactcaaacgaacatgaatctcaatgaagtcattgccaataaggctaccgaaattttagggggtaattttagggagaaaaaactcatccaccctaacgatgatgtgaacatgtctcaaagctccaacgacactttccctaccgctatgcacattgtgagcgtgctagaaatcacgcataaactactgcccagtttagagaatttgttaaagacctttaaagacaaaagccaacaatttaaagagattgtcaaaatcgggcgcacgcatttacaagacgctacgcctttaactttggggcaagaatttagcgggtatgcgagcatgttagagcattctaaacaacaaattttagagagtttggagcatttaagggaattagccataggcgggacggccgtaggcacagggctaaacgctcacaaagaattgagccaaaaagtggctgaagaattgagcgagtttagcggcgtgaaattcatctctgcgcccaataaattccatgcgctcactagccatgacgctatcgcttatgcgcatggggcttttaaggctttagcggcgaatttaatgaaaatcgctaacgatattagatggcttgcgagcgggccgcgctgtggtttgggcgagcttaatatccctgaaaacgagccgggtagttctatcatgcccggtaaagtcaatcccacgcaatgcgaagcgatgaccatggtggccgtgcaagtgatggggaatgataccgctattggcattgcggccagtcagggtaattttgaattgaatgtgttcaagccggtgattatttataatttcttgcaaagtttgaggctactaagcgatagcatggaaagttttaatacccattgcgcgatcggcattgagcctaataaagaaaagattgattattacttgcaccattctttgatgctagtaaccgccctaaacccgcatgtaggctatgaaaacgccgctaaaatcgctaaaaacgcccacaaaaaaggcatttctttaaaagaaagcgcgctggaactgaagctcttgagcactgaagattttgacaaattcgtggtgcctgaaaagatgatcgggcctaaggcttgaaaaccttgggtgggcgtgcgagatgaatcctgaaaaagccactcatagcaaagagattcgtaa

SEQ ID NO: 29189 - protein, 463 aa, Helicobacter pylori
MQFRIEHDTMGEIKVDDSQYWGAQTQRSLENFKIGTEKMPKELIGAFAKLKRSLAVVNHQLGKLSLEKSQAIIKACDCILKGELCGEFPLAIWQTGSGTQTNMNLNEVIANKATEILGGNFREKKLIHPNDDVNMSQSSNDTFPTAMHIVSVLEITHKLLPSLENLLKTFKDKSQQFKEIVKIGRTHLQDATPLTLGQEFSGYASMLEHSKQQILESLEHLRELAIGGTAVGTGLNAHKELSQKVAEELSEFSGVKFISAPNKFHALTSHDAIAYAHGAFKALAANLMKIANDIRWLASGPRCGLGELNIPENEPGSSIMPGKVNPTQCEAMTMVAVQVMGNDTAIGIAASQGNFELNVFKPVIIYNFLQSLRLLSDSMESFNTHCAIGIEPNKEKIDYYLHHSLMLVTALNPHVGYENAAKIAKNAHKKGISLKESALELKLLSTEDFDKFVVPEKMIGPKA

SEQ ID NO: 29190 - DNA, 1616 bp, Drosophila melanogaster
  CDS (1)..(1413)
atgagctccaccaagaaggttgagacccgccaagagagcgacaccctgggacccatggaggtgcccatggatcgctattacggcgcccagacgatgcgctgcctcataaactttcgcattggcggcgaggaggagcgaatgccgcgccagataatccaggccatgggcatactgaagaaggcggcagccgaaacaaaccaagaattcggattggatcccaagttgagcacggccatctcgaatgcggccgacgatgtgatctccggaaagctttacgatgagggtcacttcccgctgcccatttggcagacgggttcgggcacccagagcaacatgaacagcaacgaggttatcgggaatcgtgccatcgagctgctgggcggacgtattggtaccaaggacccagtgcatcccaacgaccatgtgaacaagtcgcagagctccaacgacacctttccgtcggccattcacattgcggtggccactgcgctgaccaaggatctccgaccggcggtcaccgctctgcgggattcactgcaggccaagtcgaatgaatggaaggatatcattaagattggacgcactcacacccaggatgcagtgccgctaacgctgggccaggagttcagtggctatgcccaacagctgaccaacgggctgcagaggatcgatgcggtcctgccgcgagtttatcagctcgcactgggtggaaccgctgtgggaactggattgaatacccgccggggattcgccgagaagtgtgtcaagcggatcgcccagctcagtggattgcccttcgtggtggcgcccaattttttcgaggccctcgcctgtcgagatgccatggtggaggtgcatggagcgctcaatgtcctggctgttagcctgatgaaggtcaccaatgatatacgtttcctgggatcgggaccacgttgcggtctgggcgagctgtttctgccggagaatgagccgggcagttctattatgcccggcaaggtgaatcccacgcagtgcgaggccatgaccatgatctgcgcccaggtgatgggcaaccacgtggccgtctccgtcggcggtgccaatggacactttgagctcaacgttttcaagccactgatcgcatccaatgtgctccgctccatcaagctgctggctgatgggtgcatcagcttcaactgcaactgcgtcaagggcattaagcccaacaaggagaagctggcaaagatcgtgaatgagtcgctaatgctggtgacagccctcaatccgcacattggctatgacaagtccgcccagattgccaaggcggcccacaagaatggaactactctaaaggtggaggcattgaacgccggcatatcggagaaggatttcaacgagtgggtgcgtcccgagaagatgctgggtccttcttaggttttcctcccttgttccatgtgttacacattcataaattccatattgcaaaattttatcgttggaaatacaatcgagtgaagaaggatgtaaacagttttggtaacacaaggttgtgatgaaattcttgtggatatttttgttccaattaaatttcaaataaaaatagcaatcgccttaaaaatgtaagacgctactaaaaa

SEQ ID NO: 29191 - protein, 470 aa, Drosophila melanogaster
MSSTKKVETRQESDTLGPMEVPMDRYYGAQTMRCLINFRIGGEEERMPRQIIQAMGILKKAAAETNQEFGLDPKLSTAISNAADDVISGKLYDEGHFPLPIWQTGSGTQSNMNSNEVIGNRAIELLGGRIGTKDPVHPNDHVNKSQSSNDTFPSAIHIAVATALTKDLRPAVTALRDSLQAKSNEWKDIIKIGRTHTQDAVPLTLGQEFSGYAQQLTNGLQRIDAVLPRVYQLALGGTAVGTGLNTRRGFAEKCVKRIAQLSGLPFVVAPNFFEALACRDAMVEVHGALNVLAVSLMKVTNDIRFLGSGPRCGLGELFLPENEPGSSIMPGKVNPTQCEAMTMICAQVMGNHVAVSVGGANGHFELNVFKPLIASNVLRSIKLLADGCISFNCNCVKGIKPNKEKLAKIVNESLMLVTALNPHIGYDKSAQIAKAAHKNGTTLKVEALNAGISEKDFNEWVRPEKMLGPS

SEQ ID NO: 29192 - DNA, 1572 bp, Drosophila melanogaster
  CDS (1)..(1572)
atgctgaagcaaaacaatggtctgcatctggctaggcgcaatctctgggtggtttgcagtggcctccgtgccaaggattgcgacagtggcggtaagggcggcaagggcaaggagaatggcaagtttcgtacggagaaggacaccttcggggagctaaaggtgccggcggacaagctgtacggcgcacagacgatgcgctccaaattgaattttcccattggcgacataggcgaacgtatgccgatgccggtgatccaggccatgggcatactgaagaaggcatgtgccgaggtcaacaaggattacggactagatggcaaggtgtcggatgccgtatcctgcgcctgcgacgatgtcatttccggcaagctatacaaacagggtcacttcccattggtcatctggcaaaccggttcgggcacccagaccaatatgaacaccaacgaggtgatcagcaatgcggccattaagatgatgggcggcgaactgggcagcaagaagccggtgcatcccaacgatcatgtgaacaagtcgcagagctccaacgacaccttccccacggccattcacatttcggtgggcatggagctgaacgagcggcttgttccggcggttacacacttgagggatgccctcaagtccaagtcggatgagttcaaggacatcatcaagatcggacgcacccacttgatggacgcagttccgctgactttgggccaggaattcagcggttatacacagcagttgaccaacggtctggaaaggatcaagggctgtctgccgcgcgtctatgagctggctctgggcggcactgctgtgggtacgggtctgaacacacgcaagggattcgccgagaaggtggccaagcgcatttcggagctaacctgcttgcccttcgtgtcggcgcccaacaagttcgaggcactggctgcccgcgatgccatggtggaggtgcatggtgtgctcaacacgatcgccgtcagcctgatgaagatcgccaacgatatccgattgctgggatcgggtccgcgttgcggtctgggcgaactaatgctgccggagaacgagcccggtagctccatcatgcccggcaaggtgaatcccacgcaatgcgaatcaatgaccatgctgtgtgcccaggtgatgggcaatcaggtggcggtgaccatcggcggctccaacgggcacttcgagctaaatgtattcaaacccctggtcgtgtccaatgtgctgcgctccattcgcttgttgggtgagtcggaaatgtgttttccaagtggaaaaacatgcatacataaccttctcctcccagctgatggcagcatgaccttcagcaagaactgcgtggagggactgcaggccaacaaggagaggatcgacaagatcatgaacgagtccttgatgctggtgaccgcgctgaatccgcacattggctatgacaaggccgccctgatcgccaagacggcgcacaagaataagacgaccttgaaggaggaggcactgaagaccggaattaccgaagagcagttcaaggagtgggtcaatcccaaggagatgctgggaccgaagtga

SEQ ID NO: 29193 - protein, 523 aa, Drosophila melanogaster
MLKQNNGLHLARRNLWVVCSGLRAKDCDSGGKGGKGKENGKFRTEKDTFGELKVPADKLYGAQTMRSKLNFPIGDIGERMPMPVIQAMGILKKACAEVNKDYGLDGKVSDAVSCACDDVISGKLYKQGHFPLVIWQTGSGTQTNMNTNEVISNAAIKMMGGELGSKKPVHPNDHVNKSQSSNDTFPTAIHISVGMELNERLVPAVTHLRDALKSKSDEFKDIIKIGRTHLMDAVPLTLGQEFSGYTQQLTNGLERIKGCLPRVYELALGGTAVGTGLNTRKGFAEKVAKRISELTCLPFVSAPNKFEALAARDAMVEVHGVLNTIAVSLMKIANDIRLLGSGPRCGLGELMLPENEPGSSIMPGKVNPTQCESMTMLCAQVMGNQVAVTIGGSNGHFELNVFKPLVVSNVLRSIRLLGESEMCFPSGKTCIHNLLLPADGSMTFSKNCVEGLQANKERIDKIMNESLMLVTALNPHIGYDKAALIAKTAHKNKTTLKEEALKTGITEEQFKEWVNPKEMLGPK

SEQ ID NO: 29194 - DNA, 1392 bp, Agrobacterium tumefaciens
  CDS (1)..(1392)
atgacagccacacggacagaaaccgatacatttggccctattgaagttcaggccgatcgctactggggcgcgcaggcgcagcgctcgctcggcaacttcaagatcggctgggaaaagcagcccgcctctgtcgttcgtgcgctcggcatcgtcaagcaggccgctgcccgcgccaacatggcgcttgcaggtctcgaccccaaggtgggagatgccatcatcgccgccgcgcaggaagtcatcgacggcaagctgaccgagcatttcccgctcgtcgtctggcagaccggctccggcacccagtccaacatgaatgccaacgaggtgatttccaaccgcgcgatcgaaatgctcggcggcgaaatgggcaccaagaagcctgttcacccgaatgaccacgtcaatatgagccagtcctcgaacgacacctacccgacggcgatgcacatcgcctgcgtggaagagatcgttcaccacctgttgccggccctcaagcacctgcacacggcgctggaagccaaggtcaagcagttcgaaaagatcatcaagatcggccgtacccacacgcaggacgcgaccccgctgacgctcggccaggaattctccggttacgccgctcaggtcgcctcggcgatcgccaatatcgaactcacactgcccgcactgtcgaagctcgcccagggcggtacggcggttggcacgggcctcaatgcccctgttggttttgccgaaaaggtcgccgaggaaatctctgagattaccggcctttccttcgtcaccgcgccgaacaagttcgaagcgcttgcctcgcatgattccatggtcttctcgcacggcgcgatcaacgccgctgccgctgcactcttcaagatcgccaacgacatccgcttcctcggttccggcccgcgcgccggtctcggcgaattgtcgctgccggaaaacgagcccggctcgtcgatcatgccgggcaaggtcaacccgacgcagtcggaggcactgacgcaggtttgcgcccatatcttcggcaacaatgcagcgctttccttcgcaggctcgcagggccacttcgaactcaacgtctataatccgatgatggcctacaactttctgcagtcggtccagcttctgggcgatgcggccgtgtccttcaccgacaactgcgtcgtcggcatcgaggcgcgcgaagacaatatccggaagggcgtcgagaactcgctgatgctcgtcacggcgctcaacggcaagctcggctacgacatctgcgccaagatcgccaagaccgcccacaagaacggcacgacgctgcgcgaagaagccgttggtggtggatacctcaccaacgaggaattcgaccagtatgtgcgccccgaaaacatgatcggcccgaagtaa

SEQ ID NO: 29195 - protein, 463 aa, Agrobacterium tumefaciens
MTATRTETDTFGPIEVQADRYWGAQAQRSLGNFKIGWEKQPASVVRALGIVKQAAARANMALAGLDPKVGDAIIAAAQEVIDGKLTEHFPLVVWQTGSGTQSNMNANEVISNRAIEMLGGEMGTKKPVHPNDHVNMSQSSNDTYPTAMHIACVEEIVHHLLPALKHLHTALEAKVKQFEKIIKIGRTHTQDATPLTLGQEFSGYAAQVASAIANIELTLPALSKLAQGGTAVGTGLNAPVGFAEKVAEEISEITGLSFVTAPNKFEALASHDSMVFSHGAINAAAAALFKIANDIRFLGSGPRAGLGELSLPENEPGSSIMPGKVNPTQSEALTQVCAHIFGNNAALSFAGSQGHFELNVYNPMMAYNFLQSVQLLGDAAVSFTDNCVVGIEAREDNIRKGVENSLMLVTALNGKLGYDICAKIAKTAHKNGTTLREEAVGGGYLTNEEFDQYVRPENMIGPK

SEQ ID NO: 29196 - DNA, 1389 bp, Bacillus anthracis
  CDS (1)..(1389)
atggagtacagaattgaaagagatacattaggagaaataaaagttccagctgataaattatgggcagcacaaacacaacgtagtaaagaaaacttcccgattggaacagagcaaatgccgcttgaaattgtaaaagcatttgcaattttaaagaagagtgcagcgcttagcaatcaaaaattaggaaagctatcagaagaaaaagcagaagcaattgtggtagctgctgacgaaatcattgcagggaaatggaatgaacattttccgcttgtcgtgtggcaaacaggtagtggtacacaatcaaacatgaatgtgaatgaagtaattgcaaatcgtgggaatcaaattttgaaagaaaagggatctgacgtacatattcatccgaatgatgatgtgaacatgtcccaaagttcaaatgatacatttccaacagcgcttcatgtagcatgtgtactcgcagtagaaaatcacgtattaccagctattacgaaattaaaagaaacgttagcagaaaaagtaactgcatttgaacatattataaaaattggtcgtacacatttacaagatgcgacaccgttaacattaggacaagaaattagtggatggcaccgtatgcttgaaaaaacagagcgtatgattgcagagagcaatacatatatgaaagagcttgcgattggtggtacagcagttggaacaggtattaacgctcatcctaaatttggtgagatggtatcagaggaaattagccaatttacaggtaaacaatttatttctgcaccaaataagttccatgcattaacgagccatgatgaagttgtatatactcacggtgcattaaaagcattagctgcggatttaatgaaaatcgctaacgatgtacgttggctggcaagtggtccacgtagtggtttaggagaaattattattccggcgaatgagccaggaagctctattatgccaggtaaagtaaatccaacgcaaagtgaagcgttaacgatggttgtagcgcaagtgatgggaaatgacgcaacaatcggatttgctgcgagtcaaggtaattttgagttaaacgtatttaaacctgttattgcgtataacttcttacaatccgctcacttattagcagatgcaattgtttcatttaatgataattgtgcagttggtattgaagctgatgaagaaatcattaaagagaatgtgaatcgttcattaatgcttgttacagcattaaacccgcatatcggatatgaaaatgcagcaaaaattgcgaagcatgctcataaagaagggttaactttaaaagaagcagcattgcaatctggactactaacagaagagcaatttaatgaaattgtcgatccgaaaaaaatgattgctccgaaagagtaa

SEQ ID NO: 29197 - protein, 462 aa, Bacillus anthracis
MEYRIERDTLGEIKVPADKLWAAQTQRSKENFPIGTEQMPLEIVKAFAILKKSAALSNQKLGKLSEEKAEAIVVAADEIIAGKWNEHFPLVVWQTGSGTQSNMNVNEVIANRGNQILKEKGSDVHIHPNDDVNMSQSSNDTFPTALHVACVLAVENHVLPAITKLKETLAEKVTAFEHIIKIGRTHLQDATPLTLGQEISGWHRMLEKTERMIAESNTYMKELAIGGTAVGTGINAHPKFGEMVSEEISQFTGKQFISAPNKFHALTSHDEVVYTHGALKALAADLMKIANDVRWLASGPRSGLGEIIIPANEPGSSIMPGKVNPTQSEALTMVVAQVMGNDATIGFAASQGNFELNVFKPVIAYNFLQSAHLLADAIVSFNDNCAVGIEADEEIIKENVNRSLMLVTALNPHIGYENAAKIAKHAHKEGLTLKEAALQSGLLTEEQFNEIVDPKKMIAPKE

SEQ ID NO: 29198 - DNA, 1389 bp, Bacillus subtilis
  CDS (1)..(1389)
atggaatacagaattgaacgagacaccatgggagaagtaaaagttcctgctgataaattttggggcgcccaaacacagcgaagcaaggagaactttaagatcggttctgaaaaaatgccgatgcgtgttgtgaaggcgtttgcaattttaaaacgaagcactgctctagctaataaacgcctcggcaatctggacgctgaaaaagcagaagcgattgcagcggtttgtgatgatgtgctcaaaggcaagtacgatgacaacttcccgcttgtcgtatggcagaccggaagcggcacacaaagcaatatgaacatgaacgaagtggtagccaaccgtgcgactgctttattaaaagagaagaactctgatcaaacgattcatccaaatgatgacgtgaaccgaagccaaagctcaaacgacacattcccgactgcgatgcatgttgccgctgttttggctgtttacgagcagcttgtgccggcgcttgatcagcttcgcaatacactggatgaaaaagcaaaagcatacaatgatattgtcaaaatcggacgcacgcatcttcaggatgctacgccactgaccctcggacaggaaatcagcggatgggttcacatgctggaccgttcgaaggaaatgattttggaagcgacagataaaatgcgtgcgcttgcaattggtggaacggctgtcggaacgggtatcaacgcccacccagagtttggagagcttgtctcagaagagatcactaagctgaccggccaaacgttcagcagctcgccgaataaattccacgcgctgacaagccatgacgaaatcacttatgcgcatggcgcattaaaagcgcttgcggctgacttaatgaaaatcgcgaacgatgtcagatggctcgcaagcggaccccgctgcggcatcggggagatcgtcattcctgaaaatgagccgggaagctctattatgcctggtaaagtcaatccgacacaaagcgaagcgttaacaatgatcgcagcgcaaatcatggggaacgatgcgacaatcggctttgcggcgagtcaggggaactttgaactgaacgtgtttaagcctgttattatttacaacttcctgcaatctgtgcagctgctcagtgacggcatgaattcattccatgataaatgtgctgtcggtattgagcctaataaagaaaccattcaggaaaacctgtcaaattcattaatgcttgttacggcgctgaacccgcatatcggttatgaaaacgcggcgaaaatcgccaagcttgcccataaagagggattgacgctcaaagaagcagctttgaagcttgaattgctgacagaggagcaatttaacgaaatggttaagccggaagacatggtaaaaccaaaggcgtaa

SEQ ID NO: 29199 - protein, 462 aa, Bacillus subtilis
MEYRIERDTMGEVKVPADKFWGAQTQRSKENFKIGSEKMPMRVVKAFAILKRSTALANKRLGNLDAEKAEAIAAVCDDVLKGKYDDNFPLVVWQTGSGTQSNMNMNEVVANRATALLKEKNSDQTIHPNDDVNRSQSSNDTFPTAMHVAAVLAVYEQLVPALDQLRNTLDEKAKAYNDIVKIGRTHLQDATPLTLGQEISGWVHMLDRSKEMILEATDKMRALAIGGTAVGTGINAHPEFGELVSEEITKLTGQTFSSSPNKFHALTSHDEITYAHGALKALAADLMKIANDVRWLASGPRCGIGEIVIPENEPGSSIMPGKVNPTQSEALTMIAAQIMGNDATIGFAASQGNFELNVFKPVIIYNFLQSVQLLSDGMNSFHDKCAVGIEPNKETIQENLSNSLMLVTALNPHIGYENAAKIAKLAHKEGLTLKEAALKLELLTEEQFNEMVKPEDMVKPKA

SEQ ID NO: 29200 - DNA, 1392 bp, Bordetella pertussis
  CDS (1)..(1392)
atgaaaacccgcaccgaaaaagacactttcggcccgatcgaggtgcccgagcagcacctgtggggcgcgcagacccagcgctcgctgcatttcttcgcgatctcgaccgagaagatgccggtgccgctggtcgccgccatggcacgcctgaagcgcgccgccgccaaggtcaacgccgagctgggcgagctggatccgcaggtcgcagacgccatcatgcgggccgccgatgaggtgatcgccggcaagtggcccgacgagtttccgctgtcggtctggcagaccggctcgggcacgcagagcaacatgaacatgaacgaggtgctggccaaccgcgcctccgagctgctgggcggcgagcgcggcgaaggccgcaaggtgcaccccaacgaccacgtgaaccggggccagtcgtccaacgatacctttccgaccgccatgcacgtggccgccgcggtcgaggtcgagcaccgcgtgctgcccgccctgaaggcgttgcgcggcacgctggccgccaagagcgcggcgttctacgacatcgtcaagatcggtcgcacccatttgcaggacgccaccccgttgacgctgggccaggagatctccggctacgtggcgcagctggacctggccgagcagcagatccgcgcgacgctggccggcctgcaccagctggccatcggcggcacggcggtgggcaccggcctgaacgcgcatccgcagttcagcgccaaggtatcggccgaactggcccatgacacgggcagcgcgttcgtgtcggcgcccaacaagttccaggcgctggcttcgcacgaggcgctgctgttcgcgcacggcgccttgaagacgctggccgccggcctgatgaagatcgccaacgatgtgcgctggctggccagcggcccgcgctcggggctgggcgaaatcagcattcccgagaacgagccgggcagctccatcatgccgggcaaggtcaacccgacccagtgcgaagccgtcacgatgctggccgcgcaggtcatgggcaacgacgtggccatcaatgtcggcggggccagcggcaacttcgagctgaacgtcttcaagccgctggtgatccacaatttcctgcagtcggtgcgcctgctggccgacggcatggtcagcttcgacaagcactgcgcggccggcatcgagcccaaccgcgagcgcatcaccgagctggtcgagcgttcgctgatgctggtgactgcgctcaacccgcacatcggctacgacaaggccgcgcagatcgccaagaaggcgcacaaggaaaacctgtcgctgaaagaggcggcgctggcgctggggcacctgaccgaggcgcagttcgccgagtgggtggtgccgggcgacatgaccaacgcgcgccgctag

SEQ ID NO: 29201 - protein, 463 aa, Bordetella pertussis
MKTRTEKDTFGPIEVPEQHLWGAQTQRSLHFFAISTEKMPVPLVAAMARLKRAAAKVNAELGELDPQVADAIMRAADEVIAGKWPDEFPLSVWQTGSGTQSNMNMNEVLANRASELLGGERGEGRKVHPNDHVNRGQSSNDTFPTAMHVAAAVEVEHRVLPALKALRGTLAAKSAAFYDIVKIGRTHLQDATPLTLGQEISGYVAQLDLAEQQIRATLAGLHQLAIGGTAVGTGLNAHPQFSAKVSAELAHDTGSAFVSAPNKFQALASHEALLFAHGALKTLAAGLMKIANDVRWLASGPRSGLGEISIPENEPGSSIMPGKVNPTQCEAVTMLAAQVMGNDVAINVGGASGNFELNVFKPLVIHNFLQSVRLLADGMVSFDKHCAAGIEPNRERITELVERSLMLVTALNPHIGYDKAAQIAKKAHKENLSLKEAALALGHLTEAQFAEWVVPGDMTNARR

SEQ ID NO: 29202 - DNA, 1392 bp, Brucella melitensis
  CDS (1)..(1392)
atggccgccacgcgtaccgaaacagacactttcggaccgatcgatgttcccgcagaccgttattggggcgcacagacacagcgttccctgcaaaatttcaggatcggcggcgagcgcatgcccctgcccctggttcacgcgctgggcgtggtaaagcgcgcggcggcggaaaccaatatcgcgctcggcaagcttgatcccgtcctgggtcaggtgattgcggttgccgcttccgaagtcattgagggcaagctcgacgaccatttcccgctcgtagtctggcagacaggctccggcacgcaatcgaacatgaatgccaatgaagtgatctcgaaccgggctatcgagttgctcggcggggaaatgggctccaaaaagccgatccacccgaacgaccatgtcaatatgagccagtcttccaatgacagtttcccgacggcgatccacatcgccacggcggtcgaaaccgtcaaccggctctatcccgcgctcgaacacctcaccaaagccctgaaggtcaaggaagaagcattcaaggacatcatcaagattggccgcacccacacgcaggacgcaacacctgtgacgctggggcaggaattttcgggctaccgcgcggcacttgaatatgcccgccatcggctcgaacaatcgcttgccgacgtcttcctgctggcgcagggcggcacggctgtcggcaccggtctcaacgcacctgtcggtttcgacaagggctttgccgaagcggtgagcgagattaccgggctttccttcaagaccgcgccaaacaagttcgaggcgctggcaagccacggcgccgttctcaacttccacggcagcctgaatgcgcttgcagccgatctcttcaagatcgccaacgatatccggtttctcggttccggcccgcgttccggccttggcgagctttctctgccggaaaacgaacccggctcctccatcatgccgggcaaggtcaaccccacacaggccgaagccatgaccatggtggcaacccaggttttcggcaaccagaccgccgtaaccgtcgccgccagccaggggcatttcgagctgaacgtcttcaaaccggtcattgcctataatgtgctgcaatcgatccggcttttgagcgacaccatggtttcctttgccgatcattgcgtcgaggggattgaacccaatacggcccgcatcaaggaattgctggaacgctcgctcatgctcgtcacggcgcttgcgcctgccatcggctatgacaatgcggccaggatcgccaaaaccgcccataagaacggcaccacgcttcgcgaggaagcattggcaagcggcctcgtatcggaagaagattatgaccggctggtgcgcgccgagcggatgatcgccccacaatga

SEQ ID NO: 29203 - protein, 463 aa, Brucella melitensis
MAATRTETDTFGPIDVPADRYWGAQTQRSLQNFRIGGERMPLPLVHALGVVKRAAAETNIALGKLDPVLGQVIAVAASEVIEGKLDDHFPLVVWQTGSGTQSNMNANEVISNRAIELLGGEMGSKKPIHPNDHVNMSQSSNDSFPTAIHIATAVETVNRLYPALEHLTKALKVKEEAFKDIIKIGRTHTQDATPVTLGQEFSGYRAALEYARHRLEQSLADVFLLAQGGTAVGTGLNAPVGFDKGFAEAVSEITGLSFKTAPNKFEALASHGAVLNFHGSLNALAADLFKIANDIRFLGSGPRSGLGELSLPENEPGSSIMPGKVNPTQAEAMTMVATQVFGNQTAVTVAASQGHFELNVFKPVIAYNVLQSIRLLSDTMVSFADHCVEGIEPNTARIKELLERSLMLVTALAPAIGYDNAARIAKTAHKNGTTLREEALASGLVSEEDYDRLVRAERMIAPQ

SEQ ID NO: 29204 - DNA, 1347 bp, Candidatus Blochmannia floridanus
  CDS (1)..(1347)
atgatatgtaatagattatggggagatcaaacagaatcttctttaaaattttttaatatttctacagaaaaaatgccttgggaattaattaaagcattagctcaaataaaacgagtatcagctcaagtaaattatgatttaaaattacttgattatgaacgttctcaagctattattgcagcagtagatgaaatattatctggcaatcataaaaatgaatttccattatcagtgtggcaaactggatctggtactcaaagcaatatgaatatgaatgaagttttggcaaatagggcaaatgaattattaagaaaaaatcagataaatatagtcgtacatccaaacgatcatgtcaataaaagtcaaagttcaaatgatgtttttcctagtgcaatgcacattgcagcagtagttaatttaaaaacaaaactaatacctgtaattaaattattacaaaaaacttttttaaaaaaatctattgaatttcgtaatattataaaaattggacgtactcatttgcaggatgctattccattgactttagggcaagaaatttccggatgggattttatgttaaaaaataatacaaatcatattcaatcaactattcttgatttaagtgcattggcattaggaggaacggcagtagggacaggatttagcgctcatgtagaatatgcagaacgtgttgtattaggcttgtctaaactaattcatcactctttttttagcgctcctaataaatttgaatctttatctacgtgtgatgctatagtttatagtcatgggactttgaagggattagctatatccatgatgaagattgcaaacgatatacgtttgttatcatctggtcctcagtgtggtctgggagagttgattattcctgctaatgaacctggaagttctattatgcctggtaaagttaatcctacgcaatgtgagtctatgactatgtcatgttgccaagttatgggtaatgatttaagcattagtttgggaggttcatctggacagttacaattaaatacatataggcctttaattatttacaattttttacaatcaatacgattacttacagatagtataaaaaattttcatgattattgtattgtgggtatcagaccaaaattcaaaagaattgaaaaattgttaaacaaatctttaatgttagtaacagcattaagttctcatataggatatgataaatcagcacaaattgctcaaacagcttatttaaatggaattactttaaaagctgcatcgatacaatcgggttacgtaactgaaaaacagtttgatgattgggtttgtccagaaaatatgatttatcctgatatgtag

SEQ ID NO: 29205 - protein, 448 aa, Candidatus Blochmannia floridanus
MICNRLWGDQTESSLKFFNISTEKMPWELIKALAQIKRVSAQVNYDLKLLDYERSQAIIAAVDEILSGNHKNEFPLSVWQTGSGTQSNMNMNEVLANRANELLRKNQINIVVHPNDHVNKSQSSNDVFPSAMHIAAVVNLKTKLIPVIKLLQKTFLKKSIEFRNIIKIGRTHLQDAIPLTLGQEISGWDFMLKNNTNHIQSTILDLSALALGGTAVGTGFSAHVEYAERVVLGLSKLIHHSFFSAPNKFESLSTCDAIVYSHGTLKGLAISMMKIANDIRLLSSGPQCGLGELIIPANEPGSSIMPGKVNPTQCESMTMSCCQVMGNDLSISLGGSSGQLQLNTYRPLIIYNFLQSIRLLTDSIKNFHDYCIVGIRPKFKRIEKLLNKSLMLVTALSSHIGYDKSAQIAQTAYLNGITLKAASIQSGYVTEKQFDDWVCPENMIYPDM

SEQ ID NO: 29206 - DNA, 1386 bp, Chromobacterium violaceum
  CDS (1)..(1386)
atgacgaaaaccgtacgcagcgaaaccgacaccttcggtccgatcgacgtccccgccgctgcgctgtggggggcgcagacccagcgctcgctggcgcatttccgcatttccagcgagaagatgccgccggagctgatcctggcgctggctcgggtcaagcgcgcctgcgccgaggccaaccgcgggctgggcaagctggacgacgccaaggccgccgccatcgccggcgcggccgacgaggtgctggcgggccgacacgacggcgagtttccgctgtcggtgtggcagaccggctccggcacccagagcaatatgaatatgaacgaggtgctggccaaccgcgcgtcggagctgctgggcggccggcgcgggccgggccggctggtccatcccaacgacgacgtcaatctcggccagtcgtccaacgacatcttccccaccgcgatgcacgtcgccgccgccacgcaggtcaaggaacggctgctgccgtcgctggatctgctgcgccacgcgctcgaatccaaagccgaagccttcgccgacgtcgtcaagataggccgcacccatctgcaggacgccacgccgctgacgctgggccaggagatctccggctgggcggcgcaactggcgctgtccgaacaggcggtgcgcgcggcgctgcccatgctgtgccagctggcggtcggcggcaccgcggtgggcaccggcctcaacaccgatccaagcttcggcgccgcggtggcggcgcgcctggccgagcaaagcggcctgccattcgaaagcgccggcaacaaattcgccgcgctggccggccacgagccgctcgtgttcgcccacggcgcgctgaaaacgctggccgccgcgctgatgaagatcgccaacgacatccgctggctggcttccggcccgcgcagcggcctgggcgagctgtcgctgccggagaacgagccgggcagctccatcatgccgggcaaggtcaaccccacccagtgcgaagcgatgaccatgctgtgctgccaggtgctgggcaacgacgcggcgctggccatcggcgccgcgtccggcaatttcgaactgaacgtgttcaagccgctgatcgcgcacaacttcctgcaaagcgcgcggctgctggcagacggcatggacagcctgcgcgagcactgcgtggacggcatggaagccaaccgcgcgcgcatcgccgaactgatggcgcgctcgctgatgctggtcaccgcgctgaacccgcacatcggctacgacaaggcggccgccatcgccaaacacgcccatcgccacggcaccacgctgcgcgaggcggcgctggcgctgggccacctgagcgccgagcagttcgacgcctgggtgcggccggaagacatggtgtga

SEQ ID NO: 29207 - protein, 461 aa, Chromobacterium violaceum
MTKTVRSETDTFGPIDVPAAALWGAQTQRSLAHFRISSEKMPPELILALARVKRACAEANRGLGKLDDAKAAAIAGAADEVLAGRHDGEFPLSVWQTGSGTQSNMNMNEVLANRASELLGGRRGPGRLVHPNDDVNLGQSSNDIFPTAMHVAAATQVKERLLPSLDLLRHALESKAEAFADVVKIGRTHLQDATPLTLGQEISGWAAQLALSEQAVRAALPMLCQLAVGGTAVGTGLNTDPSFGAAVAARLAEQSGLPFESAGNKFAALAGHEPLVFAHGALKTLAAALMKIANDIRWLASGPRSGLGELSLPENEPGSSIMPGKVNPTQCEAMTMLCCQVLGNDAALAIGAASGNFELNVFKPLIAHNFLQSARLLADGMDSLREHCVDGMEANRARIAELMARSLMLVTALNPHIGYDKAAAIAKHAHRHGTTLREAALALGHLSAEQFDAWVRPEDMV

SEQ ID NO: 29208 - DNA, 1422 bp, Corynebacterium efficiens
  CDS (1)..(1422)
atgagtgatttcatgaccgagcaggaattccgtattgaacacgacaccatgggtgaagtgaaggtccccgcacaggctctgtggcgtgcacagacccagcgtgccgtggagaacttccccatctctggccgtggtctggaatccgcacagatccgcgcgatgggcctgctgaaggcagcctgcgcgcaggtgaacaaggactccggtgccctggatgccgccaaggccgacgccatcatcgccgccggcaaggagatcgccaccggcaagcatgatgccgagttcccgatcgacgtcttccagaccggttccggcacctcctccaacatgaacaccaacgaggtcatcgcctccatcgcgaaggccaacggcaccgaggtccaccctaacgacgatgtcaacatgggccagtcctccaatgacaccttccccaccgcgacccacgtcgccgccaccgaggcagccgtcaatgacctgatcccgggcctgaaggtgctgcacgagtccctggccaagaaggccaacgagtgggattccgtggtcaagtccggccgcacccacctcatggacgccgtcccggtcaccctgggccaggagttcggcggctacgcacgccagatccagctcggcatcgagcgcatcgaggccaccctgccacgtctgggtgagctggccatcggtggtaccgccgtcggcaccggcatcaacacctccgccgacttcggtggcaaggttgtcgccgagctcgtcgagctcaccggcgtcacccagctgcaggaggcagccaaccacttcgaggcacaggccaaccgcgacgccctcgtcgagttctccggcgcgatgcgcgttgtcgccgtctccctctacaagatcgccaacgacatccgcctcatgggctccggcccgctgaccggcctcggcgagatccagctgcccgacctgcagccgggttcctccatcatgccgggcaaggtcaaccccgtcctgtgcgagaccgccacccaggtctccgcccaggtcatcggcaacgacgccgctgtcgccttcgccggcagccagggccagttcgagctcaacgtgttcatccccgtgatggcccgcaacgtccttgagtccgcccgcctgctggccaacaccgcgcgcgtgttcgccacccgcctggttgacggcattgttcccaacgaggagcacatgaagcagctggccgagtcctccccgtccattgtcactccgctgaactccgcaatcggctacgaagccgccgcgaaggtcgccaaggctgcgctggcagagggcaagaccatccgccagaccgtcatcgacatgggctttgtcgacggtgagaagctgaccgaggaggagctggacaagcgtctggacgttctcgcgatggccaacaccgaccgcaagcagaagttctaa

SEQ ID NO: 29209 - protein, 473 aa, Corynebacterium efficiens
MSDFMTEQEFRIEHDTMGEVKVPAQALWRAQTQRAVENFPISGRGLESAQIRAMGLLKAACAQVNKDSGALDAAKADAIIAAGKEIATGKHDAEFPIDVFQTGSGTSSNMNTNEVIASIAKANGTEVHPNDDVNMGQSSNDTFPTATHVAATEAAVNDLIPGLKVLHESLAKKANEWDSVVKSGRTHLMDAVPVTLGQEFGGYARQIQLGIERIEATLPRLGELAIGGTAVGTGINTSADFGGKVVAELVELTGVTQLQEAANHFEAQANRDALVEFSGAMRVVAVSLYKIANDIRLMGSGPLTGLGEIQLPDLQPGSSIMPGKVNPVLCETATQVSAQVIGNDAAVAFAGSQGQFELNVFIPVMARNVLESARLLANTARVFATRLVDGIVPNEEHMKQLAESSPSIVTPLNSAIGYEAAAKVAKAALAEGKTIRQTVIDMGFVDGEKLTEEELDKRLDVLAMANTDRKQKF

SEQ ID NO: 29210 - DNA, 1529 bp, Corynebacterium glutamicum
  CDS (37)..(1458)
aagcttgtgacagccgtatttaattctcagtaagaaatgagtgatttcatgaccgagcaggaattccgtattgagcacgacaccatgggtgaagtgaaggttccagcaaaggctctgtggcaggcacagacccagcgcgctgttgagaacttccctatctctggtcgtggtctggaatccgcacagatccgcgcaatgggtctgctgaaggcagcttgtgcgcaggtaaacaaggactccggtgcgctggatgcagagaaggcagatgccatcattgcagctggtaaggagatcgcgtccggtaagcatgacgctgagttcccaattgatgtgttccagactggttccggtacttcctccaacatgaacaccaatgaggttatcgcttccatcgcgaaggctaacggcgttgaggttcacccaaatgaccacgtcaacatgggtcagtcctccaatgacaccttccctactgcaactcacgttgctgcaaccgaagctgctgtcaatgacctcatcccaggcctgaaggttctgcacgagtctttggcgaagaaggctaacgagtggtctgaggttgttaagtccggccgcacccacctgatggacgctgttccagtaaccctgggccaggagttcggtggctacgctcgccagatccagctcggcatcgagcgcgttgaggctactcttcctcgccttggtgagctggctattggtggcaccgctgctggtaccggtatcaacacctccgctgatttcggtggcaaggttgttgctgaactgatcaacctgaccgacgtcaaggagctcaaggaagctgagaaccacttcgaggctcaggctgcacgcgacgctcttgttgagttctccggcgcaatgcgcgttatcgctgtctccttgtacaagatcgctaacgatatccgcctcatgggctccggcccactgaccggtcttggcgagatccgtctcccagacctgcagccaggttcctccatcatgccaggcaaggtcaacccagttctctgtgagaccgctacccaggtttccgctcaggttatcggcaatgacgcagctgttgcgttctccggcacccagggccagttcgagctcaatgtgttcatcccagtgatggctcgcaacgtgcttgagtccgctcgcctgctggctaacacttcccgcgtgttcgcgacccgtctcgttgatggcattgagccaaacgaggcacacatgaaggagctcgctgagtcttcaccttccatcgttaccccactgaactctgcaatcggctacgaagctgctgcaaaggtggctaagactgctttggctgagggcaagaccatccgccagactgtcatcgatttgggcttggttgatggcgagaagctcaccgaggaagagctggacaagcgcctcgacgttcttgctatggctcacaccgagcgcgagaacaagttctaaaactagaacccgataaataaggaccttcacttcttaagaagtgaaggtccctttttcgctacatatctaga

SEQ ID NO: 29211 - protein, 473 aa, Corynebacterium glutamicum
MSDFMTEQEFRIEHDTMGEVKVPAKALWQAQTQRAVENFPISGRGLESAQIRAMGLLKAACAQVNKDSGALDAEKADAIIAAGKEIASGKHDAEFPIDVFQTGSGTSSNMNTNEVIASIAKANGVEVHPNDHVNMGQSSNDTFPTATHVAATEAAVNDLIPGLKVLHESLAKKANEWSEVVKSGRTHLMDAVPVTLGQEFGGYARQIQLGIERVEATLPRLGELAIGGTAAGTGINTSADFGGKVVAELINLTDVKELKEAENHFEAQAARDALVEFSGAMRVIAVSLYKIANDIRLMGSGPLTGLGEIRLPDLQPGSSIMPGKVNPVLCETATQVSAQVIGNDAAVAFSGTQGQFELNVFIPVMARNVLESARLLANTSRVFATRLVDGIEPNEAHMKELAESSPSIVTPLNSAIGYEAAAKVAKTALAEGKTIRQTVIDLGLVDGEKLTEEELDKRLDVLAMAHTERENKF

SEQ ID NO: 29212 - DNA, 1380 bp, Coxiella burnetii
  CDS (1)..(1380)
atgcgaaaagagtccgacagcatgggtacgattgaagtgcccagtgaaaagtattatggcgcgcaatcacagcgctcattaattaattttgccattgggcgtgaaacgatgccgcctgagctcattcgcgcttttggcgttttgaaaaaagcggctgtgctcaccaatgttgaattgggcaaggtgtctcaagaaaaagctaactttattcttaaagcctgcgaagagctgatcgctggaaaactaaacgatcattttcccttgaaaatttggcaaaccggcagcggcacgcagaccaacatgaatgtgaacgaggttatcagtaatcgcgcgattgagttagctggtggaaagttaggaagcaaagaaccggttcatccgaacgatcacgttaatatgtcgcaatcttcaaatgatacttttccaacggccatgcacattactgctgccgaaatgataacgcatcagcttattcctaatctcactgtcttacgcgataccttggaaaaaaaatccaaggaattttccgaaatcattaaaatcggtcgaacgcatttgcaagacgctgtgccattaacgttgggtcaagaattttcaggttatgtcgctcaactcaaccataacttggaagccattaatgatgtacttccaacgctctatcgtcttgcgctcggcgggacggcggtaggcacggggctaaatacccacccgcaatttgccaaaaaagcggctgaccacattgccgaactgacgggaatacccttttactcggcgtctaataaatttgccgctctggctgccaacgacgaaattgttttagtcagcggcgttctcaaaacccttgcctgttcgttgatgaaaattgcaaacgatattcgttggttggcttccggcccgcgttgcggcatcggggaaattgttatcccagaaaacgagccaggttcttcgattatgccgggtaaagtaaatccaacgcaatccgaagcgatgacgatggtgtgtgttcaggtgataggaaacgatacgaccattaccatcgcgggatcgcaagggaattttgaattgaatgtttacaagcccgtgatggcttataatttaattcaatctatttatttattgtccgatgcttgtcgctcctttaatgatcattgcgccgttggcatcaaacccaatcaagaaaaaattaatgactatctgaataattctctaatgctggtcactgcattaaaccaaatcatcggttacgacaaagcctcagaaattgctaaaaaagcttacaaagaaggcacgacgcttaaagaagcggctcttcaattaggttatttaaccgcaagcgaattcgataaagccgtagaccccaaaaaaatggtcgctatttga

SEQ ID NO: 29213 - protein, 459 aa, Coxiella burnetii
MRKESDSMGTIEVPSEKYYGAQSQRSLINFAIGRETMPPELIRAFGVLKKAAVLTNVELGKVSQEKANFILKACEELIAGKLNDHFPLKIWQTGSGTQTNMNVNEVISNRAIELAGGKLGSKEPVHPNDHVNMSQSSNDTFPTAMHITAAEMITHQLIPNLTVLRDTLEKKSKEFSEIIKIGRTHLQDAVPLTLGQEFSGYVAQLNHNLEAINDVLPTLYRLALGGTAVGTGLNTHPQFAKKAADHIAELTGIPFYSASNKFAALAANDEIVLVSGVLKTLACSLMKIANDIRWLASGPRCGIGEIVIPENEPGSSIMPGKVNPTQSEAMTMVCVQVIGNDTTITIAGSQGNFELNVYKPVMAYNLIQSIYLLSDACRSFNDHCAVGIKPNQEKINDYLNNSLMLVTALNQIIGYDKASEIAKKAYKEGTTLKEAALQLGYLTASEFDKAVDPKKMVAI

SEQ ID NO: 29214 - DNA, 1395 bp, Haemophilus ducreyi
  CDS (1)..(1395)
atggaataccgtatcgaaaaagatactatgggcgaagtgaaagtaccggctgatcgttattgggcagcacaaacagaacgttcgcgtaataatttcaggattgggcctgaagcttctatgccggtcgaaattattgaagcatttgcttatttaaaaaaagccgctgcatttgctaatgctgaactaggtgcactcaccactgaaaaacgtgacttaatcgcgatggtttgtgatgaaatcttagcaaataaattagcggacgaatttccgttagtgatttggcaaacaggttctggtacacaatcaaatatgaatcttaatgaagtgattgccaaccgtgcccacgtattacaagggggggcattaggtgaaaaatcgattattcatccaaatgatgatgtcaataaatcgcaatcttcaaacgatacctatccaacggctatgcatattgctgcctataaaaaagtcgttgaagtaaccattccagcaatagaacgcttacaaaaaacatttgccataaaatctgaagcatttaaagatgtggttaaaattggtcgaactcatttaatggatgccaccccgcttacattaggccaagaattctctgcctatgcggcacaattacaatttggtttgttagcccttaaaaataccttgccccatttggcgcagttagcattaggtggcacagctgttggcacaggcttaaatacgcctaaaggttatgatgttaaagtagcagaatatatcgcacaatttactcaacttccttttattactgcggaaaataaatttgaagcattagccactcacgatgcaattattgaaacacacggtgcgctcaaacaaattgctatgtcattattcaaaattgccaatgatattcgtttattagcatcaggtcctcgctctggtattggcgaaattctaattcctgaaaatgaacccggctcctcaattatgcccggtaaagtcaatcctactcaatgtgaggcaatgactatggttgcagcgcaagtgttgggaaatgatactacgatttcatttgcgggtagccaaggccattttcagttaaatgttttcaaacctgttatggcagcaaatttcttacaatcggcacaattacttgctgatgtatgtatttcatttgatgagcattgtgcaagcggtattgaacctaattatccaagaattcaacaacaattagaaaactctttaatgttagtgaccgctttaaatacccatattggttatgaaaatgcggctaaaattgctaaaactgcgcacaaaaatggaacaacactcaaagaagaagcaattaacttaggtctagtcactgctgaacagtttgatcaatgggtacgccctcaaaatatggtcggtagtttaaaataa

SEQ ID NO: 29215 - protein, 464 aa, Haemophilus ducreyi
MEYRIEKDTMGEVKVPADRYWAAQTERSRNNFRIGPEASMPVEIIEAFAYLKKAAAFANAELGALTTEKRDLIAMVCDEILANKLADEFPLVIWQTGSGTQSNMNLNEVIANRAHVLQGGALGEKSIIHPNDDVNKSQSSNDTYPTAMHIAAYKKVVEVTIPAIERLQKTFAIKSEAFKDVVKIGRTHLMDATPLTLGQEFSAYAAQLQFGLLALKNTLPHLAQLALGGTAVGTGLNTPKGYDVKVAEYIAQFTQLPFITAENKFEALATHDAIIETHGALKQIAMSLFKIANDIRLLASGPRSGIGEILIPENEPGSSIMPGKVNPTQCEAMTMVAAQVLGNDTTISFAGSQGHFQLNVFKPVMAANFLQSAQLLADVCISFDEHCASGIEPNYPRIQQQLENSLMLVTALNTHIGYENAAKIAKTAHKNGTTLKEEAINLGLVTAEQFDQWVRPQNMVGSLK

SEQ ID NO: 29216 - DNA, 1395 bp, Haemophilus influenzae
  CDS (1)..(1395): Xaa of translated CDS can stand for any naturally occuring amino acid which can be translated from respective CDS-codon
atggcatttcgtattgaaaaagacacaatgggtgaagttcaagttctagcagataaatactgggctgcacaaactgaacgttcacgcaataactttaaaattggcccagccgcatcaatgccacatgaaattatcgaagcttttggctatttgaaaaaagcagccgcatttgctaatcatgatttgggtgtattacctcttgaaaaacgtgatttaattgctctggcttgtgacgaaattttagcaaataaattagatgatcaattcccacttgttatttggcaaactggttctggtacacaatctaatatgaatgtgaacgaagtagttgccaatcgtgctcatgtgttaaacggtggaaaattaggtgaaaaatctattattcacccaaatgatgatgtgaacaaatcacaatcttcaaatgatactttcccaacggcaatgcacattgcggcatataaaaaagtagttgagcacaccattccttgtgttgaacgtttacaaaaaacttttgcggcaaaatctgaagccttcaaaaacgtggtaaaaattggccgcactcacttaatggatgcaacgccactcacattaggtcaagaattttcggcttatgcagctcaattagatttcggcttaaaagcattaaaaaataccctcccacatttaagccaattagcattgggtggaactgcggttggcacaggtttgaacacgccgaaaggctatgatttgaaagtggtagattacattgcaaaattcaccgcacttccgtttgtcacagcagataataaatttgaagcattagccgctcatgatgcgattgttgaaactcacggtgcattacgtcaattagcaatgagtttatttaaaattgcgaacgatattcgtctattagcatctggccctcgttcgggaattggcgaaattttaattcctgaaaatgaaccaggttcttcaattatgccaggtaaagtaaacccaactcaatgcgaassgatgacaatggtctgtgcacaagtatttggtaacgacaccaccatcgcatttgtgggttcacaaggtcacttccaattaaatgtgttcaaccctgtgatgattgcaaacttcttacaatctgctcaattattgggcgatgcttgcgtatctttcgatgaacactgtgcagtgggtattgagccaaactatccacgcattaaacaacaacttgaaaattcattgatgttggtgaccgcacttaatacgcatatcggttatgaaaatgcagctaaaattgcaaaaaccgcacataaaaatggcaccacattacgtgaagaagcgattaatttaggtttagtgtctgccgaagattttgataaatgggttcgcccagaagatatggtgggtagcttaaaataa

SEQ ID NO: 29217 - protein, 464 aa, Haemophilus influenzae
  misc_feature (332)..(332): Xaa can be any naturally occuring amino acid
MAFRIEKDTMGEVQVLADKYWAAQTERSRNNFKIGPAASMPHEIIEAFGYLKKAAAFANHDLGVLPLEKRDLIALACDEILANKLDDQFPLVIWQTGSGTQSNMNVNEVVANRAHVLNGGKLGEKSIIHPNDDVNKSQSSNDTFPTAMHIAAYKKVVEHTIPCVERLQKTFAAKSEAFKNVVKIGRTHLMDATPLTLGQEFSAYAAQLDFGLKALKNTLPHLSQLALGGTAVGTGLNTPKGYDLKVVDYIAKFTALPFVTADNKFEALAAHDAIVETHGALRQLAMSLFKIANDIRLLASGPRSGIGEILIPENEPGSSIMPGKVNPTQCEXMTMVCAQVFGNDTTIAFVGSQGHFQLNVFNPVMIANFLQSAQLLGDACVSFDEHCAVGIEPNYPRIKQQLENSLMLVTALNTHIGYENAAKIAKTAHKNGTTLREEAINLGLVSAEDFDKWVRPEDMVGSLK

SEQ ID NO: 29218 - DNA, 1395 bp, Leptospira interrogans
  CDS (1)..(1395)
atgaaaaccagaatcgaaacggattcgatgggcgaaattgcagtagacgattccaaatattggggcgcacaaacagaacgttccttacatcattttcatatcggaaacgatcgatttccaagagaaatgattcgtgctttaggaattttaaagaaatctgcagcggttgttaatgcggaacttggtcttttaagcgaagataaaaagaaactgattgttcaagccgccgacgaagtgatttccggaaaattggatgagcattttccgctttcggtttggcagaccggctccggaactcagactaacatgaattctaatgaagtgatttcgaaccgtgcgatcgaaattgcaggtggggtgaagggctctaaaaaaccgattcatccaaatgacgatgttaacaaggctcaatcctcaaacgatacgtttcctacagccatgcatatcgctgcggcggaacagttaaaccaaaagttgattcctgctctgatacaactcaaagaaacgttcaagaaaaaaacagatgaatttcagaatattataaaaatcggtagaactcatcttcaagacgcgactcctctgactttaggccaagaattttctggctatgttcaacaattggaatacaatattgcaagggtaaaggcagttttaccttccgtttatagacttgcgttaggcggaacagctgtcggaaccggattaaatactcaccctcagtttgcggtaaaagcagcggctcaaatcgctaaagaaactggacttccttttgtaagcgcggaaaataagttcgaggcactcgcggctcacgattctcttgtagaaacgagcggtgtgttgaaaacgatcgctgcttctttaatgaaaattgcaaacgatatacgttggctttcttctggtcctcgttgtggaattggtgaaattagtattccggaaaatgaaccaggttcttctatcatgccgggtaaagtgaatccaacacaatcagagcagatgacgatggtcgcggctcaagtaattgcaaatgacgttgcagtaaatataggcggtgcttctggaaatttcgagttgaacgtttttaaacctttgattatccacaacgttttgaattcgattcgattactttctgattcttgtgtttcttttgaagaacattgtgctcgtggaattattccgaataaggaaaagttaaacgaacacttaaataattctttgatgcttgtgaccgctttgaatcctcatataggttatgataacgctgctaaaattgccaagaacgcgcataaaaaaggaacaactctgaaagagtccggaattgaattgggacttttaacaagtgaacaatttgatcagtgggttcttcccgaaaagatgatccatccttcggtggattaa

SEQ ID NO: 29219 - protein, 464 aa, Leptospira interrogans
MKTRIETDSMGEIAVDDSKYWGAQTERSLHHFHIGNDRFPREMIRALGILKKSAAVVNAELGLLSEDKKKLIVQAADEVISGKLDEHFPLSVWQTGSGTQTNMNSNEVISNRAIEIAGGVKGSKKPIHPNDDVNKAQSSNDTFPTAMHIAAAEQLNQKLIPALIQLKETFKKKTDEFQNIIKIGRTHLQDATPLTLGQEFSGYVQQLEYNIARVKAVLPSVYRLALGGTAVGTGLNTHPQFAVKAAAQIAKETGLPFVSAENKFEALAAHDSLVETSGVLKTIAASLMKIANDIRWLSSGPRCGIGEISIPENEPGSSIMPGKVNPTQSEQMTMVAAQVIANDVAVNIGGASGNFELNVFKPLIIHNVLNSIRLLSDSCVSFEEHCARGIIPNKEKLNEHLNNSLMLVTALNPHIGYDNAAKIAKNAHKKGTTLKESGIELGLLTSEQFDQWVLPEKMIHPSVD

SEQ ID NO: 29220 - DNA, 1455 bp, Methanosarcina acetivorans
  CDS (1)..(1455)
atgccttcaatcctcgacctgcctatcggtactggagcgactggcaaacgaaaagaaagcgattctttgggggaggttgaggttccagccgaccattactggggggctcagacccagaggtctctgattcacttttccatcggcgacgactacatgccaaaggaggtctatcatgcttatgggtacgtgaaaaaggcagctgctctggtcaacgaagccgccggaataataccgccgtggaaagctgaattgatagcaagggttgcagatgaagttatcgccggtaaactcgacagcgaattcccgctctatgtctggcagactggctcaggcactcagtcgaacatgaacgtgaatgaagtcatcagcaatcgcgccatccagctcgtgggcggaagcctcggcagtaagcaccctgtccatcctaatgacgatgttaatatgagtcagtcgtccaacgacacctttccaacggccatgcacattgcaactgtgctcgaattcagcaaccgcctcattcccgcagttaccgttcttgaagagtccatatgggccaaagcacgggaatgggtggatatcgtcaagataggccgaacacatcttcaggacgcaaccccacttacagtgggccaggagtggtctggctacgccacacagctcgatgacgcgttggcgtttgtcaagcattctctccggggattatatcggttggccatcggaggcactgcggtcgggaccggcatcaataccccaccagacttcggtgaaaaggttgcagatgagattgccaggctcacaggtcatccatttgtcacagctccaaataaattcgcagctcagggctcccttgatgcaatggtaacctcaagcgcggcactgcgtacattagcagtcgcactgatgaagattgcaaatgacctgcaatggcttggttcgggaccgaggtcgggtctccacgagcttatcctcccaagtgacgagccgggaagctcaatcatgcctgggaaagtcaatccgactcaggaggaagccatgttaatggtttgcatccaggtgattggggaagataatgccgtcgcatttgccgggtcacagggaaacttcgagcttaacgcaatgtgcccgataatcataaataatgtcttacattctgcgcgcactctcggcgatgcttgcgtaaagttccgtgagtacggaatcaatggaatcatgctcgacaggagtcgtatcgacaaatttgtgggcacctccctcatgttagtgacagcgcttagccctgtcataggctacgacaaggcttccgcaattgtccagcgagcactggacgagaatacgacactgagggaagctgcagtgaaaggaggtttcatcagcgcggaggattttgacaggattgtggatccgaagaagatggttggggatccgcgacacgacctgaagctggcttcagagtag

SEQ ID NO: 29221 - protein, 484 aa, Methanosarcina acetivorans
MPSILDLPIGTGATGKRKESDSLGEVEVPADHYWGAQTQRSLIHFSIGDDYMPKEVYHAYGYVKKAAALVNEAAGIIPPWKAELIARVADEVIAGKLDSEFPLYVWQTGSGTQSNMNVNEVISNRAIQLVGGSLGSKHPVHPNDDVNMSQSSNDTFPTAMHIATVLEFSNRLIPAVTVLEESIWAKAREWVDIVKIGRTHLQDATPLTVGQEWSGYATQLDDALAFVKHSLRGLYRLAIGGTAVGTGINTPPDFGEKVADEIARLTGHPFVTAPNKFAAQGSLDAMVTSSAALRTLAVALMKIANDLQWLGSGPRSGLHELILPSDEPGSSIMPGKVNPTQEEAMLMVCIQVIGEDNAVAFAGSQGNFELNAMCPIIINNVLHSARTLGDACVKFREYGINGIMLDRSRIDKFVGTSLMLVTALSPVIGYDKASAIVQRALDENTTLREAAVKGGFISAEDFDRIVDPKKMVGDPRHDLKLASE

SEQ ID NO: 29222 - DNA, 1419 bp, Methylobacterium extorquens
  CDS (1)..(1419)
atgtcgccgcacgagaacccttccgtcgagacgcgtaccgagtccgacaccttcggcccgatcgaagtgcccgcccaccgctactggggcgcccagacgcagcgctcgatccagaacttcaagatcggcaccgagcgccagccggcgccgctcgtccatgcgctcggcatcgtcaagcaggccgccgcgctggtgaacaaggatctcggcggcctcgatccgaagatcgccgacgcgatcgccgaatccgctgccgaagtggtcgccggaaagcacgacgacgagttcccgctggtggtgtggcagacgggctcgggcacgcagtccaacatgaacgccaacgaggtgatcgcgagcctcgcaaacgagcggctcgggggcaagcgcggcggcaagtcgccggtccaccccaacgatcattgcaaccgcggccagtcctcgaacgacaccttccccaccgccatgcacatcgcggtcgcccgcgaggttcaggagcggctgctgccggcgctctcccacctgcacaccgcgctcgatgccaaggcgaaggagttcgagagcatcgtcaagatcggccgcacgcacttgcaggatgcgacgccggtctcgctcggccaggaattctccggttacgccgcgcaggtcgcgctcggtggcgcgcgcatcgccgccacgctccccggcgtgctggcgctggcgcagggcggcaccgccgtcggcaccggcctcaatgcgcatccggaattcgcggagcggtttgcggccaaggtcgcggagctgaccgggctgccctttacctcggccgagaacaagttcgaggcgctggccacccacgacgccctcgtcttccttcagggcgcgctgacggctttggcatcgggcctcttcaagatcgccaacgacatccgcctgctcggctccggcccgcgctcgggcctcggcgaattgtcgctgccggagaacgagcccggctcgtcgatcatgccgggcaaggtcaacccgacccagtgcgaggcgctgacgatggtctgcgcgcaggtggtcggcaacggcaccacggtgagctttgccggctcacagggtcatttcgagctcaacgtgttcaagccggtgatcgccaacgcggtgctgcaatcggtgcggattctggccgacgcctcagtcagcttcaccgacaattgcgtcgtcggcatcaaggccaacaccgaccggatcagcgacctgatgagccgctcgctcatgctggtgaccgcgctcgcgccctcgatcggctacgacaaggccgccgagatcgccaagaccgcgcacaagaacggcaccaccctgaaggaagaggcgctgcggctcggctacgtcacggacgaggagttcgagcgggtcgtacgccccgaaaccatgctggcgccgagcgcggaataa

SEQ ID NO: 29223 - protein, 472 aa, Methylobacterium extorquens
MSPHENPSVETRTESDTFGPIEVPAHRYWGAQTQRSIQNFKIGTERQPAPLVHALGIVKQAAALVNKDLGGLDPKIADAIAESAAEVVAGKHDDEFPLVVWQTGSGTQSNMNANEVIASLANERLGGKRGGKSPVHPNDHCNRGQSSNDTFPTAMHIAVAREVQERLLPALSHLHTALDAKAKEFESIVKIGRTHLQDATPVSLGQEFSGYAAQVALGGARIAATLPGVLALAQGGTAVGTGLNAHPEFAERFAAKVAELTGLPFTSAENKFEALATHDALVFLQGALTALASGLFKIANDIRLLGSGPRSGLGELSLPENEPGSSIMPGKVNPTQCEALTMVCAQVVGNGTTVSFAGSQGHFELNVFKPVIANAVLQSVRILADASVSFTDNCVVGIKANTDRISDLMSRSLMLVTALAPSIGYDKAAEIAKTAHKNGTTLKEEALRLGYVTDEEFERVVRPETMLAPSAE

SEQ ID NO: 29224 - DNA, 1401 bp, Myxococcus xanthus
  CDS (1)..(1401)
atgagcacgaagaacgtccgtaccgagaaagacaccttcggtcccatcgacgtccccgccgaccggctgtggggcgcgcagacgcagcgcagcctccagaacttcgccatctccaccgagcgcatgccgctggccctcatccgcgccctggtgctggtgaagaaggccgccgcgcgggtgaacgtggagaacggctcgctggcgaaggagaagggcgaggccatcatccgggccgcggacgaggtgctggccggccagcacgacgcggagttccccttgagcgtctggcagacgggcagcgggacgcagacgaacatgaacacgaacgaggtgctcgccaaccgcgcctcggagctgctgggcggcgagcgcggcgagcgccgcaaggtccaccccaacgacgacgtcaacaaggggcagagctccaacgacgtcttccccaccgcgatgagcgtggccgccgtggccgccatcaccgagcacgtgctgccggagctgaaggcgctgcgcgacgtgctcgcgcagaaggcccgcgccttccatgacgtggtgaaggtgggccgcacccacctgcaggacgccacgcccctgacgctggggcaggaggtcggcggcttcgtggcgcagttggaccacgcgaagggccacctggagcgcaccctgccgcatcttctggagctggccctgggcggcacggcggtgggcaccggcctcaacgcccccaagggctatgccgagcgggtggcgcaggagctggcccagctcaccggccaccccttcgtcaccgcgcccaacaagttcgaggcgctggccgccaacgacgcgctggtgcaggcgcacggggcgctgaaggggctggcggcggtgctcttcaaggtggccaacgacgtgcgctggctgtcctcggggccgcgctcggggctggcggaaatcaccatcccggagaacgagccgggcagctccatcatgccgggcaaggtgaaccccacccagagcgaggcgctcaccatgctgtgcgcccaggtgatggggaacgacgtcgccgtcaccgtgggtggggcgtccggcaacttccagctcaacgtcttcaagccgctcatcgcccacaacctgctccagagctgccggttgctggcggatggcatgcgcagcttccgcctgcactgcgcggtgggcatcgagcccaaccggccccgcatccaggagaacctggagcgcagcctgatgctcgtcacggcgctcaacccccacatcggctacgacaacgcggcgaaaatcgccaagacggcccacagggacggcacgacgctcaaggagacggccgtggcgctggggctcgtcacccccgagcagttcgaccagtgggtccgcccggaggacatgacgggccacaaggggtag

SEQ ID NO: 29225 - protein, 466 aa, Myxococcus xanthus
MSTKNVRTEKDTFGPIDVPADRLWGAQTQRSLQNFAISTERMPLALIRALVLVKKAAARVNVENGSLAKEKGEAIIRAADEVLAGQHDAEFPLSVWQTGSGTQTNMNTNEVLANRASELLGGERGERRKVHPNDDVNKGQSSNDVFPTAMSVAAVAAITEHVLPELKALRDVLAQKARAFHDVVKVGRTHLQDATPLTLGQEVGGFVAQLDHAKGHLERTLPHLLELALGGTAVGTGLNAPKGYAERVAQELAQLTGHPFVTAPNKFEALAANDALVQAHGALKGLAAVLFKVANDVRWLSSGPRSGLAEITIPENEPGSSIMPGKVNPTQSEALTMLCAQVMGNDVAVTVGGASGNFQLNVFKPLIAHNLLQSCRLLADGMRSFRLHCAVGIEPNRPRIQENLERSLMLVTALNPHIGYDNAAKIAKTAHRDGTTLKETAVALGLVTPEQFDQWVRPEDMTGHKG

SEQ ID NO: 29226 - DNA, 1389 bp, Nitrosomonas europaea
  CDS (1)..(1389)
atggaccagtatcgcgaagaacatgatgcaataggcacagtacaggtgcctgccagcgccctctggggtgcgcagacacaacgatcgctcaacaacttcaatatctcgggcgaacgcatgccgtcagccctgatccacgcactggcgctggtcaaacgcgccgctgccagtgtcaatcatgatctgggattactggacgagaacatcgcccgggcaatcatcaccgctgccgatgaagtgctggcaggagaacacgccggcgaatttccgttggtagtttggcaaaccggttccggcacacaaaccaatatgaacatgaacgaggtgctggccaaccgcgcttcggaaattctgggcggtacacggggcaaaggtcgcaaggtgcaccctaacgaccatgtcaacaaaggacaatcttccaatgacgtttttcccactgccatgcacattgctgccgtggaagccatccgcaaccggttgattccggcactggaagcactacgtaaaacattatcttccaaatcggcagcattttcggatatcgtcaagatcggccgcacacatttgcaggatgccaccccgcttacactggggcaggaattttcaggctatgtttcacagctcgatcatggcctggctcatctcgaatctgcgctgccgcatctgctcgaactggcgctgggggggacagccgtaggtaccggtctcaacacccatccggaatttgcacgccgtgtcgcggcagaaattgcacgcctcagcggctatccttttataacagctgccaataaatttgaggcactggccgcgcatgatgcactggtccatgcgcatggggtgctgaaaacactagcagctatactgatcaaaattgccaatgacgtccgctggctggcatccggcccgcgttgcggtattggtgaaatccttatcccggagaacgaacccggcagttcgatcatgcccggaaaagtcaatcctacccaatcggaagcagttgtcatgcttgcctgtcaggtcatgggcaatgatgttgcaatcaatctgggaggcgccatgggaaatttcgaactcaataccatgaaaccactgatcattcacaattttttacaaagtacacgtttgctcgcagatggtgcagaaagcttcaacacccattgcgcagccggtattacggccaatacagtacgaatcaagcagcatttacaggagtctctgatgctggtaaccgcgctcaatcctcacattggttacgacaaagcagcagaaatagccaaaaaagcccatcatgaaatgctgacattaaaagaagccgcaatcaggctgggttatgtcaccgcagaacaattcgatgtatgggttgacccacaaaaaatgacagaggtgtga

SEQ ID NO: 29227 - protein, 462 aa, Nitrosomonas europaea
MDQYREEHDAIGTVQVPASALWGAQTQRSLNNFNISGERMPSALIHALALVKRAAASVNHDLGLLDENIARAIITAADEVLAGEHAGEFPLVVWQTGSGTQTNMNMNEVLANRASEILGGTRGKGRKVHPNDHVNKGQSSNDVFPTAMHIAAVEAIRNRLIPALEALRKTLSSKSAAFSDIVKIGRTHLQDATPLTLGQEFSGYVSQLDHGLAHLESALPHLLELALGGTAVGTGLNTHPEFARRVAAEIARLSGYPFITAANKFEALAAHDALVHAHGVLKTLAAILIKIANDVRWLASGPRCGIGEILIPENEPGSSIMPGKVNPTQSEAVVMLACQVMGNDVAINLGGAMGNFELNTMKPLIIHNFLQSTRLLADGAESFNTHCAAGITANTVRIKQHLQESLMLVTALNPHIGYDKAAEIAKKAHHEMLTLKEAAIRLGYVTAEQFDVWVDPQKMTEV

SEQ ID NO: 29228 - DNA, 1386 bp, Oceanobacillus iheyensis
  CDS (1)..(1386)
atggattatcgtgttgaaaaagatacaattggggaaattcaagttcctgctgataaatactggggggcgcaaacacagcgtagtaagcaaaattttccaattggaaatgaaaaaatgccagtcgaaattattaaagcgtttgcaattctaaaacgaagtactgctgaagctaattttgaattaggcttaatggaacgagataaaatggaagcaattcaatatgctgctgatcaggtattaaacgattctctaacagatcatttcccactagtcgtttggcaaactggtagtggtacgcaaagtaatatgaatgtaaacgaagtattagcttttgtaggtaataaatggttacaagaacagggaagcgatttaaaattacatcccaatgatgatgtaaataaatctcaaagttcgaacgatacatatccaacggcaatgcatattgcagccgtattgaaattagaagatacggtattaccagctttgagtcagttgaaaaatacttttgcagaaaagcaaagtgcttttgaaaatatcgtgaaaattggtcgtacacatttacaggatgcgactcctctaacactaggccaggaaatcagtgggtggcatcgtatgttagagaaatctgaaacgatgatttcagagagtttagagcatcttcgtgaattagcaataggtggaacagctgtaggcacaggcttaaatgcacatccagatttttcagagaaagtttgtaaggcaattagtacattcacaaacaaaaaattcatatctgcaaaaaataaatttcattcattaacaagtcatgacgaaactgtatatgcacatggtgcactaaagggactagcagcagatttaatgaaaattgcaaatgatgttcgttggttagcaagcggtccacgctgtggcattggagaaattacgattccggcgaatgaaccaggaagttcaattatgccagggaaggtaaatccgactcaaagtgaagctgtaacaatggtagtaactcaagtaatggggaatgatgctgctattggttttgccgctagtcaggggaatttcgaattgaatgtatttaagccagtaattgcatataatttcttacaatcaagtcaattattagcagatagtataatttccttcgatgagcgctgtgcggttggaatcgaaccaaaccacgagcaaatcgaaaagaatcttaatgattctttaatgttggttaccgcattaaatccgcatataggatacgaaaatgcagcaaaaattgctaaaaaagcatttgcagataattcaactttaaaagaaacagctgtagaattaggactattaacagaagaacagtttgatgagtatgttaatccagaggaaatgacatatcctaaataa

SEQ ID NO: 29229 - protein, 461 aa, Oceanobacillus iheyensis
MDYRVEKDTIGEIQVPADKYWGAQTQRSKQNFPIGNEKMPVEIIKAFAILKRSTAEANFELGLMERDKMEAIQYAADQVLNDSLTDHFPLVVWQTGSGTQSNMNVNEVLAFVGNKWLQEQGSDLKLHPNDDVNKSQSSNDTYPTAMHIAAVLKLEDTVLPALSQLKNTFAEKQSAFENIVKIGRTHLQDATPLTLGQEISGWHRMLEKSETMISESLEHLRELAIGGTAVGTGLNAHPDFSEKVCKAISTFTNKKFISAKNKFHSLTSHDETVYAHGALKGLAADLMKIANDVRWLASGPRCGIGEITIPANEPGSSIMPGKVNPTQSEAVTMVVTQVMGNDAAIGFAASQGNFELNVFKPVIAYNFLQSSQLLADSIISFDERCAVGIEPNHEQIEKNLNDSLMLVTALNPHIGYENAAKIAKKAFADNSTLKETAVELGLLTEEQFDEYVNPEEMTYPK

SEQ ID NO: 29230 - DNA, 1395 bp, Pasteurella multocida
  CDS (1)..(1395)
atgacatttcgtatcgaaaaagacactatgggtgaagtacaagttcctgccgataaatattgggcagcacagactgaacgctcacgcaataatttcaaaattggacctgaagcctctatgccaaaagagattattgaagcctttggttatttaaaaaaagcagccgcttatgctaaccatgatttaggtgtattaccagtggaaaaacgggatttaattgcacaggcttgtgatgagatcctcgctaataaattagatgatcaatttcctctcgtcatttggcaaaccggttccggtacacaatccaatatgaaccttaacgaagtcatttcaaaccgtgcccatgttttaaatggtggtaaattaggtgaaaaatccattatccatccaaatgacgatgtgaacaaatctcaatcttcaaacgatacttacccaacagcaatgcacatcgcggcgtataaaaaagtcgttgaagtcactattccttgtgtagaacgtttacaaaaaaccttagcgcaaaaagcagacgcctttaaagatgtggtgaaaattgggcgtactcacttaatggatgcgacaccattaaccttaggtcaagaattctctgcttatgctgcccaattagattttggcttacgcgcattgaaaaacacgctgccacatttagcacaattagcgctaggcggtactgcagtgggtacaggtttaaatacaccgaaaggttatgatgtgaaagtggcagactacattgcaaaatttacaggcttgccatttatcaccgctgaaaataaatttgaagcgttagccacccatgatgccgttgtggaaacgcacggcgcattaaaacaattagcggtatccttatacaaaatcgcaaatgatatccgtttattagcctctggaccacgttctggtattggtgaaattttaattcctgaaaatgagccgggctcttctatcatgccaggtaaagttaacccaacccaatgtgaagccatgacgatggtatgcgcgcaagtactcggtaatgacaccaccatttcctttgcaggtacacaaggtcatttccaattgaacgtatttaaaccagtgatggcggctaacttcttacaatctgctcaattattggcggatgcttgtgtgtccttcgatgaacattgtgcagtcggtattgaaccaaacttccctcgcatcaaaaaacaacttgatgactcattaatgttagtgaccgccttaaatacacatatcggttacgaaaatgcggcgaaaatcgcgaaaaccgcacacaaaaatgggacaacattaaaagaagaagcaatcaacttaggcttagttacagctgaacaatttgatgaatgggtacgtccagaagatatggtcggtagcttaaagtaa

SEQ ID NO: 29231 - protein, 464 aa, Pasteurella multocida
MTFRIEKDTMGEVQVPADKYWAAQTERSRNNFKIGPEASMPKEIIEAFGYLKKAAAYANHDLGVLPVEKRDLIAQACDEILANKLDDQFPLVIWQTGSGTQSNMNLNEVISNRAHVLNGGKLGEKSIIHPNDDVNKSQSSNDTYPTAMHIAAYKKVVEVTIPCVERLQKTLAQKADAFKDVVKIGRTHLMDATPLTLGQEFSAYAAQLDFGLRALKNTLPHLAQLALGGTAVGTGLNTPKGYDVKVADYIAKFTGLPFITAENKFEALATHDAVVETHGALKQLAVSLYKIANDIRLLASGPRSGIGEILIPENEPGSSIMPGKVNPTQCEAMTMVCAQVLGNDTTISFAGTQGHFQLNVFKPVMAANFLQSAQLLADACVSFDEHCAVGIEPNFPRIKKQLDDSLMLVTALNTHIGYENAAKIAKTAHKNGTTLKEEAINLGLVTAEQFDEWVRPEDMVGSLK

SEQ ID NO: 29232 - DNA, 1395 bp, Photorhabdus luminescens
  CDS (1)..(1395)
atggcagccactcgcattgaaaaagactcaatggggcccatcgaagtacctgctgaccaattgtggggagcgcaaactcaacgttcacttgagcattttcgcatttcgcaggagaaaatgccggttgcattaattcatgctctggcattgactaaacaggctgcggccagtgtcaatatggatttgggtcttctgccgcaagaacgtggtgaagcaattattgctgctgcgaaagaggtgctggaaggtaaacatccgacagaatttcctcttgctatctggcagaccggttcaggaacacaaagtaacatgaacatgaacgaagtgttggcgaaccgtggtagcgagatccttggcggggtgagggggagtgaacgccttatccatcctaacgatgatgtcaataaaagtcagagttctaacgatgttttcccaacagcaatgcatgttgctgcggttattgcgctgagtgagcatcttattcctgagctgaaaatattacaaaaaacattggctgataaagctgaagcttataaggatatcgttaaaattggccgtacacacttgcaagatgcgacgccattgacccttggtcaggaaatttctggctgggcggcaatgttaacgcataacctgaaacacattgaagacagtattccccatgtttgtgaattggcactagggggaactgcggttggcaccggtttaaatactcatcctgaatatgctgttcgtgttgctaagaaattggctgaactgaccaaccattcgtttgttactgccccaaataaatttgaagccctggcgacttgtgatgctctggttcattctcatggggcattaaaaggtctggctgcatccataatgaaaattgcaaacgatgttcgttggttggcttccggccctcgctgtggtatcggtgaaatttcaattcctgaaaatgaaccgggtagctcaatcatgccaggtaaagttaacccaactcagtgtgaagcagtgacgatgctttgtgcacaggtgatgggcaatgatgttgctattaatattggtggggcatcaggcaactttgagctaaatgtgtttcgcccaatggtgattaataacttcctgcaatctgttcgcttgttggctgatggtatgcgtagcttcaatgaacattgtgcagtcggtatcgaacccaaccgtgatcgcattactcagttgctgaatgaatctctgatgttagtaacggcgctgaatacacatattggttatgacaaagctgcagaaattgctaagaaagcccataaagaagggctgacattaaaacaatcggcgatgaaactgggttatctgacagaagctgagtttgatgagtgggttcgtccagaagatatggttggcagcttgaagtag

SEQ ID NO: 29233 - protein, 464 aa, Photorhabdus luminescens
MAATRIEKDSMGPIEVPADQLWGAQTQRSLEHFRISQEKMPVALIHALALTKQAAASVNMDLGLLPQERGEAIIAAAKEVLEGKHPTEFPLAIWQTGSGTQSNMNMNEVLANRGSEILGGVRGSERLIHPNDDVNKSQSSNDVFPTAMHVAAVIALSEHLIPELKILQKTLADKAEAYKDIVKIGRTHLQDATPLTLGQEISGWAAMLTHNLKHIEDSIPHVCELALGGTAVGTGLNTHPEYAVRVAKKLAELTNHSFVTAPNKFEALATCDALVHSHGALKGLAASIMKIANDVRWLASGPRCGIGEISIPENEPGSSIMPGKVNPTQCEAVTMLCAQVMGNDVAINIGGASGNFELNVFRPMVINNFLQSVRLLADGMRSFNEHCAVGIEPNRDRITQLLNESLMLVTALNTHIGYDKAAEIAKKAHKEGLTLKQSAMKLGYLTEAEFDEWVRPEDMVGSLK

SEQ ID NO: 29234 - DNA, 1401 bp, Prochlorococcus marinus
  CDS (1)..(1401)
atgatggctgacctgatgcgtatcgaacacgacagcatgggcactattgaggtgcccgctggggttctctggggtgcacaaacccagcgatcgctccttaacttcgccatcagcacagaccgcatgccagtcgaactgatccatgccttggcattgatcaaacaggctgccgccagcgtgaactgtcgcctgggtgtgctcgatgaagtccagcgggatcaaattatcaaggctgcctctgctgttgcatccggtcttcacgacgatcagtttccactgagggtgtggcaaaccggtagcggtacccacacaaacatgaatgtcaacgaggtgattagcaacctggcgtctcaggcaaacgacgaacccctaggtagccataggccggtgcatccaaacgatcatgtcaatcgatcccagtccaccaatgacgccttccctacagctatacatatcgccgcagtccaggggatcaccaacaacttgctgcctgaactggagcaattgatcgcagcctttgcccgaaaaagcgatgcctggagtgacatcatcaaaatcggtcgcactcatctacaggatgccgtacctctcacccttggtcaggaggcctctgcgtggcgggatcaaattgcctcagcccatagtcgtattcagtcaagcctgatagagctctaccccctgccgcttggaggcaccgccgtgggaacaggcctcaacgccccagctcgcttcggtcaagaaacagctgcgcaacttgccagcatcacaggcctgccattcagctcagcgaaaaacaagttcgccgtgatggcgagccatgacgggttagtgaatgcaatggctcagttgcgcatgttggcggttgcccttttcaagatctccaatgatctgcgcctactggcctgtggcccaagggccggcctggcagagctgcatctacctgagaatgagccgggaagctcgatcatgcctgggaaagtcaacccctctcaatgcgaggccatggccatggtctgtttacaggtcatcgggcttgattcagccgtgaccatggcaggtgggagtggtcatctccaaatgaacgtctacaaacccctgattggcttcaacctgcttcacagcattgaattgctacatgacgcctgccgcaagtaccggctggcaatggtgcaagggattgaaccaaaccgaatcaagatccagcatgatctagagcaatcgctgatgctagtgactgctttagccccagaaatcggttacgacaaagccagtgagattgcccacctcgcccatgagaagggattcagcctgcgtgaagcagcactaaaactcggctatgtgagcaaagaagacttcgatcgcattgttaatccggcattgatgacatctgctcggctgtga

SEQ ID NO: 29235 - protein, 466 aa, Prochlorococcus marinus
MMADLMRIEHDSMGTIEVPAGVLWGAQTQRSLLNFAISTDRMPVELIHALALIKQAAASVNCRLGVLDEVQRDQIIKAASAVASGLHDDQFPLRVWQTGSGTHTNMNVNEVISNLASQANDEPLGSHRPVHPNDHVNRSQSTNDAFPTAIHIAAVQGITNNLLPELEQLIAAFARKSDAWSDIIKIGRTHLQDAVPLTLGQEASAWRDQIASAHSRIQSSLIELYPLPLGGTAVGTGLNAPARFGQETAAQLASITGLPFSSAKNKFAVMASHDGLVNAMAQLRMLAVALFKISNDLRLLACGPRAGLAELHLPENEPGSSIMPGKVNPSQCEAMAMVCLQVIGLDSAVTMAGGSGHLQMNVYKPLIGFNLLHSIELLHDACRKYRLAMVQGIEPNRIKIQHDLEQSLMLVTALAPEIGYDKASEIAHLAHEKGFSLREAALKLGYVSKEDFDRIVNPALMTSARL

SEQ ID NO: 29236 - DNA, 1386 bp, Prochlorococcus marinus subsp
  CDS (1)..(1386)
atgaccaagaactttagatttgaaaaagatagtatgggacagataaaagttccttcagaggctttgtggggagcccaaacgcagagatcaattataaatttttctattggtgaggagttaattccaattgaattaatttattcacttacggttataaaaagagcagccgcaatttctaatttcaaattgggtttaataaataatgtaaaaaaagatctcattattgaagcctgtacagaaatccttgatgggaaacatgattctcaattccccttaaaaatatggcaaacaggtagtggtacacaaacaaatatgaatatcaatgaagtcatatctaatattgctgcgttaaaaacaaattcaggacttggaagtcatcatcctattcatccaaatgatgatgttaataaatcgcagtctacaaatgatacttttcctgcggctattcagatatctgttgttactcaaataattaaaaaattagttccatcaataaaggaacttactaaggttcttgatagtaagagtaataaatggaaagatcttataaaaataggtagaactcattttcaagatgcagtgccaatttcccttggtcaagaagtttctgcatggtcaaaacaactaaaggacgctgaagatgctctgataattagtcttaatgaattatgtttcttaccactaggtggtacggcagttggtacaggtattaattgtccaaaagatttttcaaaagaatctataaaatcaatttcagaatatactggtttatttttttataagtcaaagaatcatttctctttaatggcatctcatgatcgattagcccaagtaatgggtcaaataaaaatcctagcaagtgcattatttaagatttctaatgatattaaaatattgtcctcaggacctagatctggcatttatgaattaataattcccaaaaatgaaccagggagctcaatcatgcctgggaaagttaatccaacccaatgtgaagcattatcaatggtatgcactcaagtaatgggttttgaatacgcagtatcaatagctaatgccagcggcactttacaaatgaatgaatataagccactaattggatttaatattctcacgagtataaaattactgaatcatgcgataagtaacttcagactaaaattagttgaagggatacaaccaaacccaaaaactataaaagctaatcttgaaaattcactaatgcttgtaactgcattggttcccaaaataggttatgaaaaagcagcagaaattgcgaatcttgcttttaatgaatcaatcaacttaaaagaagcaacaataaaattaggttacttaactgctaatgaatttgaggatgctataaatactaataaaatgatttaa

SEQ ID NO: 29237 - protein, 461 aa, Prochlorococcus marinus subsp
MTKNFRFEKDSMGQIKVPSEALWGAQTQRSIINFSIGEELIPIELIYSLTVIKRAAAISNFKLGLINNVKKDLIIEACTEILDGKHDSQFPLKIWQTGSGTQTNMNINEVISNIAALKTNSGLGSHHPIHPNDDVNKSQSTNDTFPAAIQISVVTQIIKKLVPSIKELTKVLDSKSNKWKDLIKIGRTHFQDAVPISLGQEVSAWSKQLKDAEDALIISLNELCFLPLGGTAVGTGINCPKDFSKESIKSISEYTGLFFYKSKNHFSLMASHDRLAQVMGQIKILASALFKISNDIKILSSGPRSGIYELIIPKNEPGSSIMPGKVNPTQCEALSMVCTQVMGFEYAVSIANASGTLQMNEYKPLIGFNILTSIKLLNHAISNFRLKLVEGIQPNPKTIKANLENSLMLVTALVPKIGYEKAAEIANLAFNESINLKEATIKLGYLTANEFEDAINTNKMI

SEQ ID NO: 29238 - DNA, 1395 bp, Pseudomonas putida
  CDS (1)..(1395)
atgagccgtatcgagacagacagcctgggcccggtcgaagttccggaggacgcctactggggtgcgcagacccagcgttcgctgatcaacttcgccattggcaaggaacgcatgcccctcgcggtattgcacgccctggcactgatcaagaaggccgcggcgcgcgtcaacgaccgcaatggcgacctgccggccgacatcgcccggttgatcgaacaggccgccgatgaagtgctggatggccagcacgacgatcagttcccgctcgtcgtctggcagacgggcagtggcacccaaagcaacatgaacgtcaacgaggtgatcgccggacgcgccaacgaactggccggcaaaggccgtggcggcaaggcgccagtacaccccaatgaccacgtcaaccgctcgcagagctccaacgactgcttccccaccgccatgcacattgccgcagcccaggcggtgcatgaaaagctgctgccggccgtcactgaactgtcttcggggctggccgagctgtcgatgcgccaccacaagctggtaaaaaccggccgcacgcacatgatggacgccacgccgattaccttcggccaggaagtgtcggctttcgtcgcccagctcgattacgcccagcgcgctatccgcgccaccctgccggcggtgtgcgaactggcccagggcggcactgccgtgggtaccgggctgaacgctccgcagggttttgccgaggccatcgcggccgagctggcggcgctgtccggcctgccgttcatcactgcacccaacaagttcgccgccctcgccggccacgaaccgctgaccagcctggcgggagccctgaagaccctggccgtggccctgatgaaaatcgccaacgacctgcgcctgctggggtccggccctcgcgccgggcttgccgaggtgcgcctgccagccaacgagccgggcagctcgatcatgccgggcaaggtcaaccccacccagtgcgaggcgctgtcgatgctggcctgccaggtactgggcaacgacgcggccatcggctttgccgccagccaggggcatttgcagttgaatgtgttcaagccggtgatcattcataacctgctgcaatccatcgagttgctggccgatggttgccgcaacttccagcagcattgcgtggcgggtatcgagccggatgccgagcagatggccgcgcacctggagcgtgggttgatgctggtgacggcgctgaacccgcatattggctatgacaaggcggcagaaattgccaagaaggcttacagcgagggcacgaccttgcgcgaggcggcattggcgttgaagtacctgaccaatgaacagttcgaccagtgggtgcggccggagaacatgctggcgcctgggggcaaaggctag

SEQ ID NO: 29239 - protein, 464 aa, Pseudomonas putida
MSRIETDSLGPVEVPEDAYWGAQTQRSLINFAIGKERMPLAVLHALALIKKAAARVNDRNGDLPADIARLIEQAADEVLDGQHDDQFPLVVWQTGSGTQSNMNVNEVIAGRANELAGKGRGGKAPVHPNDHVNRSQSSNDCFPTAMHIAAAQAVHEKLLPAVTELSSGLAELSMRHHKLVKTGRTHMMDATPITFGQEVSAFVAQLDYAQRAIRATLPAVCELAQGGTAVGTGLNAPQGFAEAIAAELAALSGLPFITAPNKFAALAGHEPLTSLAGALKTLAVALMKIANDLRLLGSGPRAGLAEVRLPANEPGSSIMPGKVNPTQCEALSMLACQVLGNDAAIGFAASQGHLQLNVFKPVIIHNLLQSIELLADGCRNFQQHCVAGIEPDAEQMAAHLERGLMLVTALNPHIGYDKAAEIAKKAYSEGTTLREAALALKYLTNEQFDQWVRPENMLAPGGKG

SEQ ID NO: 29240 - DNA, 1395 bp, Pseudomonas syringae
  CDS (1)..(1395)
atgagccgcaccgaaaccgacagcatcggcccgatcgaagtccctgaagatgcctattggggcgcgcagacccaacgctcactgatcaactttgcgattggcgaccagcgtatgccgttggccgttctgcatgcgttgaccttgatcaagaaagccgccgcacgcgtcaacgaccgcaacggcgacctgccggccgatatcgcccggctgatcgaacaggctgccgacgaggtgctcgacggtcagcacgacgcgcagtttccgctggtggtctggcagaccggcagtggcacgcagagcaacatgaacgtcaacgaagtgatcgccggccgcgccaacgaactggccggccagggccgtggcggcaaatcgccggtccaccccaacgatcacgtcaatcgctcgcaaagctccaacgactgctttccgacagccatgcacattgccactgcgcaagcggtcaaggaacagctgctgccggcgattgccgagctgtccagcgggctggccgaacaggccgcgcgtcacatgaagctggtcaagaccgggcgcacgcacatgatggacgccacgccgatcacctttggccaggagctttcggggttcgtcgcgcaactggattacgcagaaaaagccattcgcgccgccctgcccgccgtctatgaactggcgcaaggtggcaccgcagtcggcaccgggctcaacgcgccgaaaggcttcgctgaagccatcgcggcagaactggctgcactgtcgggcttgccgttcgtcaccgcgccgaacaaattcgccgcactggcgggccacgagccgctggctgcgctttccggcgcattgaaaacgctggccggcaccctgatgaagatcgccaacgacctgcgcttgctgggttccggcccgcgtgccgggttggcggaagtcaggttgccagccaacgagcccggcagctcgatcatgcccggcaaggttaacccgactcagtgcgaggccctgtcgatgctggcctgccaggttatgggcaacgatgtgaccatcggttttgccgccagccagggccatttgcaactgaacgtctataagccggtgatcattcacaacgtattgcagtcgatccgactgctggccgacggttgcagcaatttcaatgaacactgcgtcgccggcatggagccagacgccgaaaaaatggctgagcaccttgaacgcggcctgatgctggtcaccgcgctcaacccgcacatcggctatgacaagtcggcgcacattgccaaaaaagcctacaccgaaggcctgaccctgcgtgaagcagcgctggcgctgggttacctgaccgacgaggagttcgacgcctgggtgcgcccggacaagatgctggaggcgggcagcaatggttga

SEQ ID NO: 29241 - protein, 464 aa, Pseudomonas syringae
MSRTETDSIGPIEVPEDAYWGAQTQRSLINFAIGDQRMPLAVLHALTLIKKAAARVNDRNGDLPADIARLIEQAADEVLDGQHDAQFPLVVWQTGSGTQSNMNVNEVIAGRANELAGQGRGGKSPVHPNDHVNRSQSSNDCFPTAMHIATAQAVKEQLLPAIAELSSGLAEQAARHMKLVKTGRTHMMDATPITFGQELSGFVAQLDYAEKAIRAALPAVYELAQGGTAVGTGLNAPKGFAEAIAAELAALSGLPFVTAPNKFAALAGHEPLAALSGALKTLAGTLMKIANDLRLLGSGPRAGLAEVRLPANEPGSSIMPGKVNPTQCEALSMLACQVMGNDVTIGFAASQGHLQLNVYKPVIIHNVLQSIRLLADGCSNFNEHCVAGMEPDAEKMAEHLERGLMLVTALNPHIGYDKSAHIAKKAYTEGLTLREAALALGYLTDEEFDAWVRPDKMLEAGSNG

SEQ ID NO: 29242 - DNA, 1386 bp, Ralstonia solanacearum
  CDS (1)..(1386)
atgacgacccgtaccgaacgcgatacctttggcccgatcgaagtccccgccgaccgcctgtggggcgcgcagacgcagcgctcgctgcagaacttcgacatcgccggcgaccgcatgccgcgcgagctgatcgacgcgctggcccgcatcaagcgcgccagcgccgccgtcaaccagcgcctgggcctgctgccggccgacaaggcgaacgcggtcatcgccgcggccgacgaggtcatcgccggcaagcatccgggcgagttcccgctggtggtctggcagaccggctccggcacgcagagcaacatgaacatgaacgaggtgctcgccaaccgcgccagcgaactgctgggcggcgagcgcggcgaagcccgcctggtgcaccccaacgacgacgtgaaccgcagccagtcgtccaacgacgtgttcccgacggcgatgcacgtggcggccgtcaccgccatcacgcggcacctgctgccgtcgctgcgcgcgctgcgcgagacgctggcgcgcaaggccatcgacttcgacgacatcatcaagatcggccgcacccacctgcaggacgccacgccgctcacgctcggccaggagttctccggctacgcggcccagctgcagcacagcgagacgcacctgaacgccgcgctgccgcacctgtgcgagctggcgctgggcggcacggcggtcggcaccggcctgaatgcgccggccggctatgccgaacaggtggccgccgaactcgccgcgctgaccggcctgcccttcgtcacctcgcccaacaagttcgagaccatggcctcggccgacggcctggtgcacgcgcacggcgccctgaagacgctggccgccagcctgaccaagatcgccaacgacatccgctggctggccagcggcccgcgcagcggcctgggcgagctgtccattcccgagaacgagccgggctcgtccatcatgccgggcaaggtcaacccgacccagagcgaggcgatgacgatgctgtgcgcgcaggtgttcggcaacgatgtcgccgtcaacatcggcggggcctcgggcaacttcgagctgaacgtgttccggccgatgatcgcctacaacttcctgcacagcgcgcgcctgctggccgacggcatgcgcagcttcaacgaccactgcgcggtcggcatcgagcccaaccgcgagcgcatcgccgagctggtgcagcgctcgctgatgctggtgaccgcgctcaacccgcacatcggctacgacaaatcggcgcagatcgccaagaaggcgcacaaggaaggcaccagcctgcgcgaggcggcgctggcgctggggtatgtgacggccgagcagttcgatgcgtgggtgcggccggagcagatggtgggacgctga

SEQ ID NO: 29243 - protein, 461 aa, Ralstonia solanacearum
MTTRTERDTFGPIEVPADRLWGAQTQRSLQNFDIAGDRMPRELIDALARIKRASAAVNQRLGLLPADKANAVIAAADEVIAGKHPGEFPLVVWQTGSGTQSNMNMNEVLANRASELLGGERGEARLVHPNDDVNRSQSSNDVFPTAMHVAAVTAITRHLLPSLRALRETLARKAIDFDDIIKIGRTHLQDATPLTLGQEFSGYAAQLQHSETHLNAALPHLCELALGGTAVGTGLNAPAGYAEQVAAELAALTGLPFVTSPNKFETMASADGLVHAHGALKTLAASLTKIANDIRWLASGPRSGLGELSIPENEPGSSIMPGKVNPTQSEAMTMLCAQVFGNDVAVNIGGASGNFELNVFRPMIAYNFLHSARLLADGMRSFNDHCAVGIEPNRERIAELVQRSLMLVTALNPHIGYDKSAQIAKKAHKEGTSLREAALALGYVTAEQFDAWVRPEQMVGR

SEQ ID NO: 29244 - DNA, 1392 bp, Rhizobium meliloti
  CDS (1)..(1392)
atgacatcgacccgcacggaaacagatacgttcggccccatcgaagtggcgagcgaccgctattggggcgcccaggcgcagcgatcgctgggcaatttcaaaatcggctgggaaaagcagcctctggcaatcgtgcgcgcactcggcatcgtcaaacaggcggctgcccgcgccaacatggcgctcggccgcctcgacccggcgatcggcgacgccatcgtcaaggccgcacaggaggtgatcgacggcaagcttgacgagcacttccctctcgtcgtgtggcagacgggctccggaacccagtcgaacatgaatgcgaacgaggtcgtttccaaccgtgcgatcgagctgctcggcggcgtcatgggttcgaagaagccggttcacccgaacgatcacgtcaatatgagccagtcgtcgaacgacacctatcccacggccatgcacatcgcctgtgcggagcgcgtgatccacgatctgctgccggcgctcaagcacctgcacaaggcgctcgaagagaaggtgaaggctttcgatcacatcatcaagatcggccgcacccacacgcaggacgcaacgcccctgacgctggggcaggagttttccggctatgcggcgcaggtcgcctcctcgatcaaacggatcgagatgacgctccccggcctttgcgagctcgcccagggggggaccgcggtcggcaccgggctcaatgcgccggtcggatttgccgagaaggtcgccgaggaaatcgctgccatcaccggcatcggcttcacttccgcgccgaacaagttcgaagcgctggccgcccacgactcgatggtcttcagccacggggcaatcaacgccaccgccgccgcgctcttcaagatcgccaacgacatccgcttcctcggctccggcccccgctccggcctcggcgagctttcactgccggaaaacgagccgggctcgtccatcatgccgggcaaggtcaacccgactcagtgcgaggcgctcacccaggtctgcgtccaggtcttcggcaatcatgcggcgctgacctttgccggcagccagggccacttcgagctcaacgtctacaatccgctgatggcgtacaacttcctgcagtcggtgcaactgctcgccgatgcggctatctccttcaccgacaattgcgtcgtcgggatcgaggcgcgggaggacaacatcaaggcggcgctcgaccgttcgctcatgctggtgactgcgcttgcgccgaagatcggctacgacaacgcggccaagatcgccaagaccgcccacaagaacggtaccacgcttcgcgaggaggccgtcggcggcggttacgtcacggacgaggagttcgacgccgtcgtccgccccgaaaccatgatcggcccggcctga

SEQ ID NO: 29245 - protein, 463 aa, Rhizobium meliloti
MTSTRTETDTFGPIEVASDRYWGAQAQRSLGNFKIGWEKQPLAIVRALGIVKQAAARANMALGRLDPAIGDAIVKAAQEVIDGKLDEHFPLVVWQTGSGTQSNMNANEVVSNRAIELLGGVMGSKKPVHPNDHVNMSQSSNDTYPTAMHIACAERVIHDLLPALKHLHKALEEKVKAFDHIIKIGRTHTQDATPLTLGQEFSGYAAQVASSIKRIEMTLPGLCELAQGGTAVGTGLNAPVGFAEKVAEEIAAITGIGFTSAPNKFEALAAHDSMVFSHGAINATAAALFKIANDIRFLGSGPRSGLGELSLPENEPGSSIMPGKVNPTQCEALTQVCVQVFGNHAALTFAGSQGHFELNVYNPLMAYNFLQSVQLLADAAISFTDNCVVGIEAREDNIKAALDRSLMLVTALAPKIGYDNAAKIAKTAHKNGTTLREEAVGGGYVTDEEFDAVVRPETMIGPA

SEQ ID NO: 29246 - DNA, 1404 bp, Salmonella typhimurium
  CDS (1)..(1404)
atggtaacggtacgccgcgagaaagattcaatgggcgcgattgaagtcccggcagataaactgtggggggcgcagactcaacgttcgctggagcattttcggatttccacggagaaaatgcccgtctcgctcattcacgctctggcgttgaccaagcgcgccgctgcgaaggtcaaccaggacttagggttgttggcggcggaaaaagccagcgcgattatccaggcggctgatgaagtgctggcgggaaaacatgctgatgagtttccgctggcgatttggcagaccgggtccggtacgcaaagcaacatgaatatgaatgaagtgttagcgaaccgcgccagtgaaattttgggcggcgttcgcggtatggaacgcaaggtgcatcccaatgatgacgtcaataagagtcaaagctcaaacgatgttttcccaaccgccatgcacgtggcggcgttactggcgttacgcgaacaccttatcccgcaattatccgcattaacggatacgcttcgcgataaatcccacgctttcgccgatattgtcaaaattggccgtactcacctgcaggacgcgacgccgctcaccttaggccaggagatttccggttgggtagccatgctggaacataacctcagacacattgagcacagtttaccgcacgtcgcggaactggcgctcggcggaaccgcagtagggacagggcttaatacccatccggaatatgcccggcgcgtggccgaggaactggcgacgattaccgcggcgccgtttgttaccgcccccaataaattcgaagcgctggcgacctgtgacgcgttggtacaggcgcatggcgcattaaaaggactggcggcctcgctgatgaaaatcgccaacgatgttcgctggctggcgtccggcccgcgttgcggcattggcgagattgctatcccggagaatgagccaggcagttccattatgcctggtaaagtgaacccgacccagtgtgaagcggtaacgatgctatgttgccaggtgatgggtaacgatgtggccatcaatatggggggcgcatcgggcaactttgagctcaacgtctatcgtccgatggttattcataattttctgcaaacggtgcgcctgctggccgatggcatggagagttttaataaacactgtgcgtcaggaatcgagccaaaccgcgagcgtattacgcagttgctgaatgagtcgctgatgctggtcactgcgctgaatacgcacatcggttacgataaagcggcggagattgcgaagaaggcgcataaagaagggctgacgctcaaagcctcagccgtggcattaggataccttagcgacgaggagttcgacgcctgggtacgtccggagttgatggttggcagtatgacgccgggacgttaa

SEQ ID NO: 29247 - protein, 467 aa, Salmonella typhimurium
MVTVRREKDSMGAIEVPADKLWGAQTQRSLEHFRISTEKMPVSLIHALALTKRAAAKVNQDLGLLAAEKASAIIQAADEVLAGKHADEFPLAIWQTGSGTQSNMNMNEVLANRASEILGGVRGMERKVHPNDDVNKSQSSNDVFPTAMHVAALLALREHLIPQLSALTDTLRDKSHAFADIVKIGRTHLQDATPLTLGQEISGWVAMLEHNLRHIEHSLPHVAELALGGTAVGTGLNTHPEYARRVAEELATITAAPFVTAPNKFEALATCDALVQAHGALKGLAASLMKIANDVRWLASGPRCGIGEIAIPENEPGSSIMPGKVNPTQCEAVTMLCCQVMGNDVAINMGGASGNFELNVYRPMVIHNFLQTVRLLADGMESFNKHCASGIEPNRERITQLLNESLMLVTALNTHIGYDKAAEIAKKAHKEGLTLKASAVALGYLSDEEFDAWVRPELMVGSMTPGR

SEQ ID NO: 29248 - DNA, 1386 bp, Staphylococcus aureus
  CDS (1)..(1386)
atgtcagtaagaattgaacatgatacttttggagaaatagaagtacctgcagataaatattggggtgctcaaacagaaagaagtaaacgcaatttcccagttggtaaagagcgtatgccaatcgaagtagtttatggttttgcacaactaaagcgtgcagcagcattagctaattttgatttaggaaaattaagcgaggcaaagaaagatgccattgtatacgcatgtgatcaaattttatcaggtgaattagatgaacacttcccactagttgtatggcaaacaggaagcggtacacaaagtaatatgaatgtgaacgaagtagtaagttatgttgctaatatgtatttaaaagatcatcaaattgatgaaagtatccacccaaatgatgatgtaaataaatcacaaagttcgaatgatacattcccaactgctatgcacgttgcattatatcaagaggttgaaacaaaattagaacctgcattaaaacttttaagaaatactttgaaagaaaaagaagacaaatttgattcaattattaaaattggtcgtacacatttacaagatgcaacgccgatcaaactaggacaagagattagtggctggcgttatatgcttgaccgttgcgaaataatgttatctgaatctaagaagcacattttaaatcttgccatcggtggtacggctgttggtactggtattaatgcgcatcctgaatttggtgataaagtggcacattatatttcagaaaatacgggttatccatttgtatcttctgaaaataaattccatgcattaacagcacatgatgaagtagtacaactacatggaacattgaaggcgctagcaggagacttaatgaaaattgctaatgatgtgagatggttggcttcagggccacgagctggtttggcagaaatttctatccctgaaaatgaaccaggttcatcaattatgcctggtaaagttaatcctacacaatgtgaaatgttaacaatggttgcagtccaagtaatgggtaatgatacagttgttggcttcgcaagttcacaaggtaactttgaattgaatgtttataaaccagttattatgcataatacactacaatcaatttaccttttagctgatggtatggaaacatttaataacaattgcgcagtgggcattgaaccaatcgaagagaatattgataattatttaaatcaatcattaatgttagttactgcattaaatccacatattggttatgaaaaagcagctcaaattgctaagaaagcccataaagaaggtttaactttaaaagaatctgcaattcaaactggatatgttacagaagaacaatttgaagcatggattaaaccagaagatatggtagatcctcattaa

SEQ ID NO: 29249 - protein, 461 aa, Staphylococcus aureus
MSVRIEHDTFGEIEVPADKYWGAQTERSKRNFPVGKERMPIEVVYGFAQLKRAAALANFDLGKLSEAKKDAIVYACDQILSGELDEHFPLVVWQTGSGTQSNMNVNEVVSYVANMYLKDHQIDESIHPNDDVNKSQSSNDTFPTAMHVALYQEVETKLEPALKLLRNTLKEKEDKFDSIIKIGRTHLQDATPIKLGQEISGWRYMLDRCEIMLSESKKHILNLAIGGTAVGTGINAHPEFGDKVAHYISENTGYPFVSSENKFHALTAHDEVVQLHGTLKALAGDLMKIANDVRWLASGPRAGLAEISIPENEPGSSIMPGKVNPTQCEMLTMVAVQVMGNDTVVGFASSQGNFELNVYKPVIMHNTLQSIYLLADGMETFNNNCAVGIEPIEENIDNYLNQSLMLVTALNPHIGYEKAAQIAKKAHKEGLTLKESAIQTGYVTEEQFEAWIKPEDMVDPH

SEQ ID NO: 29250 - DNA, 1386 bp, Staphylococcus epidermidis
  CDS (1)..(1386)
atgtcagtcagaattgaacatgatacatttggagaaattgaagtaccagaagacaaatattggggtgcacagactgaaagaagtaaacgaaattttccagtcggcaaagagcatatgcctatacaagtcatttacggatttgctcaactaaaaagaggtgcagccttagcaaatcatgaattaggaaaattgagtgatgaaaaaaagaacgccatcgtttatgcttgtgatcgtattttaaatggagaactagataatcattttccacttgtgatttggcaaacaggtagtggtactcaaagcaatatgaatgtaaatgaagtcgtaagctatgtagctaatgaataccttaagaaacatggaagtaaggaaactatccatccaaatgatgatgtaaataaatctcaaagttcaaatgatacatttcctacagctatgcatgtcgcattgttccatgaagttgaaactaagttagagccagcacttaaccatttacgtcaaacttttaaagaaaaagaagaccaatatcaatcaatcattaaaattggacgcacacatttgcaagatgcaacgcctattaaactaggtcaagagataagtggttggcgctatatgttagaaaaatgtgagcaattactatcagaatcaaaaaagcatattttaaatttagcaattggtggaactgcagtaggaacgggaattaatgctcatccagaatttggtcataaagtagccaaatatatttcccaaaacacagggtatgctttcgtatcatctgaaaacaaatttcatgctttaacttctcatgatgaaattgtacaattacatggaacattaaaagcgctagcgacagatttaatgaaaattgcaaatgatattagatggctagcctctggaccgcgtgcaggtcttgctgagatttcaattccagaaaatgaacctggatcttctattatgccaggaaaagtaaatccaacacaatgtgaaatgttaactatggtagcagtacaagtcatggggaatgatacgacggtaggtatcgcaagttctcaaggtaattttgaactaaatgtatttaaaccggtaattatgcataacactttacaatctatttacttattagcagatggaatgaatacctttaataaaaactgtgcaattggtattcaaccgatagaagaaaatattaataattatttaaatcaatcattaatgctagttacggcactgaaccctcatattggatatgagaaagcagctcaaatagctaaaaaggcacacaaagaaggacttactttaaaagaatctgcaatagaaagtggatatgtaactgaatcacaatttgaagagtggataaaaccagaagatatggtagacccacattga

SEQ ID NO: 29251 - protein, 461 aa, Staphylococcus epidermidis
MSVRIEHDTFGEIEVPEDKYWGAQTERSKRNFPVGKEHMPIQVIYGFAQLKRGAALANHELGKLSDEKKNAIVYACDRILNGELDNHFPLVIWQTGSGTQSNMNVNEVVSYVANEYLKKHGSKETIHPNDDVNKSQSSNDTFPTAMHVALFHEVETKLEPALNHLRQTFKEKEDQYQSIIKIGRTHLQDATPIKLGQEISGWRYMLEKCEQLLSESKKHILNLAIGGTAVGTGINAHPEFGHKVAKYISQNTGYAFVSSENKFHALTSHDEIVQLHGTLKALATDLMKIANDIRWLASGPRAGLAEISIPENEPGSSIMPGKVNPTQCEMLTMVAVQVMGNDTTVGIASSQGNFELNVFKPVIMHNTLQSIYLLADGMNTFNKNCAIGIQPIEENINNYLNQSLMLVTALNPHIGYEKAAQIAKKAHKEGLTLKESAIESGYVTESQFEEWIKPEDMVDPH

SEQ ID NO: 29252 - DNA, 1404 bp, Streptomyces avermitilis
  CDS (1)..(1404)
atgaccgacgaggacgacaagcagaactaccgtgtcgagcacgactccatgggtgaggtccgtgtccccgcggacgccaagtggcgggcccagacccagcgtgccgtggagaacttccccatctccgggcagcggctcgagcgggcgcacatcgaggccctcgcccggatcaagggagccgccgccaaggtgaacgccgagttgggcgtgctcgacaaggacgtcgccgaggccattcaggaggcggccgccgaggtcgcggaggggcgttgggacgagcacttccccgtggacgtgttccagaccggctccgggacctcgtccaacatgaacgccaacgaggtcatcgccacgctcgcgaccgaacggctcggcagggacgtacaccccaatgaccacgtgaacgcgtcgcagtcgtcgaacgacgtgttcccgtccagcattcacatcgcggccaccgccgccgtcacccgcgatctggtacccgccctggagcacctggccgccgcgctgggccgcaagtccgaggagttcgcggacgtcgtgaaggccgggcgtacgcatctcatggacgcgacgcccgtgaccctggggcaggagttcggcggatacgcggcccaggtgcggtacggcgtcgagcggctggccgcctccctgccgcggctcgccgaactgcccctcgggggcaccgcggtcgggaccgggatcaacaccccgccgggcttctccgccgccgtcatcgccgaggtcgcccgcgtcaccgggctgccgctcaccgaggcgcgcgaccacttcgaggcgcagggtgcgcgggacgggatcgtcgagaccagcgggcagttgcggaccatcgccgtaggactgacgaagatcgcgaacgatctgcggtggatggcttcggggccgcgtaccgggctctccgagatcagcctgcccgaccttcagccggggtcctcgatcatgcccggcaaggtgaatcccgtgattcccgaggccgtgctgatggtcgccgcacaggtgacgggcaacgacgcgaccgtcgccgccgccggagccgccggcaacttcgaactcaatgtgatgctgcccgtcatcgcgaagaacgtgctggagtccgtccggctgctcgcccatgtctcccggctgctggccgaccgcaccgtcgacgggatcgtcgcccatcgcgaccgggcccgtgagtacgccgagtcgtcaccgtccgtcgtcaccccgctgaacaagtacatcgggtacgaggaggccgcgaaggtcgccaagaaggccctcgccgagcggcagacgatccgtcaggtcgtcctggagagcggatacgtggaccgtggcgacctcaccctggagcagctcgacgaggcgctcgacgtcctgcggatgacgcacccctga

SEQ ID NO: 29253 - protein, 467 aa, Streptomyces avermitilis
MTDEDDKQNYRVEHDSMGEVRVPADAKWRAQTQRAVENFPISGQRLERAHIEALARIKGAAAKVNAELGVLDKDVAEAIQEAAAEVAEGRWDEHFPVDVFQTGSGTSSNMNANEVIATLATERLGRDVHPNDHVNASQSSNDVFPSSIHIAATAAVTRDLVPALEHLAAALGRKSEEFADVVKAGRTHLMDATPVTLGQEFGGYAAQVRYGVERLAASLPRLAELPLGGTAVGTGINTPPGFSAAVIAEVARVTGLPLTEARDHFEAQGARDGIVETSGQLRTIAVGLTKIANDLRWMASGPRTGLSEISLPDLQPGSSIMPGKVNPVIPEAVLMVAAQVTGNDATVAAAGAAGNFELNVMLPVIAKNVLESVRLLAHVSRLLADRTVDGIVAHRDRAREYAESSPSVVTPLNKYIGYEEAAKVAKKALAERQTIRQVVLESGYVDRGDLTLEQLDEALDVLRMTHP

SEQ ID NO: 29254 - DNA, 1386 bp, Streptomyces coelicolor
  CDS (1)..(1386)
atgagcgaataccgcatcgagcacgactccatgggcgaggtccgcgtccccgcggacgccaagtggcgcgcccagacccagcgcgccgtcgagaacttccccgtctccgggcagcgcatcgagcgcgcgcacatcgaggcgctggcgcggatcaagagcgcggcggcgaaggtcaacgccgagctgggagtgctcgacgaggacgtcgccggcgcgatccaggaggcggccggtgaggtggccgaggggaagtgggacgagcacttccccgtcgacgtgttccagaccgggtccgggacctcgtccaacatgaacaccaacgaggtcgtcgccaccctggcgactgaacggctcggccgcgacgtgcatcccaacgaccacgtcaacgcctcccagtcgtccaacgacgtcttcccgtcctcgatccacatcgccgccaccgccgccgtcacccgcgacctgatcccggccctggaccatctcgccggcgccctggagcgcaaggccggggagttcgccgacgtggtgaagtccgggcgtacgcacctcatggacgccacgcccgtcaccctgggccaggagttcggcggttacgcggcccaggtgcggtacggcatcgagcggcttcaggcctcactgccccggctcgccgagctgccgctgggcggcaccgcggtcggcaccggcatcaacaccccgcccggcttctccgccgccgtcatcgaggaggtggcccgcgcgacggggctgccgctgaccgaggcgcgcgaccacttcgaggcgcagggcgcccgggacggcatcgtcgagaccagcgggcagctgcggaccatcggcgtcgggctcacgaagatcgccaacgacctgcgctggatggcgtccggtccgcgcaccgggctcgcggagatctcgctgcccgacctccagcccgggtcgtccatcatgcccggcaaggtcaacccggtgatccccgaggcggtcctcatggtcgccgcccaggtcaccggcaacgacgcgacggtcgccgcggcgggcgcggccggcaacttcgagctgaacgtgatgctgccggtcatcgccaagaacgtgctggagtcggtgcggctgctcgccaacgtctcccggctgctcgccgaccgcaccgtggacgggatcgtggcgcaccccgagcgggcccgcgagtacgccgagtcctcgccctccgtggtcacgccgctcaacaagtacctcgggtacgaggaggccgccaaggtcgccaagagggcgctggccgagcggaagacgatccggcagaccgtgctggagggcggctacgtggaacgcggcgacctcacgcgggagcaactggaccaggccctggacgtgctgcggatgacccgcccgtga

SEQ ID NO: 29255 - protein, 461 aa, Streptomyces coelicolor
MSEYRIEHDSMGEVRVPADAKWRAQTQRAVENFPVSGQRIERAHIEALARIKSAAAKVNAELGVLDEDVAGAIQEAAGEVAEGKWDEHFPVDVFQTGSGTSSNMNTNEVVATLATERLGRDVHPNDHVNASQSSNDVFPSSIHIAATAAVTRDLIPALDHLAGALERKAGEFADVVKSGRTHLMDATPVTLGQEFGGYAAQVRYGIERLQASLPRLAELPLGGTAVGTGINTPPGFSAAVIEEVARATGLPLTEARDHFEAQGARDGIVETSGQLRTIGVGLTKIANDLRWMASGPRTGLAEISLPDLQPGSSIMPGKVNPVIPEAVLMVAAQVTGNDATVAAAGAAGNFELNVMLPVIAKNVLESVRLLANVSRLLADRTVDGIVAHPERAREYAESSPSVVTPLNKYLGYEEAAKVAKRALAERKTIRQTVLEGGYVERGDLTREQLDQALDVLRMTRP

SEQ ID NO: 29256 - DNA, 1404 bp, Synechococcus elongatus
  CDS (1)..(1404)
atgacaactgacactcgcctagaatacgattccctcggtgccgttgaggtgcctgcggactgctattggggtgctcagacggcgcgttccctcaagcactttgccattggcagtcagcgaatgcccctagcggtgatccatgccatggcacggctcaaaaaggcggcggcgatcgccaaccgtgatttaggagttttagaccctgagaaagccaaatggatcattcaagccgccgatgaagttattgccggacagtgggatgatcagtttcccctcgccatctggcagacgggtagcggcacccaaacgaatatgaatgtcaatgaggtcattgctaaccgtgccattgagctggcgggaggcgttaaggggagcaaaagccccatccatcccaacgatcatgtgaattgtagccagtcctccaatgacacctttcccacggccatgcatgttgccacagtccttgccctacaggagcgcctgctgccaacgctacgccatctcttgacggtcttgcaggaaaaagcggctgcctttgcagagattatcaaaattggccgtacccatttaatggatgccgttcccttgaccctaggccaggaattcagcggttacgccagtcaaattgcggccgctcaagcccatattgaatatgccctgcagcatctgtatccccttgccattggcgctacagcggtggggacggggttgaatgcacccgctggttttggcgatcgcgtggcagcagaattagcgcaaatgacggggtatccctttcgtaaagctgaaaacccctttgccgccttggcagcccacgatcccctagtgatgctcagtggtgctctaaaaaccctggctgccgccctgatgaaaatcgccaacgatattcgttggttgggatcgggaccgcgttgtggtctgggggaattgaggttacccgccaatgaaccggggtcatcaattatgcccggcaaggtgaaccccacccaatgcgaagccttaacgatggtgtgtgtgcaggtgatgggcaacgatgcagccgtgggaatagcgggcagtcaaggaaattttgagttaaatgtctataagcccttgatcatttacaatgtgctgcaatctattgcccttctgagtgatgcagctcaatcgtttaccgaccattgcttagtgggagttgagcccaatcggcagcaaattcaagcctatgtggagcgatcgctcatgttggtgacggctctcaatccccacataggctacgacaaggcggcggcagtcgcgaaaaaggcctacagtgagggtaaaaccctcaaggaagcagctgtggaattgggctatctcactgctgaggagtttgaccgctgggtacgactagagctgatgcttggcgaaaagggcaccagttga

SEQ ID NO: 29257 - protein, 467 aa, Synechococcus elongatus
MTTDTRLEYDSLGAVEVPADCYWGAQTARSLKHFAIGSQRMPLAVIHAMARLKKAAAIANRDLGVLDPEKAKWIIQAADEVIAGQWDDQFPLAIWQTGSGTQTNMNVNEVIANRAIELAGGVKGSKSPIHPNDHVNCSQSSNDTFPTAMHVATVLALQERLLPTLRHLLTVLQEKAAAFAEIIKIGRTHLMDAVPLTLGQEFSGYASQIAAAQAHIEYALQHLYPLAIGATAVGTGLNAPAGFGDRVAAELAQMTGYPFRKAENPFAALAAHDPLVMLSGALKTLAAALMKIANDIRWLGSGPRCGLGELRLPANEPGSSIMPGKVNPTQCEALTMVCVQVMGNDAAVGIAGSQGNFELNVYKPLIIYNVLQSIALLSDAAQSFTDHCLVGVEPNRQQIQAYVERSLMLVTALNPHIGYDKAAAVAKKAYSEGKTLKEAAVELGYLTAEEFDRWVRLELMLGEKGTS

SEQ ID NO: 29258 - DNA, 1398 bp, Synechococcus sp
  CDS (1)..(1398)
atgggccaaccgatgaggcaggagcacgacagcattggaggtgtcgacgtccccgctgcagcgctctggggagcccaaacccagcgatctctcaacaacttcgccattggtcatcaaaagattccagcggagctgattcatgccctggcacggatcaaacagtgctgcgccgcggtgaacggtcgccatggtctgttgaacgaccaacaggtggccttgatcgaacgggcgggccaggcaatccaaacaggccagcaagatgatcactttcctctgagtgtctggcaaaccggcagcggcacgcagacgaacatgaacgtgaatgaggtgatcagcaacctcgctgctcaggaatccggagagaacctcggctcgcaccgtcccctccaccccaacgaccacatcaaccggtctcagtccacaaatgacgttttcccggcagcgatccatgtagctgcggctctgcagctgcagcaggagctgctgccagagctgaagcggctgatcgcgagtctcgatgccaaggccgttgcctggcaggacatcatcaagatcgggcggacccatctgcaggacgcagtgccgcttcgccttggagatgaagtcagcgcctggcgcgaccgactcagcgacggcgcccattggctgaccacagcccatcaagacctactggctctgccgctcggaggcacagccgtcggcagtggattgaacacgccggaccgatttgcccacgaggtttgtgctgaactcgccagccgaacgggatccgactttcagccggcggacaacctgtttgctgtcatggcgggccatgactccctggtgcagaccatggctcagctgcggcgcctggccgtgacgctgctcaccatcgctaatgacatccgcctgctggcttgcggacccagggctgggctgggggaactgctgttgccggccaatgaaccgggcagctcgatcatgccaggaaaggtgaatcccacccagtgcgaggccatggcgatggtctgcacccaggtgatcggcatggatgcagccgtcgcggcagctggtgctggggggcatctccagatgaacgtgtataaacccctgatcggctacaacctgatcgagggcatccgtctgctgcaagacgcctgccgctgtttccggctgaatctgttgaccgggatggaagcagaccgtgaccggatcgcattttacgtggagcgatccctgatgctggtgacggctttgacgccggagatcggctacgaaaaagcctgtgcgatcgcccagcacgcccaccgagacggactgacgcttcgagaggccgccatgcaatccggagcgatcacagacgaacgctttgaccagttgatcgatccagccgcgatggcctcaccccaccgctga

SEQ ID NO: 29259 - protein, 465 aa, Synechococcus sp
MGQPMRQEHDSIGGVDVPAAALWGAQTQRSLNNFAIGHQKIPAELIHALARIKQCCAAVNGRHGLLNDQQVALIERAGQAIQTGQQDDHFPLSVWQTGSGTQTNMNVNEVISNLAAQESGENLGSHRPLHPNDHINRSQSTNDVFPAAIHVAAALQLQQELLPELKRLIASLDAKAVAWQDIIKIGRTHLQDAVPLRLGDEVSAWRDRLSDGAHWLTTAHQDLLALPLGGTAVGSGLNTPDRFAHEVCAELASRTGSDFQPADNLFAVMAGHDSLVQTMAQLRRLAVTLLTIANDIRLLACGPRAGLGELLLPANEPGSSIMPGKVNPTQCEAMAMVCTQVIGMDAAVAAAGAGGHLQMNVYKPLIGYNLIEGIRLLQDACRCFRLNLLTGMEADRDRIAFYVERSLMLVTALTPEIGYEKACAIAQHAHRDGLTLREAAMQSGAITDERFDQLIDPAAMASPHR

SEQ ID NO: 29260 - DNA, 1401 bp, Thermus thermophilus
  CDS (1)..(1401)
atggaataccggattgagcgggacaccatgggcgaggtgcgggtgccggcggacaagtactggggcgcgcagacccagcgctccctggagaacttcaggatcgggaccgaccgcttccgcatgcccctggagatcatccgggcctacgggatgctgaagaaggcggccgcgagagccaacctggagctcggggagctccccgaggagatcgccaaggccatcatccaggcggcggaggaggtggtccaggggaagtgggacgaccacttcccccttgtggtcttccagacgggcagcggcacccagaccaacatgaacgtcaacgaggtcatcgccaaccgggcctcggagatcctggggaagcctctggggagcaagtacgtccaccccaacgaccacgtgaaccgggggcagagctccaacgacaccttccccaccgccatgtacgtggccgtggccctggcgctccaccagaggctctatcccgcggtggaaggcctgatccggacctttacggccaaggcccaggcctttgaccagatcgtcaaggtggggcggacccacctgatggacgccgtgcccatcaccctgggacaggagatcggcagctgggccgcccagctcaagaccaccctcgccgccgtcaaggaaatggaaaagggcctctacaacctcgccatcggcgggacggcggtgggcacgggcctcaacgcccacccccgctttggggagctcgtggccaagtacctcgcggaggagacggggctccccttccgggtggcggagaaccgcttcgccgccctggccgcccacgacgagctggtcaacgtcatgggggccatccgcaccctggccggggccctgatgaagatcggcaacgacgtccgctggctcgcctccggcccctacgcgggcattggggagatcaccatccccgccaacgagcccgggtcctccatcatgccggggaaggtcaaccccacccaggtggaggccctcaccatggtggtggtccgggtctacggcaacgaccacaccgtggccttcgcgggaagccaggggaacttccagctcaacgtctacaagccggtgatggcctacagcaccctggagagcatcaacctcctcgcggacgccgtggcctcctttgacgcccacctggcccaggggattgagcccaatctggagcgcattgaggagcacctgcagaagaaccccatgctggccaccgccctcaacaaggccatcggctacgacaaggcggcggagatcgtcaagaaggccctcaaggagaagaagaccctgaagcaggcggccctcgagctcggctacctcacggaggaggagtttgaccgcatcgtggtccccatgaggctcgccaagccccacgagggggcgtag

SEQ ID NO: 29261 - protein, 466 aa, Thermus thermophilus
MEYRIERDTMGEVRVPADKYWGAQTQRSLENFRIGTDRFRMPLEIIRAYGMLKKAAARANLELGELPEEIAKAIIQAAEEVVQGKWDDHFPLVVFQTGSGTQTNMNVNEVIANRASEILGKPLGSKYVHPNDHVNRGQSSNDTFPTAMYVAVALALHQRLYPAVEGLIRTFTAKAQAFDQIVKVGRTHLMDAVPITLGQEIGSWAAQLKTTLAAVKEMEKGLYNLAIGGTAVGTGLNAHPRFGELVAKYLAEETGLPFRVAENRFAALAAHDELVNVMGAIRTLAGALMKIGNDVRWLASGPYAGIGEITIPANEPGSSIMPGKVNPTQVEALTMVVVRVYGNDHTVAFAGSQGNFQLNVYKPVMAYSTLESINLLADAVASFDAHLAQGIEPNLERIEEHLQKNPMLATALNKAIGYDKAAEIVKKALKEKKTLKQAALELGYLTEEEFDRIVVPMRLAKPHEGA

SEQ ID NO: 29262 - DNA, 1395 bp, Wigglesworthia glossinidia brevipalpis
  CDS (1)..(1395)
atgttaattaatagaatagaaaaagatactattggcgaagttgaattgccaaaaaaatgtttgtggggatcccaaactcaaagatctatttataattttaatatctctacagagaaaatgccttatgagcttattcacgctttagttcaaataaaacttgtagcagcaaaagttaataaagatctaaaattattagaagaaaaaaaagctgatgctataattaaagcttctgaagagatattatctggaaaatacaaagatagttttcctttggtaatttggcaaactggatctggaactcaaacaaacatgaacgtaaatgaagtaatagctaatattgcaataaaattattaggaggaaagtatggagactattcaataatacatcctaacgatcatgtaaataaaagtcaaagttctaatgatgtatttcctacagcaatgcatatatctgcagttttgtctttaaagaaaaatttattaccgaatttaattaaattaaaaaaatcattttatgataaatctatattatttaaagatattattaaaattggaagaactcacctgcaagatgcaactccattgactttaggccaagaagtttcttcttggtattgtatgttgaaaaaaaacattaaatatataaaaaatagcatactttgtatttctgaaatagctttaggtggtacagccgtaggaactgggttaaatgctcacgaaaaatattcattaaaagcatctaaattattgtcagaaataaataaacataattttattagttctacaaataaatttgaatctttaagtacatgtgatgcaatagtaaaagttcatagcactttaaaaaatttatctatttcaattatgaaaatatcaaatgatatacgttggttatcttctggcccaagatgtggaataggagaattaattattccagaaaatgaaccaggaagttctataatgcccggtaaagttaatccaactcaatgcgaatctatatctatgatatgctgtcaagtaataggaaacgactccgccataggaataggaggattgtctggaaattttcaattgaatgtatttcgacctatgattatttataattttttacaatccgtaagaatattatctgatggaataaaaagctttaacaaaaaatgtgttattggtattaaaccaaatattaaaagaataaaaaaatttcttaaagaatctttgatgctagttacatcattaactcctcatataggatatgataaatctgcaaaaatagcaaaattagctcacaatgaaaatattactttaaaagaagcttgtttgaaattgaattatatttcagagagtcaatttgatattttagttcgtccagaaaacatgattggaaataaaaattaa

SEQ ID NO: 29263 - protein, 464 aa, Wigglesworthia glossinidia brevipalpis
MLINRIEKDTIGEVELPKKCLWGSQTQRSIYNFNISTEKMPYELIHALVQIKLVAAKVNKDLKLLEEKKADAIIKASEEILSGKYKDSFPLVIWQTGSGTQTNMNVNEVIANIAIKLLGGKYGDYSIIHPNDHVNKSQSSNDVFPTAMHISAVLSLKKNLLPNLIKLKKSFYDKSILFKDIIKIGRTHLQDATPLTLGQEVSSWYCMLKKNIKYIKNSILCISEIALGGTAVGTGLNAHEKYSLKASKLLSEINKHNFISSTNKFESLSTCDAIVKVHSTLKNLSISIMKISNDIRWLSSGPRCGIGELIIPENEPGSSIMPGKVNPTQCESISMICCQVIGNDSAIGIGGLSGNFQLNVFRPMIIYNFLQSVRILSDGIKSFNKKCVIGIKPNIKRIKKFLKESLMLVTSLTPHIGYDKSAKIAKLAHNENITLKEACLKLNYISESQFDILVRPENMIGNKN

SEQ ID NO: 29264 - DNA, 1760 bp, Brachydanio rerio
  CDS (19)..(1548)
gttccgcccccggtcgccatgtaccgctccgctcgctccctgcatcgcttcagcgcgagtttgtcagatctgcgggccgctcagagatccatcaaagctcgcaacgtctgtccagcacccgggctccggcaccagaccgtcagaatggccagttcagaggcatttcggattgagagggacacatttggagagcttaaagtcccctctgataaatactatggagctcagactgtcagatccaccatgaacttcaggatcggaggagtcacggagaggatgccgattcaggtgatcagagctttcggtatcctgaagaaagctgctgcagaagtcaataaagattacggtttggacccaaagatcgcagacgccatcatgaaagctgctgatgaggtggagtctgggaagctggatgatcatttcccgctggttgtttggcaaacaggatccggaactcagactaacatgaacgtcaatgaggtgatcagtaacagagccatcgagatgctgggaggaaaactgggcagcaaagaccccgttcatcccaatgaccacgtcaacaagagccagagctccaatgacacgttccccacagccatgcacatcgctgctgctaaagaggttcacgaggttctcctgccgggccttcagacgcttcatgatgctctcgctgccaaagctgaacagttcaaagacatcataaagatcggccgcacacacacacaggacgccgtgccgctctcgctcggacaggagtttggcgggtacgtgcagcaggtgaagtacagtattgcgcgcgtgaaagcgtctctgccgcgtgtgtatgagctggcagcaggaggaaccgcagtcggcactggactcaacacacgcatcggctttgcagagaaggtggcagataaagtgtctgcacttacaggtcttccgttcgtgaccgcagccaataagttcgaggctctggcggctcatgatgctctggtggagctgagtggcgctctgaacactgtggccgtgagcatgatgaagatcgccaatgatatccgcttcctcggctctgggcctcgttcgggtctcggagaactcatcctgccagagaacgaacccggatccagcatcatgcccggtaaggtgaacccgacgcagtgtgaggccatgactatggtggccgctcaggtgatggggaatcatgtggccgttactgtcggaggaagcaatggacacttcgagctcaatgtgttcaagcccatgatcattaagaacgtgctgaactcggccaggctgctgggcgatgcttcggtctccttcactaataactgcgtggtcggcatcgaggcgaacaccgagaggatcaacaagctgatgagcgagtctctgatgctggtcaccgccctcaatccacatataggttatgataaagccgcaaaaattgcgaaaaccgctcataaagacggttcgactctgaaagaggcggcgctgaagctgggattcctgaacgagcagcagtttgaggagtgggttcgacctcatgacatgctgggcccaaagtaaaggagaacagagctgaaacacacgcacaccagtaaaacacttgtggatcaccgttcacagacggggtttgtgctggaggtattattcttcagagtctgtgtgttccctgtgaatgcatgactgtgtttctttttcatcccaaaatctgaggaataaaataaccgggggagaaaaaaaaaaaaaaaaaaaaaaaaaaaaaaaaaaaaaaaaaa

SEQ ID NO: 29265 - protein, 509 aa, Brachydanio rerio
MYRSARSLHRFSASLSDLRAAQRSIKARNVCPAPGLRHQTVRMASSEAFRIERDTFGELKVPSDKYYGAQTVRSTMNFRIGGVTERMPIQVIRAFGILKKAAAEVNKDYGLDPKIADAIMKAADEVESGKLDDHFPLVVWQTGSGTQTNMNVNEVISNRAIEMLGGKLGSKDPVHPNDHVNKSQSSNDTFPTAMHIAAAKEVHEVLLPGLQTLHDALAAKAEQFKDIIKIGRTHTQDAVPLSLGQEFGGYVQQVKYSIARVKASLPRVYELAAGGTAVGTGLNTRIGFAEKVADKVSALTGLPFVTAANKFEALAAHDALVELSGALNTVAVSMMKIANDIRFLGSGPRSGLGELILPENEPGSSIMPGKVNPTQCEAMTMVAAQVMGNHVAVTVGGSNGHFELNVFKPMIIKNVLNSARLLGDASVSFTNNCVVGIEANTERINKLMSESLMLVTALNPHIGYDKAAKIAKTAHKDGSTLKEAALKLGFLNEQQFEEWVRPHDMLGPK

SEQ ID NO: 29266 - DNA, 1588 bp, Mus musculus
  CDS (6)..(1529)
gcaccatgtaccgcgcactccgtctcctcgcgcgctcgcgtcgcctcctgcgggttccgtccgccggtgctgcagtgtctggggaagcgaccaccctcccgcggtgtgctccgaacgtcgcgcgaatggcaagccaaaattccttccgtgtagagttcgacacctttggtgaattgaaggttccaaccgataagtattatggtgctcagaccgtaagatctacgatgaactttaagattggaggtgctacagaacgtatgccaatcccagtcattcaagctttcggcatcttgaagcgagctgctgctgaagtaaaccaggagtatggtctcgatccaaagattgctagtgcaataatgaaggccgcagatgaggtagctgaaggtaaattaaatgatcactttcctctggtggtttggcagactggatcaggaacccagacaaacatgaatgtaaatgaagtcattagcaacagagcaattgaaatgttaggaggtgaacttggcagcaagaagcctgtgcaccccaatgatcatgttaacaaaagccagagctcgaatgacacctttcccacagcaatgcatattgctgctgcagtggaagttcacaaggtcctgttgccagggttacagaagctccatgatgctctcagtgcaaaatccaaagagtttgcgcaggtcatcaaaattgggcgaactcacacgcaggacgctgtccctcttactcttggacaggaattcagtggttacgttcagcaagtccagtatgcgatggtgagaataaaagccgccatgccaagaatctacgagctcgctgctggaggcactgctgtggggacggggttaaacaccaggatcggcttcgcagaaaaggtggccgcaaaagtagcagcactcacaggtttgccttttgtcactgccccgaataaatttgaagctctagctgctcatgatgctctggttgagcttagtggagccatgaacactgccgcctgcagtctaatgaagatagcgaatgatattcgcttcctgggttctggtcctcggtcaggtttgggagagctgatcttgcctgaaaacgagccagggagcagcatcatgccaggaaaggtgaaccctactcagtgtgaagcgatgaccatggttgcagcccaagtcatggggaatcacgttgctgttactgttggaggcagcaatggacattttgaactgaatgtgtttaaaccaatgatgattaagaatgtgttgcactcagcgaggctactgggagatgcttcagtgtccttcacagaaaactgtgtggtcgggatccaggccaacacagagcggatcaacaagctaatgaatgagtctttaatgttggtcacagctcttaatccacatatagggtatgacaaagcagcaaagattgccaagactgcgcacaagaacggatcaaccttaaaggaaacggctattgaacttggctatctcacagcagagcagtttgatgagtgggtgaaacccaaggacatgctgggtccaaagtgacttcaataaatttatattaaaataaacttaagaaatttacaaacaaaaaaaaaaaaaaa

SEQ ID NO: 29267 - protein, 507 aa, Mus musculus
MYRALRLLARSRRLLRVPSAGAAVSGEATTLPRCAPNVARMASQNSFRVEFDTFGELKVPTDKYYGAQTVRSTMNFKIGGATERMPIPVIQAFGILKRAAAEVNQEYGLDPKIASAIMKAADEVAEGKLNDHFPLVVWQTGSGTQTNMNVNEVISNRAIEMLGGELGSKKPVHPNDHVNKSQSSNDTFPTAMHIAAAVEVHKVLLPGLQKLHDALSAKSKEFAQVIKIGRTHTQDAVPLTLGQEFSGYVQQVQYAMVRIKAAMPRIYELAAGGTAVGTGLNTRIGFAEKVAAKVAALTGLPFVTAPNKFEALAAHDALVELSGAMNTAACSLMKIANDIRFLGSGPRSGLGELILPENEPGSSIMPGKVNPTQCEAMTMVAAQVMGNHVAVTVGGSNGHFELNVFKPMMIKNVLHSARLLGDASVSFTENCVVGIQANTERINKLMNESLMLVTALNPHIGYDKAAKIAKTAHKNGSTLKETAIELGYLTAEQFDEWVKPKDMLGPK

SEQ ID NO: 29268 - DNA, 1485 bp, Rhizopus oryzae
  CDS (1)..(1485)
atgttgcgagcttctgctaccagattcttaagtcaagctaaaaacatgaacaactctcctcgtcttttcagtagtgcctctgctgctttgcaaaaattccgtgctgagcgcgatacttttggtgatctccaagttcctgctgatagatattggggtgctcaaacccaaaggtctcttcaaaattttgacattggtggccctactgaacgtatgcccgaacctttgatccgtgcctttggtgtcctcaaaaaggctgctgctactgtcaacatgacttatggcttggatcctaaagttggtgaagctattcaaaaggctgctgacgaggtcattgatggaagcttgattgatcatttccctcttgttgtctggcaaactggttccggtactcaaaccaagatgaacgttaacgaagttatctccaaccgtgctattgaacttttgggtggtgagcttggtagtaaggctcctgttcatcccaacgatcatgtcaacatgagtcaatcatccaatgacacgttccctactgccatgcacgttgctgctgttgttgaaattcacggtcgacttattcctgctttgaccactttgcgtgatgcccttcaagccaaatccgctgagtttgaacacatcatcaagatcggtcgtactcacttgcaagatgcaactcctttgactctcggtcaagaattctctggttatactcaacaattgacttacggtattgctcgtgtacaaggtaccttggagcgcctctataaccttgctcaaggtggtactgctgttggtactggtcttaacaccagaaaaggtttcgatgccaaggtagctgaagctattgcttctattaccggtcttcctttcaagaccgcccctaataagtttgaagcccttgctgctcacgatgctctcgttgaagctcacggagctctcaataccgttgcttgttctcttatgaagatcgccaacgatatccgttatcttggttctggacctcgctgtggtcttggtgaactttccttgcctgaaaacgaacccggatcttctatcatgcccggtaaggttaatcctactcaatgtgaagctatgaccatggtctgtgctcaagtcatgggtaacaacactgctatttctgttgctggttccaatggtcaattcgagcttaatgtcttcaaacccgtcatgatcaagaacttgatccaatccattcgtcttatttctgatgcctctatttcattcaccaaaaactgtgttgttggtattgaagccaatgaaaagaagattagcagcattatgaatgagtcattgatgttggtcactgctcttaaccctcatattggttacgataaagctgctaaatgtgccaagaaggcccacaaggaaggcaccaccttgaaggaagctgccctttctcttggttacttgacttctgaagaattcgaccagtgggttagacccgaagatatgatctctgccaaggattaa

SEQ ID NO: 29269 - protein, 494 aa, Rhizopus oryzae [sequence omitted]

SEQ ID NO: 29270 - DNA, 23 bp, Artificial sequence
  Primer sequence
atgaatacagtacgcagcgaaaa

SEQ ID NO: 29271 - DNA, 23 bp, Artificial sequence
  Primer sequence
ttaacgcccggctttcatactgc

SEQ ID NO: 29272 - protein, 500 aa, Artificial sequence
  Consensus
  Variant (2)..(2): Xaa in position 2 is any amino acid
  Variant (4)..(4): Xaa in position 4 is any amino acid
  Variant (6)..(7): Xaa in position 6 to 7 is any amino acid
  Variant (9)..(11): Xaa in position 9 to 11 is any amino acid
  Variant (13)..(18): Xaa in position 13 to 18 is any amino acid
  Variant (23)..(23): Xaa in position 23 is any amino acid
  Variant (25)..(27): Xaa in position 25 to 27 is any amino acid
  Variant (30)..(30): Xaa in position 30 is any amino acid
  Variant (32)..(38): Xaa in position 32 to 38 is any amino acid
  Variant (40)..(44): Xaa in position 40 to 44 is any amino acid
  Variant (46)..(49): Xaa in position 46 to 49 is any amino acid
  Variant (51)..(52): Xaa in position 51 to 52 is any amino acid
  Variant (55)..(56): Xaa in position 55 to 56 is any amino acid
  Variant (58)..(60): Xaa in position 58 to 60 is any amino acid
  Variant (62)..(62): Xaa in position 62 is any amino acid
  Variant (64)..(78): Xaa in position 64 to 78 is any amino acid
  Variant (80)..(81): Xaa in position 80 to 81 is any amino acid
  Variant (83)..(88): Xaa in position 83 to 88 is any amino acid
  Variant (90)..(97): Xaa in position 90 to 97 is any amino acid
  Variant (100)..(103): Xaa in position 100 to 103 is any amino acid
  Variant (110)..(111): Xaa in position 110 to 111 is any amino acid
  Variant (115)..(115): Xaa in position 115 is any amino acid
  Variant (119)..(122): Xaa in position 119 to 122 is any amino acid
  Variant (124)..(138): Xaa in position 124 to 138 is any amino acid
  Variant (143)..(143): Xaa in position 143 is any amino acid
  Variant (146)..(147): Xaa in position 146 to 147 is any amino acid
  Variant (153)..(154): Xaa in position 153 to 154 is any amino acid
  Variant (158)..(169): Xaa in position 158 to 169 is any amino acid
  Variant (171)..(171): Xaa in position 171 is any amino acid
  Variant (173)..(176): Xaa in position 173 to 176 is any amino acid
  Variant (178)..(183): Xaa in position 178 to 183 is any amino acid
  Variant (185)..(194): Xaa in position 185 to 194 is any amino acid
  Variant (196)..(196): Xaa in position 196 is any amino acid
  Variant (202)..(202): Xaa in position 202 is any amino acid
  Variant (205)..(205): Xaa in position 205 is any amino acid
  Variant (207)..(207): Xaa in position 207 is any amino acid
  Variant (213)..(236): Xaa in position 213 to 236 is any amino acid
  Variant (238)..(239): Xaa in position 238 to 239 is any amino acid
  Variant (248)..(248): Xaa in position 248 is any amino acid
  Variant (250)..(265): Xaa in position 250 to 265 is any amino acid
  Variant (267)..(269): Xaa in position 267 to 269 is any amino acid
  Variant (271)..(275): Xaa in position 271 to 275 is any amino acid
  Variant (277)..(277): Xaa in position 277 is any amino acid
  Variant (279)..(291): Xaa in position 279 to 291 is any amino acid
  Variant (293)..(297): Xaa in position 293 to 297 is any amino acid
  Variant (299)..(300): Xaa in position 299 to 300 is any amino acid
  Variant (302)..(302): Xaa in position 302 is any amino acid
  Variant (308)..(308): Xaa in position 308 is any amino acid
  Variant (310)..(312): Xaa in position 310 to 312 is any amino acid
  Variant (316)..(317): Xaa in position 316 to 317 is any amino acid
  Variant (319)..(320): Xaa in position 319 to 320 is any amino acid
  Variant (322)..(324): Xaa in position 322 to 324 is any amino acid
  Variant (326)..(330): Xaa in position 326 to 330 is any amino acid
  Variant (343)..(345): Xaa in position 343 to 345 is any amino acid
  Variant (348)..(349): Xaa in position 348 to 349 is any amino acid
  Variant (351)..(353): Xaa in position 351 to 353 is any amino acid
  Variant (356)..(356): Xaa in position 356 is any amino acid
  Variant (359)..(369): Xaa in position 359 to 369 is any amino acid
  Variant (371)..(371): Xaa in position 371 is any amino acid
  Variant (373)..(373): Xaa in position 373 is any amino acid
  Variant (377)..(378): Xaa in position 377 to 378 is any amino acid
  Variant (380)..(383): Xaa in position 380 to 383 is any amino acid
  Variant (385)..(385): Xaa in position 385 is any amino acid
  Variant (387)..(387): Xaa in position 387 is any amino acid
  Variant (389)..(390): Xaa in position 389 to 390 is any amino acid
  Variant (393)..(418): Xaa in position 393 to 418 is any amino acid
  Variant (420)..(425): Xaa in position 420 to 425 is any amino acid
  Variant (427)..(440): Xaa in position 427 to 440 is any amino acid
  Variant (442)..(443): Xaa in position 442 to 443 is any amino acid
  Variant (447)..(447): Xaa in position 447 is any amino acid
  Variant (449)..(451): Xaa in position 449 to 451 is any amino acid
  Variant (455)..(456): Xaa in position 455 to 456 is any amino acid
  Variant (459)..(460): Xaa in position 459 to 460 is any amino acid
  Variant (463)..(463): Xaa in position 463 is any amino acid
  Variant (465)..(496): Xaa in position 465 to 496 is any amino acid
  Variant (498)..(499): Xaa in position 498 to 499 is any amino acid
RXEXDXXGXXXVXXXXXXGAQTXRXXXNFXIXXXXXXXPXXXXXAXXXXKXXAAXXNXXXGXLXXXXXXXXXXXXXXXIXXAXXXXXXGXXXXXXXXFPXXXXQTGSGTXXNMNXNEVXXXXAXXXXXXXXXXXXXXXHPNDXVNXXQSSNDXXPTAXXXXXXXXXXXXLXPXXXXLXXXXXXKXXXXXXXXXXKXGRTHLXDAXPXTLGQEXXXXXXXXXXXXXXXXXXXXXXXXLXXGGTAVGTGXNXXXXXXXXXXXXXXXXTXXXFXXXXXNXFXXXXXXXXXXXXXGXXXXXAXXLXKIANDXRXXXSGPXXGXXEXXXPXXXXXPGSSIMPGKVNPXXXEAXXMXXXQVXGNXXXXXXXXXXXGXFXLNVXXPXXXXNXLXSXXLLXXXXXXXXXXXXXXXXXXXXXXXXXXFXXXXXXGXXXXXXXXXXXXXXSXXLVTXLXXXIGYXXAAXXAKXAXXXXXXXXXXXXXXXXXXXXXXXXXXXXXXXXPXXM

SEQ ID NO: 29273 - protein, 64 aa, Artificial sequence
  Consensus
  Variant (1)..(1): Xaa in position 1 is Phe, Ile, Tyr or Val
  Variant (2)..(2): Xaa in position 2 is Pro, Val or Tyr
  Variant (3)..(3): Xaa in position 3 is Leu, Val or Ile
  Variant (4)..(4): Xaa in position 4 is any amino acid
  Variant (5)..(5): Xaa in position 5 is Val, Ile, Met, Thr or Leu
  Variant (6)..(6): Xaa in position 6 is Trp, Phe, Tyr or Leu
  Variant (8)..(8): Xaa in position 8 is Thr, Ala or Gly
  Variant (10)..(10): Xaa in position 10 is Ser or Ala
  Variant (13)..(13): Xaa in position 13 is Gln, Ser, Gly or His
  Variant (14)..(14): Xaa in position 14 is Ser, Thr, Leu, Phe or Tyr
  Variant (18)..(18): Xaa in position 18 is any amino acid
  Variant (20)..(20): Xaa in position 20 is Glu or Asp
  Variant (22)..(22): Xaa in position 22 is Ile, Leu or Val
  Variant (23)..(23): Xaa in position 23 is Ala or Ser
  Variant (24)..(25): Xaa in position 24 to 25 is any amino acid
  Variant (26)..(26): Xaa in position 26 is Ala or Gly
  Variant (27)..(32): Xaa in position 27 to 32 is any amino acid
  Variant (33)..(40): Xaa in position 33 to 40 is any or no amino acid
  Variant (41)..(41): Xaa in position 41 is Val, Ile or Leu
  Variant (42)..(42): Xaa in position 42 is any amino acid
  Variant (45)..(45): Xaa in position 45 is Asp, Asn or Glu
  Variant (46)..(46): Xaa in position 46 is His, Asp or Glu
  Variant (47)..(47): Xaa in position 47 is Val, Cys or Ile
  Variant (49)..(49): Xaa in position 49 is any amino acid
  Variant (50)..(50): Xaa in position 50 is Ser, Gly, Ala or Cys
  Variant (51)..(51): Xaa in position 51 is Gln or Ala
  Variant (53)..(53): Xaa in position 53 is Ser or Thr
  Variant (56)..(56): Xaa in position 56 is any amino acid
  Variant (57)..(57): Xaa in position 57 is Phe, Tyr, Val or Ile
  Variant (59)..(59): Xaa in position 59 is Thr, Ser or Ala
  Variant (60)..(60): Xaa in position 60 is Ala, Val, Thr, Met or Ser
  Variant (61)..(61): Xaa in position 61 is Met, Ile, Thr, Leu or Val
  Variant (62)..(62): Xaa in position 62 is any amino acid
  Variant (63)..(63): Xaa in position 63 is Ile, Val or Leu
  Variant (64)..(64): Xaa in position 64 is Ala, Ser, Thr or Val
XXXXXXQXGXGTXXNMNXNXVXXXXXXXXXXXXXXXXXXXXXPNXXXNXXXSXNDXXPXXXXXX

SEQ ID NO: 29274 - protein, 55 aa, Artificial sequence
  Consensus
  Variant (2)..(2): Xaa in position 2 is any amino acid
  Variant (7)..(7): Xaa in position 7 is Leu, Thr, Met or Phe
  Variant (8)..(8): Xaa in position 8 is Gln, Met, Arg or Glu
  Variant (11)..(11): Xaa in position 11 is any amino acid
  Variant (13)..(13): Xaa in position 13 is Leu, Val, Ile or Met
  Variant (14)..(14): Xaa in position 14 is Thr, Arg or Ser
  Variant (15)..(15): Xaa in position 15 is Leu, Phe, Met or Val
  Variant (16)..(16): Xaa in position 16 is Gly, Ala, Ser or Lys
  Variant (17)..(17): Xaa in position 17 is Gln, Asp or Leu
  Variant (18)..(18): Xaa in position 18 is Glu or Val
  Variant (19)..(20): Xaa in position 19 to 20 is any amino acid
  Variant (21)..(21): Xaa in position 21 is Gly, Ala, Ser or Thr
  Variant (22)..(22): Xaa in position 22 is Tyr, Trp or Phe
  Variant (23)..(24): Xaa in position 23 to 24 is any amino acid
  Variant (25)..(25): Xaa in position 25 is Gln, Met, Ala, Cys or Arg
  Variant (26)..(26): Xaa in position 26 is Leu, Ile, Val, Phe or Met
  Variant (27)..(32): Xaa in position 27 to 32 is any amino acid
  Variant (33)..(33): Xaa in position 33 is Ile, Leu, Val or Ala
  Variant (34)..(39): Xaa in position 34 to 39 is any amino acid
  Variant (40)..(40): Xaa in position 40 is Leu, Val, Ile or Met
  Variant (41)..(42): Xaa in position 41 to 42 is any amino acid
  Variant (43)..(43): Xaa in position 43 is Leu, Ile or Val
  Variant (44)..(44): Xaa in position 44 is Ala, Pro, Asn or Ser
  Variant (45)..(45): Xaa in position 45 is any amino acid
  Variant (46)..(47): Xaa in position 46 to 47 is Gly or Ala
  Variant (49)..(49): Xaa in position 49 is Ala or Ser
  Variant (50)..(50): Xaa in position 50 is Val, Ile, Ala or Thr
  Variant (52)..(52): Xaa in position 52 is Thr, Ser or Asn
  Variant (53)..(53): Xaa in position 53 is Gly or Lys
  Variant (54)..(54): Xaa in position 54 is any amino acid
  Variant (55)..(55): Xaa in position 55 is Asn, Ser, Asp or Gly
KXGRTHXXDAXPXXXXXXXXXXXXXXXXXXXXXXXXXXXXXXXXXXXTXXGXXXX

SEQ ID NO: 29275 - protein, 101 aa, Artificial sequence
  Consensus
  Variant (1)..(1): Xaa in position 1 is Gly, Ala, Asn or Ser
  Variant (2)..(5): Xaa in position 2 to 5 is any amino acid
  Variant (6)..(6): Xaa in position 6 is Leu, Ile, Val, Ala or Thr
  Variant (7)..(7): Xaa in position 7 is Ala, Ser or Gly
  Variant (8)..(9): Xaa in position 8 to 9 is any amino acid
  Variant (10)..(10): Xaa in position 10 is Leu, Ile, Met, Val or Phe
  Variant (11)..(11): Xaa in position 11 is any amino acid
  Variant (12)..(12): Xaa in position 12 is Lys or Arg
  Variant (13)..(13): Xaa in position 13 is Ile, Leu, Val or Met
  Variant (14)..(14): Xaa in position 14 is Ala, Gly, Ser or Cys
  Variant (15)..(15): Xaa in position 15 is Asn or Gln
  Variant (17)..(17): Xaa in position 17 is Ile, Leu, Val or Met
  Variant (18)..(18): Xaa in position 18 is Arg or Lys
  Variant (19)..(19): Xaa in position 19 is Trp, Leu, Phe, Tyr or Ile
  Variant (20)..(20): Xaa in position 20 is Leu or Met
  Variant (21)..(21): Xaa in position 21 is any amino acid
  Variant (22)..(22): Xaa in position 22 is Ser, Ala or Cys
  Variant (25)..(26): Xaa in position 25 to 26 is any amino acid
  Variant (27)..(27): Xaa in position 27 is Gly or Ala
  Variant (28)..(28): Xaa in position 28 is Leu, Ile, Phe or Tyr
  Variant (29)..(29): Xaa in position 29 is any amino acid
  Variant (31)..(31): Xaa in position 31 is Ile, Leu or Val
  Variant (32)..(32): Xaa in position 32 is any amino acid
  Variant (33)..(33): Xaa in position 33 is Leu, Ile or Phe
  Variant (34)..(34): Xaa in position 34 is Pro, Gln or Glu
  Variant (35)..(36): Xaa in position 35 to 36 is any amino acid
  Variant (37)..(38): Xaa in position 37 to 38 is any or no amino acid
  Variant (39)..(39): Xaa in position 39 is Glu, Gln, Ile or Val
  Variant (40)..(40): Xaa in position 40 is Pro, Gln or Ala
  Variant (44)..(44): Xaa in position 44 is Ile, Ala or Met
  Variant (49)..(49): Xaa in position 49 is Val, Ile or Thr
  Variant (52)..(52): Xaa in position 52 is Thr, Val or Ser
  Variant (53)..(54): Xaa in position 53 to 54 is any amino acid
  Variant (56)..(56): Xaa in position 56 is Ala, Ser, Thr or Met
  Variant (57)..(58): Xaa in position 57 to 58 is any amino acid
  Variant (59)..(59): Xaa in position 59 is Met, Gln, Leu or Trp
  Variant (60)..(60): Xaa in position 60 is Val, Leu, Ile, Ala or Ser
  Variant (61)..(63): Xaa in position 61 to 63 is any amino acid
  Variant (64)..(64): Xaa in position 64 is Val or Ile
  Variant (65)..(65): Xaa in position 65 is any amino acid
  Variant (66)..(66): Xaa in position 66 is Gly or Ala
  Variant (67)..(73): Xaa in position 67 to 73 is any amino acid
  Variant (74)..(74): Xaa in position 74 is Ala, Gly or Ser
  Variant (75)..(75): Xaa in position 75 is Gly, Ala, Ser or Val
  Variant (76)..(77): Xaa in position 76 to 77 is any amino acid
  Variant (78)..(78): Xaa in position 78 is any or no amino acid
  Variant (80)..(80): Xaa in position 80 is any amino acid
  Variant (81)..(81): Xaa in position 81 is Phe, Leu or Ile
  Variant (82)..(82): Xaa in position 82 is Glu, Gln or Asp
  Variant (83)..(83): Xaa in position 83 is Leu or Met
  Variant (84)..(84): Xaa in position 84 is Asn, Ala or Ser
  Variant (85)..(87): Xaa in position 85 to 87 is any amino acid
  Variant (89)..(89): Xaa in position 89 is Val, Leu, Met, Asn or Ile
  Variant (90)..(94): Xaa in position 90 to 94 is any amino acid
  Variant (95)..(95): Xaa in position 95 is Leu, Ile, Val, Thr or Phe
  Variant (96)..(96): Xaa in position 96 is any amino acid
  Variant (97)..(97): Xaa in position 97 is Ser, Gln, Thr or Gly
  Variant (98)..(100): Xaa in position 98 to 100 is any amino acid
  Variant (101)..(101): Xaa in position 101 is Leu, Ile, Met or Val
XXXXXXXXXXXXXXXDXXXXXXGPXXXXXEXXXXXXXXXXGSSXMPGKXNPXXXEXXXXXXXXXXXXXXXXXXXXXXXGXXXXXXXXPXXXXXXXXXXXXX

SEQ ID NO: 29276 - DNA, 1110 bp, Escherichia coli K12
  CDS (1)..(1110): transl_table=11
atgaaatcgggccgctttattggcgttatgtcaggcaccagccttgatggtgttgatgttgtgttggcgacaattgatgaacaccgggtcgcacagctggcaagtttgagttggccgatcccggtatctctgaaacaggctgtactggatatttgccagggccagcagcttacactttcgcagtttggacagcttgatactcaactcgggcaactttttgctgatgcggtcaatgccttgcttaaggaacaaaatctgcaggcaagagatatagttgcgatcggttgtcacggtcaaaccgtctggcatgaaccgacgggcgtggcaccacacactttacagattggcgataacaatcaaattgtggcacgcaccggaattacggttgtcggtgattttcgccgtcgcgatattgccttgggaggacaaggcgcaccgctggtacctgcgttccatcatgcgctgctggctcacccaaccgagcgacgaatggtgctcaatattggcggcatcgccaatctgtcactgctcattcctgggcagccggttgggggctacgataccggtcctggtaacatgctgatggatgcctggatctggcgtcaggccggtaaaccttacgataaagatgccgagtgggcacgggcgggtaaagttattctcccactgctgcaaaatatgctcagcgacccgtatttctcgcaacctgcaccgaaaagcaccggacgcgaatactttaactatggttggctggagcgccatttgcgccattttccgggtgttgatccccgagatgtgcaggcgacactggcagaactcaccgccgtgaccatttctgaacaagttttgttgagcggtggctgcgaacgattgatggtatgtggtggaggtagtcgtaatccgctactcatggcgcgtctggcggcattactgccaggcacagaagtcaccaccaccgatgccgttggcattagtggcgatgacatggaagcattggctttcgcctggcttgcctggcggacgctggcgggattaccaggaaatctgccttccgtcactggcgcaagccaggagacggtactgggggctattttccccgctaacccgtga

SEQ ID NO: 29277 - protein, 369 aa, Escherichia coli K12
MKSGRFIGVMSGTSLDGVDVVLATIDEHRVAQLASLSWPIPVSLKQAVLDICQGQQLTLSQFGQLDTQLGQLFADAVNALLKEQNLQARDIVAIGCHGQTVWHEPTGVAPHTLQIGDNNQIVARTGITVVGDFRRRDIALGGQGAPLVPAFHHALLAHPTERRMVLNIGGIANLSLLIPGQPVGGYDTGPGNMLMDAWIWRQAGKPYDKDAEWARAGKVILPLLQNMLSDPYFSQPAPKSTGREYFNYGWLERHLRHFPGVDPRDVQATLAELTAVTISEQVLLSGGCERLMVCGGGSRNPLLMARLAALLPGTEVTTTDAVGISGDDMEALAFAWLAWRTLAGLPGNLPSVTGASQETVLGAIFPANP

SEQ ID NO: 29278 - DNA, 1116 bp, Mesorhizobium loti MAFF303099
  CDS (1)..(1116): transl_table=11
atggaaccaatctgggccgtcggcctgatgaccggcaccgtgcttgacggcaatatcgacgtcgcgctgatcaagaccgatggcgagcgcatcgacgatttcggcacctaccggctgatgccctatccccaatcgatccgctcgctgctggaagagacgctgacggcggcgcgggcctggaattttgtcgggccggagccggcgatcttccgcaaggccgaggaggcgctgacgcgtgcccagtcggcggcggtgaaggaattggtcgagggctatggcatgacgatggccgatatcggcgtcgtcggctttcacggccagacggtgctgcatcgcgcgccgcaggtggggcggctcggccagaccagacagctgggtgacggcgagctgatgcattccctgttgagcacgaaggtcgcctatgatttccgctcggccgacatgcgcgccggcgggcaaggcgcgcctctggccgcagcctatcacaccgcgttgatgcgcagcgccggcgccagtggcgaggtggccgtgctcaatctcggcggcgtcgccaacatcacctggtgggacggcgccgacaatgtcgtcgccttcgacaccggccccgccaacgcgccgctcaacgatttcatcaaatcgaagggcctcggcgacatggatcgtgacggcgcgcttggccgtgcgggaacagtcgacgaggcccggctcgccaagctgctgcagcacccttatctgaccaagccctatcccaaatcgctggaccgtttcgatttcggcgccgccatggcggatggcctcaatgccgaggatggcgcggccctgctcaccgccttcacggccggcgccgttggcaaggcgctcgacctcttgcccactcggccgaagaaattggtggtcagcggcggcggccgccacaacccgacgatgatggcgatgctcgccagccgtgccggagtcgaagtggtgcaggcggaaagcctcggctggagcggcgacgcggtggaggcagagtgctttgccttcctcgcggtgcgcgtgctgcgcggcatgccgatcagttttccaagcaccaccggcgcgccgcagccgatgcgcggcggaaagctggcaggttaa

SEQ ID NO: 29279 - protein, 371 aa, Mesorhizobium loti MAFF303099
MEPIWAVGLMTGTVLDGNIDVALIKTDGERIDDFGTYRLMPYPQSIRSLLEETLTAARAWNFVGPEPAIFRKAEEALTRAQSAAVKELVEGYGMTMADIGVVGFHGQTVLHRAPQVGRLGQTRQLGDGELMHSLLSTKVAYDFRSADMRAGGQGAPLAAAYHTALMRSAGASGEVAVLNLGGVANITWWDGADNVVAFDTGPANAPLNDFIKSKGLGDMDRDGALGRAGTVDEARLAKLLQHPYLTKPYPKSLDRFDFGAAMADGLNAEDGAALLTAFTAGAVGKALDLLPTRPKKLVVSGGGRHNPTMMAMLASRAGVEVVQAESLGWSGDAVEAECFAFLAVRVLRGMPISFPSTTGAPQPMRGGKLAG

SEQ ID NO: 29280 - DNA, 1113 bp, Vibrio cholerae O1 biovar eltor str. N16961
  CDS (1)..(1113): transl_table=11
atggcagaacgcgaactctatatcggtgtgatgtcgggaaccagtttggatggtgtggataccgctttagtggcgctgcaagacgataacatcgaactgctggctcaccacgactaccctattcctgccgacctcaagcagcggctgctcaatgtctgcatcggccagccaaccaccttgattgcgatgggtgaattggagcacgatctggggcatttgttcagtgatgcggtgctggcgcttttgcagcacagtggctatcgcgccgagcacatccgtgcgatcggctgtcatggacaaaccgtgttccatcagcctaccggcaccaaaccttttaccatgcaaattggcgatgccaacattatcgctacgcgcacaggcattacgactgtcgccgattttcggcgcaaagatgttgcgctcggagggcaaggcgcaccgttagttcccgcgtttcatcgcacgatttttcatgctgagcaatcgaccgtggtcgtgctcaatatcggggggattgctaatatttcggtgctcaagcccaatggtgaagtggtgggctatgacaccggccctggcaatatgctgatggatagctggtgccaaaaagaacgtaaccagccttacgataaagatgccctgtgggccaaacaaggcagcgtgaatgccgcattacttagccatttaaaacaagaccattactttgctctgccagcacccaaaagcacaggccgcgagctgtttaatctgccttggttagaaacgcagctcgccacgttttcggttgatgccaccgatgtgcaacgcaccttgtgtgaattcactgcgcaaaccattgttgagcaagtcgcaccattcgccgaagggccacaaccacagcttttagtgtgtggcggcggtgcgcaaaatcctttactcatggaacgcttacaagccttgctgccaagctggcaagttgccccgaccacccaaatgggcgtggatggcgataatatggaagccatggctttcgcttggctggcacaacggcgtatacacggtttacccagtaatttgcccgccgtgacgggcgcatcacgtcttgcgagtcttggcgtgatttactaccccgattaa

SEQ ID NO: 29281 - protein, 370 aa, Vibrio cholerae O1 biovar eltor str. N16961
MAERELYIGVMSGTSLDGVDTALVALQDDNIELLAHHDYPIPADLKQRLLNVCIGQPTTLIAMGELEHDLGHLFSDAVLALLQHSGYRAEHIRAIGCHGQTVFHQPTGTKPFTMQIGDANIIATRTGITTVADFRRKDVALGGQGAPLVPAFHRTIFHAEQSTVVVLNIGGIANISVLKPNGEVVGYDTGPGNMLMDSWCQKERNQPYDKDALWAKQGSVNAALLSHLKQDHYFALPAPKSTGRELFNLPWLETQLATFSVDATDVQRTLCEFTAQTIVEQVAPFAEGPQPQLLVCGGGAQNPLLMERLQALLPSWQVAPTTQMGVDGDNMEAMAFAWLAQRRIHGLPSNLPAVTGASRLASLGVIYYPD

SEQ ID NO: 29282 - DNA, 1134 bp, Pasteurella multocida subsp. multocida str. Pm70
  CDS (1)..(1134): transl_table=11
atgaaggaggcaactatgtactatatcggggtcatgtcaggcaccagtttagacggagtggatctggcattaatggatttttcctgtgcgcaaccacaacttatccatgcagatttttaccctatgccacccgcaatacggcaacagatttcaacattatgtaattcgggcacaactactttacaagccttaggtgagttagatcaccaactgggtttactctataccgattgcattcaacaattcttacaaaaacatcggctttcacctgaacagatcaccgccattggttgccacggacaaaccgtttggcattccccaaacagccactatccatttacgatgcaaattggcgatgctaacctgatcgcagcgaaaacgggcattaccacggtggcggattttcgccgtaaagatatggcatttggtggacaaggtgcgccactggtgccggcttttcatcaagccttatttcggaaaccgaatcaagcgaccgtggtgttaaatgtcggtggcatcagcaatatttctcgcttactaccaaatgaagaagttattggctatgacacgggaccgggtaataccttgctcgatgcgtggatcgaaaaacatcaaggcaaagcctatgataaaaatgcagaatgggcgaaatcaggtaaagtaaatacggacttacttgctgatttactcgatgaaccgttcttcgcccttcccgcaccaaaaagcacaggacgcgaattattcaatctggcttggctaaacaaaaaattgcaaaaacacaccgcacttttgccacaagatgtccaagcaactttagtggaactcaccgcacaaagtattgtggatcagcttaaccaaattgaaacggaattagatcgccatttattagtgtgtggtggcggggtgaaaaattgtctcttaatggcacgtctcaccgccttattgccacaatggcaagtgcaaaccaccaatgactacggcttagatgccgattatgtggaagccgccgcttttgcgtggctcgcctatcaacgcctcaatgacctcccgggcaatttaccgagcgtaacaggagcaaaaagtgcggtcagtttaggggcaatttatccgaaggaaaaggatgtggcagcataa

SEQ ID NO: 29283 - protein, 377 aa, Pasteurella multocida subsp. multocida str. Pm70
MKEATMYYIGVMSGTSLDGVDLALMDFSCAQPQLIHADFYPMPPAIRQQISTLCNSGTTTLQALGELDHQLGLLYTDCIQQFLQKHRLSPEQITAIGCHGQTVWHSPNSHYPFTMQIGDANLIAAKTGITTVADFRRKDMAFGGQGAPLVPAFHQALFRKPNQATVVLNVGGISNISRLLPNEEVIGYDTGPGNTLLDAWIEKHQGKAYDKNAEWAKSGKVNTDLLADLLDEPFFALPAPKSTGRELFNLAWLNKKLQKHTALLPQDVQATLVELTAQSIVDQLNQIETELDRHLLVCGGGVKNCLLMARLTALLPQWQVQTTNDYGLDADYVEAAAFAWLAYQRLNDLPGNLPSVTGAKSAVSLGAIYPKEKDVAA

SEQ ID NO: 29284 - DNA, 1092 bp, Pseudomonas aeruginosa PAO1
  CDS (1)..(1092): transl_table=11
gtgccgcgctacctggggttgatgtccggaaccagcctggacggcatggacatcgtcctgatcgagcaaggtgatcgcaccaccttgctcgcttcccattacctacccatgccggccgggctgcgcgaagacatcctcgccctgtgcgtccccggtcccgatgaaatcgcccgcgccgccgaagtcgagcaacgctgggtcgcccttgcagcacagggcgtgcgcgaactgctgctccagcagcagatgagccccgacgaagtccgtgccatcggcagtcatggtcaaaccatccggcatgaacccgctcgccacttcacggtgcagatcggcaaccccgccctgctggcggagctgaccggcatcgatgtcgtcgccgacttccgccgccgtgacgtcgcagccggcggccagggcgccccgctggtaccggccttccatcaggcgctgtttggcgatgatgacacctccagggcggtcctgaacatcggtggcttcagcaacgtttcgctgctcagccccggaaagccggtacgcggcttcgactgcggcccgggcaacgtgctgatggacgcctggattcatcaccagcgcggtgaacatttcgaccgggacggtgcgtgggccgccagcggccaggtgaaccacgcactgctggcaagcctgctggcggatgaattcttcgccgcgcgtggccccaagagcaccgggcgcgagcgcttcaacctgccctggctgcaggagcacctggctcgtcaccctgccttgccggcagcggatatccaggcaaccctgctggaactgagcgcgcgcagcatcagcgaatcgctgctggacgcccagccggactgcgaagaggtgctggtatgcggcggcggcgccttcaatacggcgctgatgaagcgcctggccatgctgatgcccgaagctcgggtcgccagtaccgacgaatacggcattccccctgcctggatggagggcatggcattcgcctggctagcccatcggtttctcgagcgcctgcccggcaactgccctgatgtgaccggtgcgctcggtcccagaactctgggcgcgctgtatcccgcctga

SEQ ID NO: 29285 - protein, 363 aa, Pseudomonas aeruginosa PAO1
MPRYLGLMSGTSLDGMDIVLIEQGDRTTLLASHYLPMPAGLREDILALCVPGPDEIARAAEVEQRWVALAAQGVRELLLQQQMSPDEVRAIGSHGQTIRHEPARHFTVQIGNPALLAELTGIDVVADFRRRDVAAGGQGAPLVPAFHQALFGDDDTSRAVLNIGGFSNVSLLSPGKPVRGFDCGPGNVLMDAWIHHQRGEHFDRDGAWAASGQVNHALLASLLADEFFAARGPKSTGRERFNLPWLQEHLARHPALPAADIQATLLELSARSISESLLDAQPDCEEVLVCGGGAFNTALMKRLAMLMPEARVASTDEYGIPPAWMEGMAFAWLAHRFLERLPGNCPDVTGALGPRTLGALYPA

SEQ ID NO: 29286 - DNA, 1131 bp, Neisseria meningitidis MC58
  CDS (1)..(1131): transl_table=11
atggcgttttgcaccagtttgggagtgatgatggaaacacagctttacatcggcatcatgtcgggaaccagcatggacggggcggatgccgtactgatacggatggacggcggcaaatggctgggcgcggaagggcacgcctttaccccctaccccggcaggttacgccgccaattgctggatttgcaggacacaggcgcagacgaactgcaccgcagcaggattttgtcgcaagaactcagccgcctatatgcgcaaaccgccgccgaactgctgtgcagtcaaaacctcgcaccgtccgacattaccgccctcggctgccacgggcaaaccgtccgacacgcgccggaacacggttacagcatacagcttgccgatttgccgctgctggcggaacggacgcggatttttaccgtcggcgacttccgcagccgcgaccttgcggccggcggacaaggcgcgccactcgtccccgcctttcacgaagccctgttccgcgacaacagggaaacacgcgcggtactgaacatcggcgggattgccaacatcagcgtactcccccccgacgcacccgccttcggcttcgacacagggccgggcaatatgctgatggacgcgtggacgcaggcacactggcagcttccttacgacaaaaacggtgcaaaggcggcacaaggcaacatattgccgcaactgctcgacaggctgctcgcccacccgtatttcgcacaaccccaccctaaaagcacggggcgcgaactgtttgccctaaattggctcgaaacctaccttgacggcggcgaaaaccgatacgacgtattgcggacgctttcccgttttaccgcgcaaaccgtttgcgacgccgtctcacacgcagcggcagatgcccgtcaaatgtacatttgcggcggcggcatccgcaatcctgttttaatggcggatttggcagaatgtttcggcacacgcgtttccctgcacagcaccgccgacctgaacctcgatccgcaatgggtggaagccgccgcatttgcgtggttggcggcgtgttggattaatcgcattcccggtagtccgcacaaagcaaccggcgcatccaaaccgtgtattctgggcgcgggatattattattga

SEQ ID NO: 29287 - protein, 376 aa, Neisseria meningitidis MC58
MAFCTSLGVMMETQLYIGIMSGTSMDGADAVLIRMDGGKWLGAEGHAFTPYPGRLRRQLLDLQDTGADELHRSRILSQELSRLYAQTAAELLCSQNLAPSDITALGCHGQTVRHAPEHGYSIQLADLPLLAERTRIFTVGDFRSRDLAAGGQGAPLVPAFHEALFRDNRETRAVLNIGGIANISVLPPDAPAFGFDTGPGNMLMDAWTQAHWQLPYDKNGAKAAQGNILPQLLDRLLAHPYFAQPHPKSTGRELFALNWLETYLDGGENRYDVLRTLSRFTAQTVCDAVSHAAADARQMYICGGGIRNPVLMADLAECFGTRVSLHSTADLNLDPQWVEAAAFAWLAACWINRIPGSPHKATGASKPCILGAGYYY

SEQ ID NO: 29288 - DNA, 1104 bp, Neisseria meningitidis Z2491
  CDS (1)..(1104): transl_table=11
atgatggaaacacagctttacatcggcatcatgtcgggaaccagcatggacggggcggatgccgtactgatacggatggacggcggcaaatggctgggcgcggaagggcacgcctttaccccctaccccggcaggttacgccgcaaattgctggatttgcaggacacaggcgcggacgaactgcaccgcagcaggatgttgtcgcaagaactcagccgcctgtacgcgcaaaccgccgccgaactgctgtgcagtcaaaacctcgcgccgtccgacattaccgccctcggctgccacgggcaaaccgtcagacacgcgccggaacacagttacagcgtacagcttgccgatttgccgctgctggcggaacggactcagatttttaccgtcggcgacttccgcagccgcgaccttgcggccggcggacaaggcgcgccgctcgtccccgcctttcacgaagccctgttccgcgacgacagggaaacacgcgcggtactgaacatcggcgggattgccaacatcagcgtactcccccccgacgcacccgccttcggcttcgacacaggaccgggcaatatgctgatggacgcgtggatgcaggcacactggcagcttccttacgacaaaaacggtgcaaaggcggcacaaggcaacatattgccgcaactgctcgacaggctgctcgcccacccgtatttcgcacaaccccaccctaaaagcacggggcgcgaactgtttgccctaaattggctcgaaacctaccttgacggcggcgaaaaccgatacgacgtattgcggacgctttcccgattcaccgcgcaaaccgttttcgacgccgtctcacacgcagcggcagatgcccgtcaaatgtacatttgcggcggcggcatccgcaatcctgttttaatggcggatttggcagaatgtttcggcacacgcgtttccctgcacagcaccgccgaactgaacctcgatccgcaatgggtagaagccgccgcgttcgcatggatggcggcgtgttgggtcaaccgcattcccggtagtccgcacaaagcaaccggcgcatccaaaccgtgtattctgggcgcgggatattattattga

SEQ ID NO: 29289 - protein, 367 aa, Neisseria meningitidis Z2491
MMETQLYIGIMSGTSMDGADAVLIRMDGGKWLGAEGHAFTPYPGRLRRKLLDLQDTGADELHRSRMLSQELSRLYAQTAAELLCSQNLAPSDITALGCHGQTVRHAPEHSYSVQLADLPLLAERTQIFTVGDFRSRDLAAGGQGAPLVPAFHEALFRDDRETRAVLNIGGIANISVLPPDAPAFGFDTGPGNMLMDAWMQAHWQLPYDKNGAKAAQGNILPQLLDRLLAHPYFAQPHPKSTGRELFALNWLETYLDGGENRYDVLRTLSRFTAQTVFDAVSHAAADARQMYICGGGIRNPVLMADLAECFGTRVSLHSTAELNLDPQWVEAAAFAWMAACWVNRIPGSPHKATGASKPCILGAGYYY

SEQ ID NO: 29290 - DNA, 1146 bp, Xylella fastidiosa 9a5c
  CDS (1)..(1146): transl_table=11
atgcgtgtgcatgatgatccctgcaatccaaatccagcacctctctacctcggtctcatgtccggcaccagcgtcgacggcatcgacgcagcgttggtacggattaacgcaaacgcgataacacattgtgagctgattgccgcgcaaacctccgcttgggaccctaacctacgcacgacattgttggaactaagccaaggacagaacacagcatcccttgaccaactaggctggctcgacgcccaagtcggactggccttcgccacagcggctaatacactgatcgcaaaaacgggcataaagcacacacagatacgtgcgattggctctcatggccagaccatacgccaccgcccacacggcgatctacccttcacttggcaattaggcgatgcccaccggatcgccgaactcactggaatcactaccgtcgcagacttccgccgccgtgacgtggctgccggcggccaaggcgcaccactcatgcccgctttccatctagcgatccttggatcggccaatgaaaaccgagcagtgctgaacttaggcgggattgcaaacttgacactgatcccgatgaccggcccagtactcggcttcgacaccggaccagcgaacgcactgctcgacagctggtatcaacgccatcatcacgagacattcgatcaaagcggtaacttcgccgcaagcggcaaaatcaaccagaagttactggcctgcctgctagccgacccttggttcaccctcccccctcccaaaagcacagggcgcgaacaattccatttggactgggtgaccaaacaactagaacctacaccaccatcaccagccgatgtgcaggcaacactgctcgaactgaccgcagtcaccgtagcagatgccctactacgccaacaacccaagacgaatcggctactgatatgcggtggcggtgcgcataacccagtattgatggcacgcctggccgcacacctacccaacgtaacagtggaatcgattcaaacctatggactcaatccggactatctggaagcaatggggtttgcttggctggctgcacaaacattggacggccaaccaggtaacctgccaagcgtcactggcgcacgcggcctgcgtttgctcggcgcaatccacccagcctga

SEQ ID NO: 29291 - protein, 381 aa, Xylella fastidiosa 9a5c
MRVHDDPCNPNPAPLYLGLMSGTSVDGIDAALVRINANAITHCELIAAQTSAWDPNLRTTLLELSQGQNTASLDQLGWLDAQVGLAFATAANTLIAKTGIKHTQIRAIGSHGQTIRHRPHGDLPFTWQLGDAHRIAELTGITTVADFRRRDVAAGGQGAPLMPAFHLAILGSANENRAVLNLGGIANLTLIPMTGPVLGFDTGPANALLDSWYQRHHHETFDQSGNFAASGKINQKLLACLLADPWFTLPPPKSTGREQFHLDWVTKQLEPTPPSPADVQATLLELTAVTVADALLRQQPKTNRLLICGGGAHNPVLMARLAAHLPNVTVESIQTYGLNPDYLEAMGFAWLAAQTLDGQPGNLPSVTGARGLRLLGAIHPA

SEQ ID NO: 29292 - DNA, 1152 bp, Sinorhizobium meliloti 1021
  CDS (1)..(1152): transl_table=11
atgggcagagtattgacggcgatcggactgatgagcggcacgagcatggacggcatagatatcgcagtcgtgcgaaccgacggcgacagcatcgtcgatcgcggcccgtctgccggatatgcctatgatccgcggttccgggagcgcctgaaacagggcctcgaagacgcccggtcgattctcaaacgagaagagcggccgggtaccctcgcagacctcgagcgcgacctgacgctgcggcacgcactcgcggttcggatgtttctccaggaaaacaatattttgccggataatgttaatgtaataggttttcacggacaaaccgtcctgcatcgccctgatcaagcgttgacggtacagcttggcgatggcgagctgctggcgcgggaaaccgggatcgacgtggtctacgacatgcgggccaatgacatgacccatggaggccagggcgcacccctcattcccgcctatcacgccgccctggcgcgcggtctctccaaagtcggggagattgccactcccgtcgtcttcgtcaatatcggcggcatttccaatctcacctacataggcgcaggcgaagaaatcgtcgcctatgacagcggacccggcaatacgctgatcgatcaatgggtggaggctcacgccggtattccctacgaccagggcggcatgatcgcgagcgagggcggcgtcctgcgggaactcgccgaccgttatctttctcacccgtttttcagcgccgagaaacgccgctcgctcgaccgtaacgatttcgcgccgccggcggcaggcgatgccagcctcgaggatggggcgcgtaccctcgctcatgtaacggccgccggcatcgtccggtccgcgcgccatcttccggcaaatccggcaacctacattgtctgcggcggcggccgcctgaattccgtcatcatgagcgaccttcacgcgcttgccgaagcggagggcgcgcgcgtgcttgccgcagaagcgctggatctgaacggcgattcgatggaagccgaggcctgggcctatctcgccgtgagatcgcgatactgcctgcctttgacctatcctggaacgacgggcgtcagctgtccggtaagcgggggtaggctcgcggcaaagccggggcggattgcggccgtttcatga

SEQ ID NO: 29293 - protein, 383 aa, Sinorhizobium meliloti 1021
MGRVLTAIGLMSGTSMDGIDIAVVRTDGDSIVDRGPSAGYAYDPRFRERLKQGLEDARSILKREERPGTLADLERDLTLRHALAVRMFLQENNILPDNVNVIGFHGQTVLHRPDQALTVQLGDGELLARETGIDVVYDMRANDMTHGGQGAPLIPAYHAALARGLSKVGEIATPVVFVNIGGISNLTYIGAGEEIVAYDSGPGNTLIDQWVEAHAGIPYDQGGMIASEGGVLRELADRYLSHPFFSAEKRRSLDRNDFAPPAAGDASLEDGARTLAHVTAAGIVRSARHLPANPATYIVCGGGRLNSVIMSDLHALAEAEGARVLAAEALDLNGDSMEAEAWAYLAVRSRYCLPLTYPGTTGVSCPVSGGRLAAKPGRIAAVS

SEQ ID NO: 29294 - DNA, 1161 bp, Caulobacter crescentus CB15
  CDS (1)..(1161): transl_table=11
atggggcctagctaccgtttcaccgccatggcagtcaacggtcccatgaagatcctgggattcatgaccggcacctcgctggatgcggtcgacatggcggtgctggagaccgatggcgtggagatcagcgccttcggtccggcgggcgagcgcaagttgcgggaggccacccgcgacctgctgctgaagaccaccgacatcgcccgcgcctggccgcgcggcgagcctgagccggtgatcttcgaggaggcccggcgcgccgtggccgacgagcacttccaggccgccgaaagctttctggatgagcacggtctctcttggagcgacttcgacctgctgggcgtacacggccagacggttctgcacgagcgcccgacggcgcagcgggtggggcgcacggtgcaactgctcgacgccgatcgcctggcgcgcctctgcgggcgtccggtggcgttcgacttccgcaccgccgatgtcgccgtcggcggagagggcgcgccgctggcgccgatctaccacgccgcccgcgcccgggcctcgggtctggccgcgcccgtggcggcgctgaacgtcggcggcgtggccaacatcaccctgatcggcgcgaacggcgacttgctggccttcgacaccggccccggcaacggcatgatcgacctgatgctgcaggcgagggggcttggccgcttcgatgaagatggccgcttagccctggccggccgtgtcgatgaggccgtgctggcggcgctgctcgacagtccttacttcgacgctccggcgcccaagtcgctggatcgctatgacttctcgttgaccccggtcgatcatctctccgctgaggacgcggcggcgaccctggtggccttcaccgccgaggcggtgttcaaagccttcgcccagtccggcgaggcgcccagcgccctgatcgtctgcggcggtggccggcataatccggcgatcatgcagaccctggccgcgcgcgcgcctgtaccggtcaagagcgccgaggcctatggctggcgcggcgacagcatcgaggctgaggccttcgcctatctggccgcccgtacggccaagggcctgccgatcagcttcccggggacgacaggcgtcccggcgccgatgaccggcgggcggatcgtcgggctgatttccgcttag

SEQ ID NO: 29295 - protein, 386 aa, Caulobacter crescentus CB15
MGPSYRFTAMAVNGPMKILGFMTGTSLDAVDMAVLETDGVEISAFGPAGERKLREATRDLLLKTTDIARAWPRGEPEPVIFEEARRAVADEHFQAAESFLDEHGLSWSDFDLLGVHGQTVLHERPTAQRVGRTVQLLDADRLARLCGRPVAFDFRTADVAVGGEGAPLAPIYHAARARASGLAAPVAALNVGGVANITLIGANGDLLAFDTGPGNGMIDLMLQARGLGRFDEDGRLALAGRVDEAVLAALLDSPYFDAPAPKSLDRYDFSLTPVDHLSAEDAAATLVAFTAEAVFKAFAQSGEAPSALIVCGGGRHNPAIMQTLAARAPVPVKSAEAYGWRGDSIEAEAFAYLAARTAKGLPISFPGTTGVPAPMTGGRIVGLISA

SEQ ID NO: 29296 - DNA, 1122 bp, Salmonella typhimurium LT2
  CDS (1)..(1122): transl_table=11
atgaaatcgggccgttttattggcgttatgtccggaaccagccttgatggcgtggatgttgtactggcggcaattgatgaaaccatggttgcgcaacaggcaagtctcacctggcccattcccgttcatctgaaaaaaggcattctcgatatttgccagggacagccgcttacgctctcgcaactcggccagcttgatacccagttaggccggctttttgcacaggcggttaatgcgctgttagcgcaacaacgtttgcagccgcgggatatcgtcgccattggttgtcatgggcaaacggtctggcatgaaccgaccggcgaggccccgcatacgctgcaaattggcgataataatcacatcgtcgcccatacggggattacagtggtcggcgattttcggcggcgggatattgcgctgggcggacaaggcgcgccgttggtgcctgctttccatcacgcgctgttgggacatccgacggaaaaacgtatggtcctgaatatcggcggcatcgccaatttatctctgcttttccccggacaggcggtgcgcgggtacgacacggggccgggtaatatgttgatggatgcgtggatttggcgacaatgcgcgcagccctacgacaaagacgcggcatgggcgaaagaaggtcaggttattcttccattgctgcaaaagatgttgcgcgatccgtactttgctgcgtcggcgcccaaaagtacaggacgcgaatatttcaactatggctggttagagcgccatcttgcggctttccctggcgcagacgcgcgcgatgtacaggccacgctggcggagctgacggcggtctccatcgcccaacaggtgctgctcaacggcggctgcgagcggctgatggtctgtggcggcggtggccggaatccgttagtgatggcccgtctggcggcgctgttgccaggtatcgaggtttcgaccaccgataaggcggggatcagcggcgatgatatggaagcgctggcctttgcctggcttgcctggcgaacgctcgcgggcctgccgggaaatttaccttccgtgacgggggctacagaagccagtgttttaggcgctatttacccggctaacccaataactcagagttaa

SEQ ID NO: 29297 - protein, 373 aa, Salmonella typhimurium LT2
MKSGRFIGVMSGTSLDGVDVVLAAIDETMVAQQASLTWPIPVHLKKGILDICQGQPLTLSQLGQLDTQLGRLFAQAVNALLAQQRLQPRDIVAIGCHGQTVWHEPTGEAPHTLQIGDNNHIVAHTGITVVGDFRRRDIALGGQGAPLVPAFHHALLGHPTEKRMVLNIGGIANLSLLFPGQAVRGYDTGPGNMLMDAWIWRQCAQPYDKDAAWAKEGQVILPLLQKMLRDPYFAASAPKSTGREYFNYGWLERHLAAFPGADARDVQATLAELTAVSIAQQVLLNGGCERLMVCGGGGRNPLVMARLAALLPGIEVSTTDKAGISGDDMEALAFAWLAWRTLAGLPGNLPSVTGATEASVLGAIYPANPITQS

SEQ ID NO: 29298 - DNA, 1179 bp, Nostoc sp. PCC 7120
  CDS (1)..(1179): transl_table=11
atgtattcttctcaagcatctgccgttcctaaccgtgttgtcggtttaatcagtggcacatctgtagatggtatagatgccgccttagtagagattactggcacagaattggatctgaaagttgagttactagcaggaaaaacatatccttatcctgcggacttaagagaacgcatattggcagtttgtgcaggcgaagctatttccatgttggaacttgcacatatggatgatgcgatcgccctagcttttgcccaagctgctcaaaatattcaaataggttatcagccagcaaatttaattggctctcatggtcaaactgtgtatcatcgaccaccaaaagaagcaggagtagggaagaaaaaccttggttatactctccagcttggtcgtggtgagatgattgcctatttgacgggaattacaactgtcagtaattttcgtgttgctgatatcgctgttggtggtcatggcgcaccacttgttcccagagtcgatgcctttttactgagtcatccccatgaaagtcgttgtattcaaaatttaggtggtattggtaaccttgcctatatcccagcgcgtactgatgactggctttcacaaatttgtggttgggacacaggcccaagtaatagcctgttagatttagcagtagaacgtctgacggctggtgctaaaacctatgatgaagatggtcaatgggcagccagtggaactccttgctatcctttagtcgaaaaatggctcacccatgaatattttcatctctcaccacctaaatcgactggtcgagaattgtttggtgtggcttacctaaatcaatgtttccaagatgccgaaccataccaacttagtccagctgatatgctagcaacacttacggaactaactgtagcttccattgttcacagttaccgtacttttttaccacaaatgccacaacgtgtatttttatgtggcggtggtagtcgtaatttgtatttaaaacaaagattacagttagcgttagaaacagtcccagtcttgaccaccgatgaagcaggcgtgagtgccgactttaaagaagcgatcgcctttgctgttttagctcactggcgacaattagccattccaggcaacctaccaacagccacaggcgcaccacatgaagttttgttgggagaaattcatcaagggtga

SEQ ID NO: 29299 - protein, 392 aa, Nostoc sp. PCC 7120
MYSSQASAVPNRVVGLISGTSVDGIDAALVEITGTELDLKVELLAGKTYPYPADLRERILAVCAGEAISMLELAHMDDAIALAFAQAAQNIQIGYQPANLIGSHGQTVYHRPPKEAGVGKKNLGYTLQLGRGEMIAYLTGITTVSNFRVADIAVGGHGAPLVPRVDAFLLSHPHESRCIQNLGGIGNLAYIPARTDDWLSQICGWDTGPSNSLLDLAVERLTAGAKTYDEDGQWAASGTPCYPLVEKWLTHEYFHLSPPKSTGRELFGVAYLNQCFQDAEPYQLSPADMLATLTELTVASIVHSYRTFLPQMPQRVFLCGGGSRNLYLKQRLQLALETVPVLTTDEAGVSADFKEAIAFAVLAHWRQLAIPGNLPTATGAPHEVLLGEIHQG

SEQ ID NO: 29300 - DNA, 1161 bp, Ralstonia solanacearum GMI1000
  CDS (1)..(1161): transl_table=11
atgctcacgcgcatgacgacacttgcctcctccatcagcgagcgctacatcggcctgatgtccggcaccagcctggacggtgtcgacggcgtgctggtcgacttctccggcccgcgtccgatgctgctgacggacgcctacgtgccctttccgcccgcgctgcggcaggcattcttcgacctgcagtccgccggccacaacgaaatccaccgcgaggcgctggccgccaacgcgctggccgacctgtacgccgaatgcgtcgcgcaactgctgcatgagagcggctgcgatccgcgcgaagtccgcgccatcggcgcccacggccagaccatccgccaccagcccggcgagcacgacggcatcggctatacacggcagacgcagcacgccgccgtgctcgccgagcgcaccggcatcgacgtcatcgccgatttccgcagccgcgacatcgccgccggcggtcagggcgcgccgctggtaccggccgtgcaccgcgcactgttcgcgctgcccgatgcctggcgcgtggtctgcaacatcggcggcatcgccaacctgaccgtgctgccgccgcagcagtcggatgcgcgcgaccgggtgctcggcttcgactgcggcccgggcaacgcgctgctcgactactgggtccatgcccaccgcggcgaagcctacgaccgcaacggcgagtgggcccgcagcggctggatcgacgccgcgctgctcgagaccctgcgcagcgagccgttcttcgccaggatgccacccaagagcaccggccgcgacctgttcaacccgacctggctgcagcagcaggccggcgacacgcttgagcgcatccgccccgaggacgtgcaggccaccctgctcgccctgacggccgacaccattgccgatgccgtccgcacccacgcaccgcgtaccgcatccctcgtggtctgcggcggcggcgcccgcaacggcgcgctgatgcagcggctggcggcacagctgccaggtaccctggtcgccgcgagcgatgacttcggggtccccgcgcatcaggtcgaggcactggccttcgcctggctggcgcgccagtgcgtgcgccgcgaacccggcaacgtctaccatgccaccggtgcggccggcccccgcgtgctgggcacgatctatccggcctag

SEQ ID NO: 29301 - protein, 386 aa, Ralstonia solanacearum GMI1000
MLTRMTTLASSISERYIGLMSGTSLDGVDGVLVDFSGPRPMLLTDAYVPFPPALRQAFFDLQSAGHNEIHREALAANALADLYAECVAQLLHESGCDPREVRAIGAHGQTIRHQPGEHDGIGYTRQTQHAAVLAERTGIDVIADFRSRDIAAGGQGAPLVPAVHRALFALPDAWRVVCNIGGIANLTVLPPQQSDARDRVLGFDCGPGNALLDYWVHAHRGEAYDRNGEWARSGWIDAALLETLRSEPFFARMPPKSTGRDLFNPTWLQQQAGDTLERIRPEDVQATLLALTADTIADAVRTHAPRTASLVVCGGGARNGALMQRLAAQLPGTLVAASDDFGVPAHQVEALAFAWLARQCVRREPGNVYHATGAAGPRVLGTIYPA

SEQ ID NO: 29302 - DNA, 1122 bp, Agrobacterium tumefaciens str. C58
  CDS (1)..(1122): transl_table=11
gtgggcgaggtcaaaacggcaatcgggctgatgagcggcacatcgatggacggcatcgatatcgcggtgttgcgcacggatggcgagagcgtggtccggcacgggccgagcggttattttccctatgatccgggtctgcggggcatctggcagaaggcgctcacgacagccaaagccattcgcgaacggcgcgagcgtccgggcgatctgggggaggctgaacgcaagctgacgcttgcccacgcggctgcggtcaaatccttcctgcaccggcaccggtttgacgtcggtgatatcgatgtgatcggttttcatggacagaccgtgctgcaccggccggatgaggcattgaccgtgcagatcggtgacggcgcgcttctggccgaggaaaccggtatcgatgtggtttacgatatgcgcgcgaacgacatggtgcatggagggcagggtgcgccgctcattcccgcctatcacatggcactgtcagccaatctgccggatgggttcgaaacgcccgccgtcttcgtcaatatcggcggcatctccaacctgacctatatcggcgagggtggccggcttgcggctttcgacagtggtcccggcaatatgctgatcgaccagtggatcgaggcgcatacgggcaaggccttcgacaagggcggcaggacggcggcaggcggcagcgtcgttgcctcgctggtggcgcgttatatggaaagcccgttcttctcggccaatatccgccgctccctcgaccgcagcgatttcgtgccgccgcaaaagggtgaggtatcgctggcggatggggcgcggacgctctcgcatctgacgggggcggcgatcctcaaatcggcgagctatttgccggaagcggcgaagacctatgtggtctgcggcggcggaaggcttaacccagttatcatggaagagttagcggggcttgctgcaaagcagggcgcgcgggtgatcgcggcggaagaggcgggtttcgatggcggggcgatggaggcggaggcttgggcctatctggcggtccgttcgctgagggggctgccgctgacctatccggggactacgggggtgaaggagccggtgacgggtggggttttggtgcgggcgtaa

SEQ ID NO: 29303 - protein, 373 aa, Agrobacterium tumefaciens str. C58
MGEVKTAIGLMSGTSMDGIDIAVLRTDGESVVRHGPSGYFPYDPGLRGIWQKALTTAKAIRERRERPGDLGEAERKLTLAHAAAVKSFLHRHRFDVGDIDVIGFHGQTVLHRPDEALTVQIGDGALLAEETGIDVVYDMRANDMVHGGQGAPLIPAYHMALSANLPDGFETPAVFVNIGGISNLTYIGEGGRLAAFDSGPGNMLIDQWIEAHTGKAFDKGGRTAAGGSVVASLVARYMESPFFSANIRRSLDRSDFVPPQKGEVSLADGARTLSHLTGAAILKSASYLPEAAKTYVVCGGGRLNPVIMEELAGLAAKQGARVIAAEEAGFDGGAMEAEAWAYLAVRSLRGLPLTYPGTTGVKEPVTGGVLVRA

SEQ ID NO: 29304 - DNA, 1122 bp, Brucella melitensis 16M
  CDS (1)..(1122): transl_table=11
atgcccgatttgaaacgcgcaataggactgatgagcggcacctcgatggatgggatcgacattgctcttcttgctaccgacggcgaaaactggatagagcggcgcgcttctgcctcgatggattattcggatggttttcgcgcgcggctgaaagcagggcttgtcgatgcgcgcgccatcaaagacagggccgagcgtcccggcctgctgcggcagcttgagcatgacctgacattgctccatgccgttgctgttcatgatttccttcacgaacagggcttgcagccgcacgagatcgacgtgatcggttttcatggccagacggtgctgcatcgctcgaacgagagcctgactgtccagatcggcgacggcgcgctgctggctcgcgaaacgggcattcctgtcgtttatgacatgcgggcggaagacatgcgccatggtggtcagggtgctcccttgattcccgcctaccatgccgctttggcggccaatctgccgcttggcctcaaaggcccggtcgtcttcgtcaatatcgggggcatctccaatctcacctatgtcggcgaggatggcgcgctgatcgcctatgacagcgggccgggaaacatgctcatcgatcaatggatggaactgcatgggcatggccggtttgatccgggcggtgcaactgcgatgagcggaagtgtggaccgaaacaccgcccaccgatatctcgaacatgaattcttcaagggaaaccaccgccgttcgctcgatcgtggcgatttcgccattccggccaagggtgaattgaaccttgccgatggcgcgcgcacacttgcatttgtaagtgcggcggcaatcctcaaatccgcttcgcatctgcctgcccgtccgcgcacctatgtggtgagcggtggagggcgcaagaatggtgcgctcatggacgagctgaccgcgcttgccgagcgccagggcgcgcatgtgatcgatgcggataatgccggtttcgatggggacgccatggaggcagaggcctgggcctatcttgcagtgcgttcgctttgcggcctgccgctcacctatccctccacgacgggctgcgacaagcccgtttccggcggcgttcctgttaggccctaa

SEQ ID NO: 29305 - protein, 373 aa, Brucella melitensis 16M
MPDLKRAIGLMSGTSMDGIDIALLATDGENWIERRASASMDYSDGFRARLKAGLVDARAIKDRAERPGLLRQLEHDLTLLHAVAVHDFLHEQGLQPHEIDVIGFHGQTVLHRSNESLTVQIGDGALLARETGIPVVYDMRAEDMRHGGQGAPLIPAYHAALAANLPLGLKGPVVFVNIGGISNLTYVGEDGALIAYDSGPGNMLIDQWMELHGHGRFDPGGATAMSGSVDRNTAHRYLEHEFFKGNHRRSLDRGDFAIPAKGELNLADGARTLAFVSAAAILKSASHLPARPRTYVVSGGGRKNGALMDELTALAERQGAHVIDADNAGFDGDAMEAEAWAYLAVRSLCGLPLTYPSTTGCDKPVSGGVPVRP

SEQ ID NO: 29306 - DNA, 1191 bp, Thermoanaerobacter tengcongensis MB4
  CDS (1)..(1191): transl_table=11
atggataggttattgcgtatttacaataaagaagaaagattagtggttgggttaatgtccggtacttctgctgacgggattgatgctgctcttgtgaaggtcaaagggagaggtttagatacaaaggttgaacttttagaattcgaaaagtttccgtacgaagaggaagtgcaaaagaagatatttgagctttttgacccccatactggaactgttgagaagatatgccatatgaattttttactcggtgaactgtttgcagaagctaccttaaaactcattaaaaaagcaggtttaaccccgaaagatatagatttaatagggtctcacgggcagaccatataccatattcctaactttattgaagatatgggatataaagtccgttctactcttcaaataggggaaccagcagtaatagctgaaagaactggaattgtaacagtggctgattttagggtaagagatgtagctgcaggagggcaaggagctcctttagtaccttacactgaatatatcttgtataggtcaccaaatgaaacaatagccttacaaaatataggtggaattggcaatgttactgttttgcctaaaggaggtagtatagaagacgtaattgcatttgatacaggtcctggaaacatggtgatagatgaagttgtgaagaggattactcatgggaaaatgaatttcgacaaagatggtgaattagcatctcgcgggaaagtaaatgaagaatttttagcagagctgttaaaagatgaattttttaaaatgaagcctccaaagaccactggcagagagcattttgggaaaaattatgtggataatttgatgaaaaaggcttcctacttggaaatagataaatacgatttggttgctactgttacagctttaactgcttattcagtggtgagaagctacgaaaagtttatatttccctactacaaagttgacaaagtagtaataggaggtggaggaagtttcaacaaaacccttgtacaaatgataaaaaaacagttgcctcaggttagggtaataacgcaagaagacataggatttaatagcgatgccaaagaagctgttgcttttgcaatccttgcaagtgagactataaatggcaattttaacaatattccaaaagcaacaggagcaaaacatccggtagtaatgggaaaaatttctttatag

SEQ ID NO: 29307 - protein, 396 aa, Thermoanaerobacter tengcongensis MB4
MDRLLRIYNKEERLVVGLMSGTSADGIDAALVKVKGRGLDTKVELLEFEKFPYEEEVQKKIFELFDPHTGTVEKICHMNFLLGELFAEATLKLIKKAGLTPKDIDLIGSHGQTIYHIPNFIEDMGYKVRSTLQIGEPAVIAERTGIVTVADFRVRDVAAGGQGAPLVPYTEYILYRSPNETIALQNIGGIGNVTVLPKGGSIEDVIAFDTGPGNMVIDEVVKRITHGKMNFDKDGELASRGKVNEEFLAELLKDEFFKMKPPKTTGREHFGKNYVDNLMKKASYLEIDKYDLVATVTALTAYSVVRSYEKFIFPYYKVDKVVIGGGGSFNKTLVQMIKKQLPQVRVITQEDIGFNSDAKEAVAFAILASETINGNFNNIPKATGAKHPVVMGKISL

SEQ ID NO: 29308 - DNA, 1176 bp, Streptomyces coelicolor A3(2)
  CDS (1)..(1176): transl_table=11
gtgcgtgtgatcggcctgatgtcgggcacgtcctacgacgccgtcgaggcggccgccgcggacctcgaactggagggcgaggccctggtgatgcgcccgctcggccatctctccgccccctacccggacgggctgcgggacctgatcgcggacagcctgcccccggcggccgcgaccgtccggaccgtggcccggctcgacaccggcatcgggcaggccttcgccgacgtggccgtgcgggcggtgcgcgagctgtgcgggggcgccgccggtctggtggtctcgcacgggcagaccctgtaccactgggtggaggacggcgccgtgcgcggcaccctccagctcggccagcccgcctggatcgccgaggcgaccggtctgcccgtcgtctccgacctgcgcggcagggacgtcgcggccggcggtcagggggcgccgctggtcgccatgaccgacgtcctggccatggcggcgctgcccggcgtccccgccgccctcaacctcggcgggatcgccaacgtcaccgtcgtcgccccgggcgccgagccgctggccttcgacaccggcccggccaacgcgctgatggacgccgccgtacggcacttcaccggcggtgcggccgccttcgacgaggacgggcgccgggccggggccggccgggtcgatccggggctgctgcgggtgctgctggacgacccgtactacggcaggccggctccgaagagcaccggcaaggagcagttccacctgccgtatctgctggcggcgctcgcggcggcgcccgtggcggaacccgacgacgtcctggcgaccctggcccggctcaccgccgtcacggtggccgacgcctgccgggcgcacggcgtgacgcggctcgtcgtgtccggcggtggcgcgcgcaaccccgtgctgatgggcatgatcgccgaggagctgcccggggtggacctcggttccagcgacgcgctcgggctgccgtccgacgccaaggaggcacttgccttcgccctcctgggcttcctgaccgtcaacggcctgcccggcgcgatcccctcggggacgggtgcgcgccgggcgtcactgctcggcagcatcacgcccgggcgggagcccctgcggctgcccgagccggccggcgagccgccccgggtgctgcgcgtcgtcggcgggccctga

SEQ ID NO: 29309 - protein, 391 aa, Streptomyces coelicolor A3(2)
MRVIGLMSGTSYDAVEAAAADLELEGEALVMRPLGHLSAPYPDGLRDLIADSLPPAAATVRTVARLDTGIGQAFADVAVRAVRELCGGAAGLVVSHGQTLYHWVEDGAVRGTLQLGQPAWIAEATGLPVVSDLRGRDVAAGGQGAPLVAMTDVLAMAALPGVPAALNLGGIANVTVVAPGAEPLAFDTGPANALMDAAVRHFTGGAAAFDEDGRRAGAGRVDPGLLRVLLDDPYYGRPAPKSTGKEQFHLPYLLAALAAAPVAEPDDVLATLARLTAVTVADACRAHGVTRLVVSGGGARNPVLMGMIAEELPGVDLGSSDALGLPSDAKEALAFALLGFLTVNGLPGAIPSGTGARRASLLGSITPGREPLRLPEPAGEPPRVLRVVGGP

SEQ ID NO: 29310 - DNA, 1125 bp, Xanthomonas axonopodis pv. citri str. 306
  CDS (1)..(1125): transl_table=11
ttggaacacgttgactcccccttgtacctgggcctgatgtcgggcaccagcgccgacggcatcgatgccgcgctggtgcgctttgccgatgacacccaccgccgctgcgaattggtggccgggacgacggtggcgtgggagccgcagttgcgcgagaccttggtggcgctcggccagggcgccgagacggtggccatcgatgcgctaggccagctggacgcgcaggtggggctggcgttcgcggcggcggccaatcagttgatcggcgacagcggcgtggagcgtcgccagattcgcgcgatcggctcgcatgggcagaccatccgccaccggcccaacgcgagcccggcgttcacctggcagatcggcgatgccagccgaattgccgagcacaccggcattaccacggtggccgatttccgacgtcgcgatgtggctgccggtggccagggcgcgcccctgatgcccgccttccatctggccatgctgggcgcaggcgacgaagaccgcgccgtgctcaatctgggcgggatcggcaacctgaccttgattccgcgcgatggcgcggtgcggggattcgataccggcccggccaatgcgttgctggacagctggtgtcaacgccatcacggcacgccgttcgatgccgatggtgcatttgccgccagtgggcgcgtcgatgcggccttgttgcaggcgctgttggccgatccgtggtttgcgttgccaccacccaagagcaccggccgcgagcaattccatctggactgggcagtgcaggcgatgggcaacgcgcggttggatgctgccgatgtgcaggcgaccttgctcgaactcaccgctgccagcgtggccgatgcgttgctgcggctgcagcccaccacgcgccgggtgctggtctgcggcgggggcgtacgcaacccggtgctgttggcccgactggcggcgcggctgccgggcgcgatggtggaatccagcgcgcggtacgggctggacccggattacctggaggcgatgggctttgcctggctggcagccgagttgctggccggacgcgctgccaatctgccctcggtgactggggccgccgggccccggctgttgggagcgatctatccggcgtga

SEQ ID NO: 29311 - protein, 374 aa, Xanthomonas axonopodis pv. citri str. 306
MEHVDSPLYLGLMSGTSADGIDAALVRFADDTHRRCELVAGTTVAWEPQLRETLVALGQGAETVAIDALGQLDAQVGLAFAAAANQLIGDSGVERRQIRAIGSHGQTIRHRPNASPAFTWQIGDASRIAEHTGITTVADFRRRDVAAGGQGAPLMPAFHLAMLGAGDEDRAVLNLGGIGNLTLIPRDGAVRGFDTGPANALLDSWCQRHHGTPFDADGAFAASGRVDAALLQALLADPWFALPPPKSTGREQFHLDWAVQAMGNARLDAADVQATLLELTAASVADALLRLQPTTRRVLVCGGGVRNPVLLARLAARLPGAMVESSARYGLDPDYLEAMGFAWLAAELLAGRAANLPSVTGAAGPRLLGAIYPA

SEQ ID NO: 29312 - DNA, 1155 bp, Yersinia pestis KIM
  CDS (1)..(1155): transl_table=11
ttgtggttattttattcctcaatggagaataaggtcattgtgatgaaatcaggccgttttattggagtgatgtcaggaaccagcctggacggtgtggatgttgttctggcagctattgatgagcgtatggtggcgcagcaagcctcatatacccatccaattccactacaactgaaaaaagacatccttggtatgtgtcaggggcagtccacgaccttgtcagcagtgggaaaacttgatgcccaactgggtattctgtttgcagaagcggtgttggctttactcgccaaagaagggttgtctgcgcaggatattaccgccattggttgccatgggcagactgtctggcatgaaccattaggtgaacccgcctttactatgcaactcggcgacaataatcgtattgccgcgatgacccaaattgccactgtgggggatttccgccgtcgtgatatggcctatggcgggcagggggcccccttggtgcccgctttccatcatgcgttattagcgcatgcgacggaaaaacgtatggtcttgaatattggtgggattgctaatttatccgtcctactacctgattcgcctattcggggttttgatactggccccggtaatatgttgatggatgcatggatctggcgcaattgctcattaccttatgataaagatgcctgctgggcgttatcagggcatgttaatcagccgttgcttgagcaaatgttcaacgatccttactttcggttacctgcgccgaaaagtaccggtcgtgaatacttcaatgccgcgtggctggataagcaactggccagaatcccaggggtaaccgctgaagatatacaggcaacattggctgagttaacggcggtatcgatcacggaacaggttcggttagcgggaggatgtgatcgcttgctggtgtgtggcgggggggctcgtaacccattagtcatggcgcgcatctcagcgttactgtcgggaacggaagtgtgtactaccgatgacgcgggtatccgtggtgacgatatggaagcactggcgtttgcctggctggcgtttcgcacgttgtctggtaaaccgggtaatttgccttctgtcacgggggccagccgcgagaccattttaggagcagtccatcctgtatcatcatggtga

SEQ ID NO: 29313 - protein, 384 aa, Yersinia pestis KIM
MWLFYSSMENKVIVMKSGRFIGVMSGTSLDGVDVVLAAIDERMVAQQASYTHPIPLQLKKDILGMCQGQSTTLSAVGKLDAQLGILFAEAVLALLAKEGLSAQDITAIGCHGQTVWHEPLGEPAFTMQLGDNNRIAAMTQIATVGDFRRRDMAYGGQGAPLVPAFHHALLAHATEKRMVLNIGGIANLSVLLPDSPIRGFDTGPGNMLMDAWIWRNCSLPYDKDACWALSGHVNQPLLEQMFNDPYFRLPAPKSTGREYFNAAWLDKQLARIPGVTAEDIQATLAELTAVSITEQVRLAGGCDRLLVCGGGARNPLVMARISALLSGTEVCTTDDAGIRGDDMEALAFAWLAFRTLSGKPGNLPSVTGASRETILGAVHPVSSW

SEQ ID NO: 29314 - DNA, 1140 bp, Thermosynechococcus elongatus BP-1
  CDS (1)..(1140): transl_table=11
atgatgcgggtcattggcttgatgagcggaacctctgtggatggcattgacgcggtcttggtggagctatgggggggcgatcgcgacctgcaggtaacggtgttgaatttttgtaccgtgccctatccagacgccctgcggcagcgtattcttgaggtttgtggtgcaaaatccttaaccctggctgagttggcggccttggatgaggcaatcgccgaggccttcgcccatgcggcgcaaagggttcaacggggctatccacgggcagatctcattggctcccatggtcaaacggtctttcatcgcccccccgtaggcgatcgcctaggctacagcctacaactgggacggggggattggattgcttggcgtacaggcatgaccaccattgccaactttcgcgctcaggatattgccctgggtggtcaaggggcgccccttgtgccgcgggtggattggtgtcttttgggtcatgccacggaagtccgctgtgtgcaaaacatcggtgggatcggcaatgtcacctacttgcccgctcagctcgaggatcctgaggggaaaggggtcatgggctgggatacaggtcccggcaatatgctgcttgatctggcggtaacggagttatcggggagtgaattgacctatgatcctgatggcacatgggcacgacagggcaaaattagcgagcccctagtggagcactggctgcaggaccccttctttcaccagccgccgccaaaatccactgggcgggaatactttggtctgcccttttggcaacgctgccgtacggatgccactggtttggcacctgcggatcttctagccacgctaacggaatttacagctcgcagtatcgttgagagctatcgccaatttttgccccaatggccacagcgcatcttcctatgtggcggcggtgcccacaattcttttctcagggagcggctgcaggtgcatttaggagaccttcccgtggaaaccactgctgcggcggggattgcagtggatgcaaaggaggcgatcgccttcgcaattttggcctactggcatgagttgggcttgccagggaatttgccccaggttacgggggcacgccaggcggttcccttaggtcaacgttggctaggacagcgatga

SEQ ID NO: 29315 - protein, 379 aa, Thermosynechococcus elongatus BP-1
MMRVIGLMSGTSVDGIDAVLVELWGGDRDLQVTVLNFCTVPYPDALRQRILEVCGAKSLTLAELAALDEAIAEAFAHAAQRVQRGYPRADLIGSHGQTVFHRPPVGDRLGYSLQLGRGDWIAWRTGMTTIANFRAQDIALGGQGAPLVPRVDWCLLGHATEVRCVQNIGGIGNVTYLPAQLEDPEGKGVMGWDTGPGNMLLDLAVTELSGSELTYDPDGTWARQGKISEPLVEHWLQDPFFHQPPPKSTGREYFGLPFWQRCRTDATGLAPADLLATLTEFTARSIVESYRQFLPQWPQRIFLCGGGAHNSFLRERLQVHLGDLPVETTAAAGIAVDAKEAIAFAILAYWHELGLPGNLPQVTGARQAVPLGQRWLGQR

SEQ ID NO: 29316 - DNA, 1110 bp, Shewanella oneidensis MR-1
  CDS (1)..(1110): transl_table=11
atgaacaaggcttattatattggactgatgtcaggcacgagtatggacggcgttgatgctgtgctggtcgattttgcgggcgagcaacctcagcttattggtactcataccgagacaattccaacgcatttactcaaaggtttacagcgtttgtgcttaccgggtacagatgagattaatcgtcttggtcgtcttgatcgcagtgtcggcaaactgtttgcactggcggtcaataatctgctcgccaaaaccaagattgcgaaagatgagattattgccattggcagtcacggccaaaccgtgcgccatatgccgaaccttgaagtcggttttacgctgcagattggcgatcccaacaccatagccacagaaacaggtatagatgtcattgctgatttccgccgtaaagacattgcgttaggtgggcaaggcgctccgttggtgcccgccttccaccagcagacgtttgcccaagtcggtaaaaaacgtgtcatcctcaatattggtggtattgccaacatcacctatctgccgggcaatagcgaagaagtcttaggctttgatactgggccaggcaacaccttaatcgatgcatgggtccagcaggtaaaaaatgagtcctatgacaaaaacggggcgtgggcggcatcgggtaagactgatcctcaattactggcgcaattgctctcacacccttatttttcccttgcctatcctaagagcactgggcgagagttgtttaatcaggcttggttagaacagcaattatcggcttttaatcaattaaatgaggaagatatccaatcgacactactggatttaacctgccacagtatcgctcaagatatcctcaagctcgctcaggaaggcgagctatttgtctgtggtggtggcgctttcaacgccgagctaatgcagcgtttggcggcactactgccaggttatcgcatcgatacgacctcggcactgggtgttgatcccaaatgggctgaaggcattgcctttgcttggctcgccatgcgttatcaattaggcctgcccgccaatctgccagcggtcaccggtgcctcccgcgaagccatattgggtggacgttttagcgcgaaataa

SEQ ID NO: 29317 - protein, 369 aa, Shewanella oneidensis MR-1
MNKAYYIGLMSGTSMDGVDAVLVDFAGEQPQLIGTHTETIPTHLLKGLQRLCLPGTDEINRLGRLDRSVGKLFALAVNNLLAKTKIAKDEIIAIGSHGQTVRHMPNLEVGFTLQIGDPNTIATETGIDVIADFRRKDIALGGQGAPLVPAFHQQTFAQVGKKRVILNIGGIANITYLPGNSEEVLGFDTGPGNTLIDAWVQQVKNESYDKNGAWAASGKTDPQLLAQLLSHPYFSLAYPKSTGRELFNQAWLEQQLSAFNQLNEEDIQSTLLDLTCHSIAQDILKLAQEGELFVCGGGAFNAELMQRLAALLPGYRIDTTSALGVDPKWAEGIAFAWLAMRYQLGLPANLPAVTGASREAILGGRFSAK

SEQ ID NO: 29318 - DNA, 1092 bp, Pseudomonas putida KT2440
  CDS (1)..(1092): transl_table=11
atggcgctctacttgggggtgatgtccggcaccagcctcgatggcctggatatcgccctggtcgaacaaggcgagcagcttgaactgctcgccacccactacctgcccatgcccccggacctgcgccaggacctgctggccctgtgcagcagcggccctgacgagattgcccgtgcagcactggcggaaaaccgctgggccagcctggccggcgaaggtatccgccaactgctggctcgccagggactgaagcccgaagccgttcgcgccatcggcagccacggccagaccattcgccatgaaccggcccgcggctttactgtgcagatcggtaaccccgcactgctcgccgaactgaccggcatcagcgtggtcgccgacttccgccgtcgcgatgtggctgccggcggccaaggcgcgccactggtaccggccttccacgaaaccctgttcagccagcttggccgacgcctggcaatccttaacgtaggcggtttcagcaacctcagcctgatcgagcaggacaagccggttcatgggttcgattgcggcccggggaacgtgttgctggatgcctggatcgagcgcgagcacggccacccctatgatgcagatggcgcctgggctgcctcgggtgtggctcagcccgggttgctcagcgcactgatggctgacccgttctttgccggcagcggcccgaagagtaccggccgcgaggtgttcaacctgccttggctggatcgccacctggccaacctgccggcataccgggcccaggacgtgcaggcgacactgctggaactgaccgcacgcagcatcatcgattcgcttggcaaagcccagcaaggcaccgaggcgctgttggtctgtggtggaggcgcccgcaacggcgcgctgatggcccgtcttggccagctgctacctgcggcccgtgtcgcaagcactggcgcctatggcgtagacccggactgggtcgaagccatggccttcgcctggctggctcactgctgcctggagggtatcgccgccaaccgccccagcgtcactgccgccaagggcctgcgcgtactgggcgcaatctacccggcatag

SEQ ID NO: 29319 - protein, 363 aa, Pseudomonas putida KT2440
MALYLGVMSGTSLDGLDIALVEQGEQLELLATHYLPMPPDLRQDLLALCSSGPDEIARAALAENRWASLAGEGIRQLLARQGLKPEAVRAIGSHGQTIRHEPARGFTVQIGNPALLAELTGISVVADFRRRDVAAGGQGAPLVPAFHETLFSQLGRRLAILNVGGFSNLSLIEQDKPVHGFDCGPGNVLLDAWIEREHGHPYDADGAWAASGVAQPGLLSALMADPFFAGSGPKSTGREVFNLPWLDRHLANLPAYRAQDVQATLLELTARSIIDSLGKAQQGTEALLVCGGGARNGALMARLGQLLPAARVASTGAYGVDPDWVEAMAFAWLAHCCLEGIAANRPSVTAAKGLRVLGAIYPA

SEQ ID NO: 29320 - DNA, 1164 bp, Vibrio vulnificus CMCP6
  CDS (1)..(1164): transl_table=11
atgaatttgcattacaatggtttgcatgatgaaaacacaatggaattgagtgtgagcacaaaagagttatatatcggtgtcatgtccggcacgagtatggatggggtagattgtgccctcgtggagttcgaccaagagcaagtccgcttaattgcccacagtgactacccgatgccagcagatttgcgccaaaaactgctctccgtttgcaccgggcaagccaccaacttaaagcagattggcgaacttgatcaccgcctcggtcatctttttgccgatgccgtgatggatttgctcagccaagcaggcgtcgacacgagccagattcgcgctatcggtaatcatggccaaacggtatttcatcaaccgaatggcgagtttccttttaccacccaattgggcgacgccaacattattgccacccgcaccaacattgacaccgtggcagattttcgtcgcaaagacatggcattgggcggccagggcgcccctttggttccggcttttcatcaaagtgtatttgcgctgcaagattccactaccgtggtgttgaacatcggcgggattgccaatatctcagtgctccacccaactcgccctgttcttggttacgacacaggacctgggaatatgttgatggatgcttggtgtgaaacacacacacaacagaattacgacaaagacgcacggtttgctcttcaaggagaggtgaatgaggcgttactgaatacgctgttgcaagagccttatttgcatcaagatgccccaaagagcacagggcgcgagcttttcaatatggaatggttgacagcaaaactgcaagggcagaactatcgaagcgaagatgtacagcgcaccttgtgtgagtacaccgccttaaccattagtaaagaagttgagcgctttcgctatggtccaacaccgcagttgctggtttgtggtggcggcgcacgtaacccactgttgatgcaacgattgcagcaacagctgtctcactggcaggtctcaacgaccgatgcaaaaggggtcagtggggactacatggaagccatggcgtttgcttggttggcctatcgccacctgcaccgcttaccaagcaatctacccgaagtgactggcgcgagccgcttggcaagcctcggtgtactctattccaaagcctag

SEQ ID NO: 29321 - protein, 387 aa, Vibrio vulnificus CMCP6
MNLHYNGLHDENTMELSVSTKELYIGVMSGTSMDGVDCALVEFDQEQVRLIAHSDYPMPADLRQKLLSVCTGQATNLKQIGELDHRLGHLFADAVMDLLSQAGVDTSQIRAIGNHGQTVFHQPNGEFPFTTQLGDANIIATRTNIDTVADFRRKDMALGGQGAPLVPAFHQSVFALQDSTTVVLNIGGIANISVLHPTRPVLGYDTGPGNMLMDAWCETHTQQNYDKDARFALQGEVNEALLNTLLQEPYLHQDAPKSTGRELFNMEWLTAKLQGQNYRSEDVQRTLCEYTALTISKEVERFRYGPTPQLLVCGGGARNPLLMQRLQQQLSHWQVSTTDAKGVSGDYMEAMAFAWLAYRHLHRLPSNLPEVTGASRLASLGVLYSKA

SEQ ID NO: 29322 - DNA, 1146 bp, Xylella fastidiosa Temecula1
  CDS (1)..(1146): transl_table=11
atgcctgtgcatgatgatcactgcaatccaaatccagctcctctctacctcggtctcatgtccggcaccagcatcgacggcatcgacgcagcgttggtacggattaacgcaaacccgataacacattgtgagctgattgccgcgcaaacctccgcttgggaccctaacctacgcacgacattgttggaactaagtcaaggacagaacacagcatcccttgaccaactaggctggctcgacgcccaagtcggactggccttcgccacagccgctaatacactgatcgcaaaaacgggcataaagcacacacagatacgtgcaattggctctcatggccagaccatacgccatcgcccacacggcgatctacccttcacttggcaattaggcgatgcccaccggatcgccgaactcactggaatcactaccgtcgcagacttccgacgccgtgacgtggctgccggcggccaaggcgcaccactcatgcccgctttccatctagcgatccttggatccgccaatgaaaaccgagcagtgctgaacttaggcgggattgcaaacttgacactgatcccgatgaccggtccagtactcggcttcgacaccggaccagcgaacgcactgctcgacagctggtatcaacgccatcatcacgagacattcgatcaaagcggtaacttcgccgcaagcggcaaaatcaaccagaagttactggcctgcctgctagacgacccttggttcaccctcccacctcccaaaagcacagggcgcgaacaattccatttggactggatgaccaaacaactagaacctacaccaccatcaccagccgatgtgcaggcaacactgctcgaactgaccgcagtcaccgtagcagatgccctactacgccaacaacccaagacgactcggctactgatatgcggtggcggtgcgcataacccagtattgatggcacgcctggccacacacctacccaacgtaacagtggaatcgattcaaacctatggactcaatccggactatctggaagcaatggggtttgcttggctggccgcacaaacactggacggccaaccaagtaacctgccaagcgtcactggcgcacgcggcctgcgtttgctcggcgcaatccacccagcctga

SEQ ID NO: 29323 - protein, 381 aa, Xylella fastidiosa Temecula1
MPVHDDHCNPNPAPLYLGLMSGTSIDGIDAALVRINANPITHCELIAAQTSAWDPNLRTTLLELSQGQNTASLDQLGWLDAQVGLAFATAANTLIAKTGIKHTQIRAIGSHGQTIRHRPHGDLPFTWQLGDAHRIAELTGITTVADFRRRDVAAGGQGAPLMPAFHLAILGSANENRAVLNLGGIANLTLIPMTGPVLGFDTGPANALLDSWYQRHHHETFDQSGNFAASGKINQKLLACLLDDPWFTLPPPKSTGREQFHLDWMTKQLEPTPPSPADVQATLLELTAVTVADALLRQQPKTTRLLICGGGAHNPVLMARLATHLPNVTVESIQTYGLNPDYLEAMGFAWLAAQTLDGQPSNLPSVTGARGLRLLGAIHPA

SEQ ID NO: 29324 - DNA, 1071 bp, Pseudomonas syringae pv. tomato str. DC3000
  CDS (1)..(1071): transl_table=11
atgtctggcagcagtctcgacgggattgatatcgcccttttgaagcaggatgaccgttcaaggcttgtggccactcactacattcccatgccggaagacctgcatgccgagttgctggggctttgctccagcggcgcggacgagtttgctcgtgcggcaattgccgaacagaagtggtgcaaactggttgcacagggcgtgcagaccttgctgaaagagcaaaacaaggttgtcgccgatatccgcgccatcggcagccacggccagaccatccgccacgagcctgcgcgcggctacagcattcagatcggcaaccccgcattgcttgcagagttgaccgagattaccgtggtcagcgacttccgccgccgcgatatcgcagcaggcggacaaggcgcacctctggtgcctgcattccacgaggcgttgttcgacgacaataaagaccaccgcgcggtattgaacattggtggcttcagcaacctgagcctgatcgaatccgatcgcccggttgagggtttcgattgcgggcccggcaatgtgctgctggatgcctggatacaatcgcagcgccacgaaagctatgacaaggacggcgcatgggccgcgagcggcaaagttgatcccgagctgctcaaaaaactgctcagcgatccgtttttcctgaccaagggcccgaagagtaccggccgggaagtgttcaacctgggctgggtgcaccaccacctctttcagctgccaacgctggctccggaagatgtgcaagccaccctgctggaactgacggcgctgaccatcaccgaatcgctgcaaacagcccaggcggtcaccaaggagcttctggtctgtggcggcggcgcacataacaaggcgctgatgaagcgcttggctgagctgttgccagacaccgaggtcaacagcaccgagaaattcggcgtggaccctgactgggttgaagcaatggcgtttgcctggctggctcattgctgccttgaaggtgtgccggcgaaccgtccaacggtaaccggcgccaaaggccgcagggttctgggcgctatttaccccgcctga

SEQ ID NO: 29325 - protein, 356 aa, Pseudomonas syringae pv. tomato str. DC3000
MSGSSLDGIDIALLKQDDRSRLVATHYIPMPEDLHAELLGLCSSGADEFARAAIAEQKWCKLVAQGVQTLLKEQNKVVADIRAIGSHGQTIRHEPARGYSIQIGNPALLAELTEITVVSDFRRRDIAAGGQGAPLVPAFHEALFDDNKDHRAVLNIGGFSNLSLIESDRPVEGFDCGPGNVLLDAWIQSQRHESYDKDGAWAASGKVDPELLKKLLSDPFFLTKGPKSTGREVFNLGWVHHHLFQLPTLAPEDVQATLLELTALTITESLQTAQAVTKELLVCGGGAHNKALMKRLAELLPDTEVNSTEKFGVDPDWVEAMAFAWLAHCCLEGVPANRPTVTGAKGRRVLGAIYPA

SEQ ID NO: 29326 - DNA, 1113 bp, Vibrio parahaemolyticus RIMD 2210633
  CDS (1)..(1113): transl_table=11
atgaaatttaacgaactgtacattggtgtgatgtctggaaccagtatggacggcgttgataccgctctggttgagattacagataatcacgttcgcttaattgcgcacggcgactatccaatgccagcggcgatgaaagaaatgctgttatcggtttgtaccggtcaagcgacaaacttaaaagccatcggtgaacttgaccaccagctcggccacctatttgcagatgccgtgttgcagctactcaataagtctggttacgtcgcagaacaaattcgtgcgattggtaatcacggtcagacagtgttccatcagcctaccggagacttgccatttaccactcaattgggcgatgccaacattatcgcggtcaaaacaggcattgatacggtagcggattttcgtcgtaaagacatggcgctgggtggacaaggtgctccactggttcccgcttttcacaaaagcatctttgccatgcaagattccacaacggtcgtgctaaacatcggcggcattgccaacatttcggttttgcatccgcagcaacccgtgcacggctacgatacagggccgggcaatatgttgatggacgcatggtgtgagcgacatacgggtcacggtttcgacaaagacgcgcaacttgccctgcgaggcagcgtcaacgaagcattgctggctcatttacttaaagagccttatctcgcaatgtcagccccgaagagtaccggacgtgaactgttcaacatggattggctacatcaccagttagccaattacgatgtatccgtcgaagacgtccaacgcaccttatgcgaatacaccgcgatcactattgcgcatgacgtaacaaagttcacgtatggcgagactcctcagctgttggtttgcggcggcggtgcacgcaacccacttttgatgcaacgtttagcggaacttctcccccaatggcatgtgacaaccactaccgataaaggcgttgatggcgactacatggaagctatggcgtttgcttggcttgcgcagcgccatattcatgacctccctagcaatttaccggaagtcacaggggcaagtcgcctcgcttcacttggtgtgctctattcaaaaaattaa

SEQ ID NO: 29327 - protein, 370 aa, Vibrio parahaemolyticus RIMD 2210633
MKFNELYIGVMSGTSMDGVDTALVEITDNHVRLIAHGDYPMPAAMKEMLLSVCTGQATNLKAIGELDHQLGHLFADAVLQLLNKSGYVAEQIRAIGNHGQTVFHQPTGDLPFTTQLGDANIIAVKTGIDTVADFRRKDMALGGQGAPLVPAFHKSIFAMQDSTTVVLNIGGIANISVLHPQQPVHGYDTGPGNMLMDAWCERHTGHGFDKDAQLALRGSVNEALLAHLLKEPYLAMSAPKSTGRELFNMDWLHHQLANYDVSVEDVQRTLCEYTAITIAHDVTKFTYGETPQLLVCGGGARNPLLMQRLAELLPQWHVTTTTDKGVDGDYMEAMAFAWLAQRHIHDLPSNLPEVTGASRLASLGVLYSKN

SEQ ID NO: 29328 - DNA, 1119 bp, Coxiella burnetii RSA 493
  CDS (1)..(1119): transl_table=11
gtgccaaaagaacggtatatcggtcttatttccggcacgagcatggatgcgcttgataccgctctcgttcaattcgatccattgaaaatcattgcaacgcatggggaacctatcccgacggaattgaaaaaaaatcttgtggctttatccaccggcactgataattccatccccagcatgggagaaaccgacgttgccttgggacggctttttggcgaagctgtcttaacgctgttagaaaaagcgaaggtttcctcggattccattcaggccattggcagtcacgggcagacaattcgacacatgcccaacgggaaacatccttttactctccaaatcggcgaccctaacaccattgccgccctcaccggcattacgacagtggccgattttcgacgtcgcgatatggctttaggggggcaaggagcgccgttagcgcctgcttttcatgaatttcttttacgcgatcaaagcgaaaaccggttgattttgaatattggcggtattgccaatctcacctttcttccgcgcgaccctgaaaaatctaccattggttttgacacggggccaggaaacactttgttggacgcctggtgcttaatgaatttaaataaagattacgatgatcaaggacagtgggccgcgagtggacgtgtgcaagaaaaattagtagcgcaattgttggcagaaccttattttcaaaccccgccccccaaaagcaccggtcgcgaatattttaaccttaattggcttaaaaaaaatttgaatggcgaaaaatttgatcccgtcgatattcaggcaacgctcgttgaattaacggcaagaagcgttgccaattgctgtcgaaatttttctatggattcgggaagtctgtggttatgcggcggcggggcccgcaatcatcatttggttaatcgtttaaaagtattgtgcaaaccactgcgtgttaccacaacagaagaaattgggattcatcccgattggcttgaagccgtttgtttcgcttggcttgccaaacaaaccttagaaaaaaaacccggcaatttacctagcgtcactggcgctaaaaaatccgctattttaggcgcgatttattggggtgaaaaatttaattattaa

SEQ ID NO: 29329 - protein, 372 aa, Coxiella burnetii RSA 493
MPKERYIGLISGTSMDALDTALVQFDPLKIIATHGEPIPTELKKNLVALSTGTDNSIPSMGETDVALGRLFGEAVLTLLEKAKVSSDSIQAIGSHGQTIRHMPNGKHPFTLQIGDPNTIAALTGITTVADFRRRDMALGGQGAPLAPAFHEFLLRDQSENRLILNIGGIANLTFLPRDPEKSTIGFDTGPGNTLLDAWCLMNLNKDYDDQGQWAASGRVQEKLVAQLLAEPYFQTPPPKSTGREYFNLNWLKKNLNGEKFDPVDIQATLVELTARSVANCCRNFSMDSGSLWLCGGGARNHHLVNRLKVLCKPLRVTTTEEIGIHPDWLEAVCFAWLAKQTLEKKPGNLPSVTGAKKSAILGAIYWGEKFNY

SEQ ID NO: 29330 - DNA, 1155 bp, Streptomyces avermitilis MA-4680
  CDS (1)..(1155): transl_table=11
gtgcgggtgatcggcctgatgtccggaacgtcgtacgacgcgatcgacgcggcggccgccgacctcggcctggccggggaccgtctcgtactgaagccactggggctgatgagcgaggcgtacgactccggcctcagggaggagctcgcggcggcgctgcccccggcggcgacgagcctggccggggtctgccgcctcgacacccggatcgggcaggccttcgcggcggcggccgtgcgggcggaccgtgaactgtgcggcgggcgagccgagttggtggcctcgcacgggcagaccgtctatcactgggccgaggcggggcgggtgtacggcacgctccagctcgggcagcccgcctggatcgccgaggcgaccggactgcccgtggtcgcggacttccgcccgcgcgacatcgccgccgggggtcagggcgcgccactggtcagcctggtcgacctgctgtggctgcgcggccgcgcggggacgtccgtggctctgaacctgggcggcatcgccaacctcacggcccccgacgggaccgcgttcgacaccgggccggcgtgcgcgctgatcgacgcggcggcgcacggtctgagcgggggccgcctcgaccacgacgtcgacggggcgctggcggcccgcggcaccgtgcacgagccgatgctgcgacggctgttggcggagccgtactacgcgctgcccgcgccgaagacgacgggcaaggagctgttccacctcggatatctgcgcgacgcgctcgccggattcgggacactgaccgccgaggacgtgatcgcgacgctcacccggctcaccgcgctgacggtcgcggacgccgtgcgcgcggtgcgggccacggaggtcgtcgcctccggcggcgggacccgcaatcccgtcctgatggagatgctcgcccgggaactgggcgcggtggccctgcgcacctccgacgaactcgggctgccctcggccgcgaaggaggcgtacgcgttcgccgtcctggggttcctgaccgtgcacggcctggcgggcaccgacccggtgagcaccggcgcacggcatcccagtgtgctcgggtcggtgacaccggggcgggacggactgcggctgccgccgcgcgcggactggtcacccgtacggctggtgctggagtga

SEQ ID NO: 29331 - protein, 384 aa, Streptomyces avermitilis MA-4680
MRVIGLMSGTSYDAIDAAAADLGLAGDRLVLKPLGLMSEAYDSGLREELAAALPPAATSLAGVCRLDTRIGQAFAAAAVRADRELCGGRAELVASHGQTVYHWAEAGRVYGTLQLGQPAWIAEATGLPVVADFRPRDIAAGGQGAPLVSLVDLLWLRGRAGTSVALNLGGIANLTAPDGTAFDTGPACALIDAAAHGLSGGRLDHDVDGALAARGTVHEPMLRRLLAEPYYALPAPKTTGKELFHLGYLRDALAGFGTLTAEDVIATLTRLTALTVADAVRAVRATEVVASGGGTRNPVLMEMLARELGAVALRTSDELGLPSAAKEAYAFAVLGFLTVHGLAGTDPVSTGARHPSVLGSVTPGRDGLRLPPRADWSPVRLVLE

SEQ ID NO: 29332 - DNA, 1182 bp, Bacillus cereus ATCC 14579
  CDS (1)..(1182): transl_table=11
atgcacgttatgtatattgcaggggtaatgtctggtacttcattagatggaatagatgtagcgctcgttcatatagaaggaagtggtgtagattctaaaatcgaactcattcattttactactgttccattttgtaatgatatgaaaaatgagatccaacaagcgttatcaattgaaacttcgaatgtccaacttatatgtagtttaaattttaaacttggtttatgcttcgccaatgctgtaaaggaagtttgtaaagaagccaattttcctttgagacaattagatttaataggctctcacggacaaacgatttatcatcagccaaagcaagaagggaatattatttcttcaacattgcaaattggggaaccagcagtaatagcatatgaaacgaacacgacggttatctcgaatttccgaacgatggacatggcggcagggggacaaggtgcaccacttgtaccatattcagagattattttatatcggcatcaaactaaaaatagactactacaaaatattggtggaattggtaatgttacagtggttccaagtaaacgaagtaaagagagtgttattgctttcgatactggaccaggcaacatggtaatcgatgaagtatgtcaaagattatttcatgtaccatatgatcaaaatggttggattgcaaagcagggggtagttgtagatgaaattttaacatactgtatgaaccatccatttttgaacatgaaaccaccaaaatcaacaggtagagaacagtttggagaagcgtttgtgactgaattattgaatcgatttaaaaagcatagtaaagaaaatatattggcaactgtcacgatgtttacagcatgttcaattgttcatcattataaggcgtttattttgccgtattatgaaattgatgaggtgattttaggtggtggtggaagttataataatacacttgttgaaatgttacggaatggattaagagaagagaaatgtagcatatgtatacaagaagatattggtcattcttcagcagcgaaagaagcaattgcatttgctattttagcaaacgaaacgtatcatcgtaatccgagtaatgtgctgagcgcaacaggtgctaagaattccgtaattttagggaatataacattccctccatacgcagatgaaaatgaggcgaatatatga

SEQ ID NO: 29333 - protein, 393 aa, Bacillus cereus ATCC 14579
MHVMYIAGVMSGTSLDGIDVALVHIEGSGVDSKIELIHFTTVPFCNDMKNEIQQALSIETSNVQLICSLNFKLGLCFANAVKEVCKEANFPLRQLDLIGSHGQTIYHQPKQEGNIISSTLQIGEPAVIAYETNTTVISNFRTMDMAAGGQGAPLVPYSEIILYRHQTKNRLLQNIGGIGNVTVVPSKRSKESVIAFDTGPGNMVIDEVCQRLFHVPYDQNGWIAKQGVVVDEILTYCMNHPFLNMKPPKSTGREQFGEAFVTELLNRFKKHSKENILATVTMFTACSIVHHYKAFILPYYEIDEVILGGGGSYNNTLVEMLRNGLREEKCSICIQEDIGHSSAAKEAIAFAILANETYHRNPSNVLSATGAKNSVILGNITFPPYADENEANI

SEQ ID NO: 29334 - DNA, 1092 bp, Nitrosomonas europaea ATCC 19718
  CDS (1)..(1092): transl_table=11
atgtattacgtcggcatcatgtcgggtaccagtctggatggtatcgatgcagtactggtagatttctccgggccgtcgttttcgctgctgcatacttgttatattccctatgatcagtctctccgagctgcgctgttgggcctgaatcaggccggtgaaaatgaactgcaccgtgcagctatactgagtaaccagttgtcagggtggtatgcgcaagcagtgggacggttgcttgagaaatccgggattgatcccggggagatcatagcagttggctgccatggccagacgatcaggcattgcccgcaaccggaaaacggctacagtatccaactggtaaatggtgccctgctggcggaattgacaggtatgactgtcgtgactgatttcaggagtcgtgatattgctgccggagggcagggagcaccactggttcctgcatttcatcatgaaatgtttgcacaccgggatattcaccgcctgatcatcaatatcggtgggatcaccaatataaccagtttacccgtcagtggcggtgtgaatggctttgactgtggaccagggaatatgttgatggatgcctggtgtctgaagcatacaggtatgacttatgaccacaatggatcatgggcggaatcaggaagggtgatcaatccactactggaaaatctgctgaattttccctatttttctttgccaccaccaaaaagtaccggcagagaaatgttcagtcttgactggttgcaaccttgtttgaggggtgatgaagctacacaggatgttcagtccacgttgctgcagttgactgtgcgaacgatcaccgattcagtcgagacttactatcctgctgtccgtgagctctatttatgcgggggaggggcgcataacggcaccctggttacccggttgcagcagcaattaccgggtcggagaatcaacctaactgatgcactgggtatcgaggctgactgggtggaggcgtgcgcattcgcctggctggcgcgacaatcgattgaacgcgctcctggcaatcttcctgctgtaaccggcgcaactggcagccggacgctgggtgcgatttacccggcctga

SEQ ID NO: 29335 - protein, 363 aa, Nitrosomonas europaea ATCC 19718
MYYVGIMSGTSLDGIDAVLVDFSGPSFSLLHTCYIPYDQSLRAALLGLNQAGENELHRAAILSNQLSGWYAQAVGRLLEKSGIDPGEIIAVGCHGQTIRHCPQPENGYSIQLVNGALLAELTGMTVVTDFRSRDIAAGGQGAPLVPAFHHEMFAHRDIHRLIINIGGITNITSLPVSGGVNGFDCGPGNMLMDAWCLKHTGMTYDHNGSWAESGRVINPLLENLLNFPYFSLPPPKSTGREMFSLDWLQPCLRGDEATQDVQSTLLQLTVRTITDSVETYYPAVRELYLCGGGAHNGTLVTRLQQQLPGRRINLTDALGIEADWVEACAFAWLARQSIERAPGNLPAVTGATGSRTLGAIYPA

SEQ ID NO: 29336 - DNA, 1134 bp, Prochlorococcus marinus subsp. marinus str. CCMP1375
  CDS (1)..(1134): transl_table=11
atgtatgttttgggtttaatgagtgggactagcgctgatggtgttgatgctgtgttagtggattttagaggtaatttaaataaacctagatggaaattacttaattcagtctcactcaaatattcggttgatttgcagaaagcaattattgatgctggacagggttctaagttgagtggctgtgattggctggaactttctgaagcgattacagaagcccatttttcagcagcaagtagatgtgaccctgatggaatttctactgttgtaggttgccatggacaaactgtttgtcatagaccaccgaaaccctcttttagaggagcaagctggcagcttattcaagcacctttattagcaactcttctagggaaaaatgtcatttatgatttcagatctaaggatcttgctttaggaggacaaggtgctcctttagccccatttttggattatgcattaataggaagagggaagacttggagaggagttcttaatcttggaggtattgccaatctttcattaattccgcctcttaagggtcctcatcgcaaatgccatttattgggatgggattgtggtcctgctaatactcttatagaccttgccgttcagaaaatcactaatgggcaaatgaattttgattgtgatggattgatggcttcaaaaggaaaacctgacttggatgcaataaaaaaatggcttaaggaagatttttttcaacagcctcctccaaaatcaactggtagagaatattttggttctcttgatttagccaaaagattctctgagattaattcagccaatgtaaatgatttagttgctactatcacttgctttactgcttgtgttgttgcccaagatttaaataatttatttaaaaagtcttggattaagcctgctgaattgtttgtagcaggtggaggaagtagaaatattttccttatgaaagaaattacgaatagatccccaggaatacgagttttgtctactgaaaaaattggaatcccttcgcaaagtagagaagctatggcatttgcattattggcatggtggaatattaatcaaaagcctattaacactaacgttacagggttaaaagaaccctctgttcttggcattgcagttagaccataa

SEQ ID NO: 29337 - protein, 377 aa, Prochlorococcus marinus subsp. marinus str. CCMP1375
MYVLGLMSGTSADGVDAVLVDFRGNLNKPRWKLLNSVSLKYSVDLQKAIIDAGQGSKLSGCDWLELSEAITEAHFSAASRCDPDGISTVVGCHGQTVCHRPPKPSFRGASWQLIQAPLLATLLGKNVIYDFRSKDLALGGQGAPLAPFLDYALIGRGKTWRGVLNLGGIANLSLIPPLKGPHRKCHLLGWDCGPANTLIDLAVQKITNGQMNFDCDGLMASKGKPDLDAIKKWLKEDFFQQPPPKSTGREYFGSLDLAKRFSEINSANVNDLVATITCFTACVVAQDLNNLFKKSWIKPAELFVAGGGSRNIFLMKEITNRSPGIRVLSTEKIGIPSQSREAMAFALLAWWNINQKPINTNVTGLKEPSVLGIAVRP

SEQ ID NO: 29338 - DNA, 1137 bp, Bordetella pertussis Tohama I
  CDS (1)..(1137): transl_table=11
atggacagcacgacgcacggcccgcgcacccatgtgccgggccgtttgttcatcggcctgatgtccggcaccagcatggacggcgccgacggcgtgctggtacggctggacgggccgcgacccgaggtgctggccagcgccagcctgcccatgcccgccgccctgcgcgacgagctgttcgcgctcaaccatgccggcgccaacgagctggagcgcgccgcgctggccgccaacggcctggcgcgcctgtatgcccgggccgtgcgccagttgctggaccaggccggactgcaacccggcgacgtggcggcgatcggcgcccacggccagaccgtcaggcaccgccccgacctgggctataccctgcaactgaacgcgccggccctgctggccgagctggccggcatcgacgtggtggccgatttccgcagccgcgacgtggccgccggcggccagggcgcgccgctggtgccgcctttccatgccgcgttgtttgccggcggccaggcgcgcgccgtgctcaacctgggcggcatcgccaatgtcacgctgctcgaacccggccggccgccgcgcggcttcgacaccgggccggccaacgtcctgctggacgcatggtgccagcgccacaccggccagccttacgacgccgacggccggttcgccgcgcaaggccaggtgctggccgacctgctcgaacacctgatcgccagcgagccgtggttcgccctggcgccgcccaaatcgaccggacgcgacctgttcaacctggattggctgctggcacggctgcaggcattcgatggcccggcgccgcaaccgcaggacgtgcaggccacgctgcagcgcctgacggcgcgcacggtcgccaatgccatcgacgccagcgcggccgcgccgcgcgatgtgctggtctgcggcggcggagcccgcaatccgggcctgatgcgcgagctggcctattgcctgcagcgcccggtacgccccaccgacgatgccggcgtgccggcacagtgggtcgaggcgctggccttcgcctggctggcccaggcctgcctggaccgcattcctgccggcctgcccacggtcaccggcgcgcgcgccgcgcgcgtgctgggcgcgctctatcctgcctga

SEQ ID NO: 29339 - protein, 378 aa, Bordetella pertussis Tohama I
MDSTTHGPRTHVPGRLFIGLMSGTSMDGADGVLVRLDGPRPEVLASASLPMPAALRDELFALNHAGANELERAALAANGLARLYARAVRQLLDQAGLQPGDVAAIGAHGQTVRHRPDLGYTLQLNAPALLAELAGIDVVADFRSRDVAAGGQGAPLVPPFHAALFAGGQARAVLNLGGIANVTLLEPGRPPRGFDTGPANVLLDAWCQRHTGQPYDADGRFAAQGQVLADLLEHLIASEPWFALAPPKSTGRDLFNLDWLLARLQAFDGPAPQPQDVQATLQRLTARTVANAIDASAAAPRDVLVCGGGARNPGLMRELAYCLQRPVRPTDDAGVPAQWVEALAFAWLAQACLDRIPAGLPTVTGARAARVLGALYPA

SEQ ID NO: 29340 - DNA, 1137 bp, Bordetella bronchiseptica RB50
  CDS (1)..(1137): transl_table=11
atggacagcacgacgcacggcccgcgcacccatgtgccgggccgtttgttcatcggcctgatgtccggcaccagcatggacggcgccgacggcgtgctggtacggctggacgggccgcggccggaggtactggccagcgccagcctgcccatgcccgccgccctgcgcgacgagctgttcgcgctcaaccatgccggcgccaacgagctggagcgcgccgcgctggccgccaacggcctggcgcgcctgtatgcccgggccgtgcgccagttgctggatcaggccggactgcagcccggcgacgtggcggcgatcggcgcccacggccagaccgtcaggcaccgccccgacctgggctataccctgcagctgaacgcgccggccctgctggccgagctggccggcatcgacgtggtggccgatttccgcagccgcgacgtggccgccggcggccagggcgcgccgctggtgccgcctttccatgccgcgttgtttgccggcggccaggcgcgcgccgtgctcaacctgggcggcatcgccaatgtcacgctgctcgaacccggccggccgccgcgcggcttcgacaccgggccggccaacgtcctgctggacgcatggtgccagcgccacaccggccagccttacgacgccgacggccggttcgccgcgcaaggccaggtgctggccggcctgctcgaacacctgatcgccagcgagccgtggttcgccctggcgccgcccaaatcgaccggacgcgacctgttcaacctggattggctgctggcacggctgcaggcattcgatggcccggcgccccaaccgcaggacgtgcaggccacgctgcagcgcctgacggcgcgcacggtcgccaatgccatcgacgccagcgcggccgcgccgcgcgatgtgctggtctgcggcggcggagcccgcaatccgggcctgatgcgcgagctggcctattgcctgcagcgcccggtacaccccaccgacgatgccggcgtgccggcacagtgggtcgaggcgctggccttcgcctggctggcccaggcctgcctggaccgcattcctgccggcctgcccacggtcaccggcgcgcgcgccgcgcgcgtgctgggcgccctctatcctgcctga

SEQ ID NO: 29341 - protein, 378 aa, Bordetella bronchiseptica RB50
MDSTTHGPRTHVPGRLFIGLMSGTSMDGADGVLVRLDGPRPEVLASASLPMPAALRDELFALNHAGANELERAALAANGLARLYARAVRQLLDQAGLQPGDVAAIGAHGQTVRHRPDLGYTLQLNAPALLAELAGIDVVADFRSRDVAAGGQGAPLVPPFHAALFAGGQARAVLNLGGIANVTLLEPGRPPRGFDTGPANVLLDAWCQRHTGQPYDADGRFAAQGQVLAGLLEHLIASEPWFALAPPKSTGRDLFNLDWLLARLQAFDGPAPQPQDVQATLQRLTARTVANAIDASAAAPRDVLVCGGGARNPGLMRELAYCLQRPVHPTDDAGVPAQWVEALAFAWLAQACLDRIPAGLPTVTGARAARVLGALYPA

SEQ ID NO: 29342 - DNA, 1140 bp, Prochlorococcus marinus str. MIT 9313
  CDS (1)..(1140): transl_table=11
atgcgcgtactggggctgatgagcggcaccagtgctgatggtgttgatgcagtactcgctgagttcagcggttcaccatctgaaccaaaatggtcgctactaaatcttgtctgcatcccctaccccgaggatcttcgccaaacagttgtcaacgcaggacaaggcatcaaactcaatagctgtgaatggctcgagctatctgagtccatcaccgaggttcatgctcaagcagctctggcctgtgaccccagagcacaagctgagctcgtgggttctcatggtcagactgtttggcatcgtcctcctcagaagaatcatcgcggcgccagctggcaaatcctgcaagcccctctactggctgaactgctcaagcgccctgttgttcatgacttccgagccgcagacctggcactaggaggccagggagcacctttggtacctatggctgatgccgcactgctaggtcgagtagggggctggcgtggggtgctcaatcttggaggaattgccaatctcaccctgattcctccccgcagcggtccggatcgccttgcttcagttatgggctgggattgcggcccagccaacagcctgatagatcttgctgttgaacagatcagcaaaggcaagcttgcctttgatcatgatggaatcatcgctgccagtgggcatccgcatacgaccacgatcgaacgctggctgaaggaaaccttcttccaactccctcctcccaaatcaacaggccgggagcaatttgggcttgccgatctagagcagcgcctcaaggaactccccaagatgtcgagggccaatcgtgtcgccacattgaccgctttcagcgcagccgttgtggcacaggatctggacaatcttcaccttagaaatctggttcgccccctggaactcattgttgctggtggaggaagccgaaatcctgtgctgatgaacgaactaagacaacgctgccgtggcatgcgactcctcaatagcgatgagctgggcctcagcgctgaagcccgagaaggtcttgcctttgcattacttgcctggtggcattgcctccagtatccaggcaacgctccggccataacaggggccaagcgtgcggcagttcttggtgtgagagctgatccagcttga

SEQ ID NO: 29343 - protein, 379 aa, Prochlorococcus marinus str. MIT 9313
MRVLGLMSGTSADGVDAVLAEFSGSPSEPKWSLLNLVCIPYPEDLRQTVVNAGQGIKLNSCEWLELSESITEVHAQAALACDPRAQAELVGSHGQTVWHRPPQKNHRGASWQILQAPLLAELLKRPVVHDFRAADLALGGQGAPLVPMADAALLGRVGGWRGVLNLGGIANLTLIPPRSGPDRLASVMGWDCGPANSLIDLAVEQISKGKLAFDHDGIIAASGHPHTTTIERWLKETFFQLPPPKSTGREQFGLADLEQRLKELPKMSRANRVATLTAFSAAVVAQDLDNLHLRNLVRPLELIVAGGGSRNPVLMNELRQRCRGMRLLNSDELGLSAEAREGLAFALLAWWHCLQYPGNAPAITGAKRAAVLGVRADPA

SEQ ID NO: 29344 - DNA, 1140 bp, Synechococcus sp. WH 8102
  CDS (1)..(1140): transl_table=11
atgctctgcctcggcctgatgagtggcaccagtgccgacggcgtcgatgcggtgttggctcgcttccagggtgctcccgatcgtcctgagtggcagctgctgagccatcaccacagcccttacccagctgcacttcgggacgagctggtgcgaatcggccagggagaagcacgaccggccgcggccctgctggatctggcggaggcggtgaccgaacatcaggcgctggcggctcgcggcgccgaccccgatcagcgcgcgagcctgatcggttgccatggccagaccctctggcatcgcccacccagcagcgacaagcgcggcgccagctggcagttgctgctggctccgctgctggcccagctcttggcacggccggtggtgcacgatttccgcgccaccgacctggccctgggaggtcagggggcgcccctggtgcccagggccgatgctgccctgatcgggcctggggacggctggcggggggtgctcaacctgggggggattgccaacctcaccctgatcccaccgcgctggggaccgcagaagcaggaatcggtcctgggctgggactgtggaccagcgaacagcctgatcgatctggcgatggagcagttcagcgatggccagcagctgtttgatcgcgacggtgccatggccgcagcagggcgttgcgacgacggcatgattcaacgttggttgcgggagccctacttccagctcagcccgccgaagtcaactgggcgggaatgcttcggccaagaggatctcagacgtcgcctgcaggagctggaatcggttgagagggccgatgcggtggccaccctcaccggcttcaccgcggcggtggtggctcaggatcttgaccgattgcgggcggacagaagcatccaccttctggagctgctggtggccggcggcggctgccgcaatccagttctgatgagcgaactccaacgtcgctgccggggactggccgtccgggccagcgatcagattggattggcggcggaggcaagggaagcgctcgtctttgcgctgctggcctggtggcatcaccgcggccacccaggcaatgctcccgccatcacaggcgcaacgcgggaagcatgcctcggcgtcagggttgcccccgcttga

SEQ ID NO: 29345 - protein, 379 aa, Synechococcus sp. WH 8102
MLCLGLMSGTSADGVDAVLARFQGAPDRPEWQLLSHHHSPYPAALRDELVRIGQGEARPAAALLDLAEAVTEHQALAARGADPDQRASLIGCHGQTLWHRPPSSDKRGASWQLLLAPLLAQLLARPVVHDFRATDLALGGQGAPLVPRADAALIGPGDGWRGVLNLGGIANLTLIPPRWGPQKQESVLGWDCGPANSLIDLAMEQFSDGQQLFDRDGAMAAAGRCDDGMIQRWLREPYFQLSPPKSTGRECFGQEDLRRRLQELESVERADAVATLTGFTAAVVAQDLDRLRADRSIHLLELLVAGGGCRNPVLMSELQRRCRGLAVRASDQIGLAAEAREALVFALLAWWHHRGHPGNAPAITGATREACLGVRVAPA

SEQ ID NO: 29346 - DNA, 1083 bp, Chromobacterium violaceum ATCC 12472
  CDS (1)..(1083): transl_table=11
atgatgtccggcaccagcctggacggcgtggacgccgtgctggtgcgcttcgacgacgccggccgcccggagccgcaggccgaccacgtcgtgccctatcccgacgcggtcaagcaagccgtgctggcgctgcagccccgcggccatgacgagctgcaccgcgcgcaaaccctggccaaccggctggcggagatttacgcccaggccgcgcgcgagctgctgcagaagtccggccgccgcgcggaggacatccgcgccatcgcctgccatggccagaccgtgcgccatgcgccgcacgacggctacacggtccagatcggcaatatggccaagctggccgagctggccggcatcgacgtgatagcggacttccgcagccgcgatgtcgccgccggcggccatggcgcgccgctggtgcccgccttccagcaaggcgcgttctccagcccggacgaaaaacgcgtgatcctgaacatcggcggcatcagcaacatcgctcggctgcacgcgggccaagaggcgataggtttcgactgcggccccggcaacatgctgatggacgcctggtgcctgcgccacaccggccagcccttcgacgaagacggcaattgggccgccggcggcgcggttcacccgccgctgctggccgcgatgctggccgaaccctacctgacgcagccgccgcccaagagcaccggccgcgacctgttcgacgacgagtggctggcgggcaagctgggcgccttgccatccgccccgcctccgcgcgacgtgcaggccactctgctggccttcagcgcccgcggcatcgccgacgccatcctggagcactgtcccggcaaccaggcggtctacgtctgcggcggcggcgcgcgcaacggcgcgctgatggctgaaatcgcccgccagctgcccgggcagcgcgtggccgccatcgaggcgctgggcctgcccgcgcagctgatcgaggcgatcgccttcgcctggctgggatggcgcttcgaccgacgccaggccggcaacctgccctccgtcaccggcgcgcaaggcccccgcgtgctgggcgcgctgtatcctcggtga

SEQ ID NO: 29347 - protein, 360 aa, Chromobacterium violaceum ATCC 12472
MMSGTSLDGVDAVLVRFDDAGRPEPQADHVVPYPDAVKQAVLALQPRGHDELHRAQTLANRLAEIYAQAARELLQKSGRRAEDIRAIACHGQTVRHAPHDGYTVQIGNMAKLAELAGIDVIADFRSRDVAAGGHGAPLVPAFQQGAFSSPDEKRVILNIGGISNIARLHAGQEAIGFDCGPGNMLMDAWCLRHTGQPFDEDGNWAAGGAVHPPLLAAMLAEPYLTQPPPKSTGRDLFDDEWLAGKLGALPSAPPPRDVQATLLAFSARGIADAILEHCPGNQAVYVCGGGARNGALMAEIARQLPGQRVAAIEALGLPAQLIEAIAFAWLGWRFDRRQAGNLPSVTGAQGPRVLGALYPR

SEQ ID NO: 29348 - DNA, 1140 bp, Gloeobacter violaceus PCC 7421
  CDS (1)..(1140): transl_table=11
gtggatccaacgctggcggtcgggctgatcagcggcacttcgctagacggcatggacggggcactggtagaaattgcaggcagcgcgcagcagccggcggtaacaacccttgccacgctcgccttaccttacccggcagggctgcgcgggcggctgttgcatctggcggagggcaaacccgttccagtggccgaggtgagtgcgctgcaccgcgatgtcgccctcgcctttgcggactgcgccctgcaacttatcgagcaggcgggctttcgctgcgggcagatcgcctgcatcggctcccatggccagaccgttcatcaccagcccccggccgacaacgcagcgggacacacgttgcagttgggcgacggcgcctggatcgccgagcgcaccggggtgacgaccgtgggcaactttcgcacccgcgacatggcggcgggtggccagggtgccccactggtgccgatcctcgactatttgctgttgcgcgacgcccggcgcgaccgctgcatccagaatctgggcggtattgccaatgtcacctacttgcgcgccgggggcggccctgaggaagtgatcgccttcgacaccggcccggccaatctgctcatcgacggcaccgtgcagattgccctgggcgaacccttcgaccggggcggcagcctggcgctgcaaggcacggtcgaccgggactgcctggagcggtggctggccgatccgtactttcgccggccgccccccaaatcgaccggccgcgagtacttcggctacgcgcgcgcccggcggctggccgaggagagcgctcatctgccggtggccgaccgggtggcgacggtgagcgaactgaccgtgcgctcgatcgaacgggcctaccgcgattttttgccccggcttcccgatgaggtgttcctgtgcgggggcggggcacgcaacggctatatccgcgcgcgcctcgggcgattgctcgccccggcgcgcgtcgccgtcagcgacgaagccggcatcgatccggacttcaaagaggcgatggcctttgcgctgctcgcctggttacgctgtaccggggcgccggggaatttgcccgcggtgaccggggccgggcgggcggttcccctgggcgacgtgcatcccgccgggtaa

SEQ ID NO: 29349 - protein, 379 aa, Gloeobacter violaceus PCC 7421
MDPTLAVGLISGTSLDGMDGALVEIAGSAQQPAVTTLATLALPYPAGLRGRLLHLAEGKPVPVAEVSALHRDVALAFADCALQLIEQAGFRCGQIACIGSHGQTVHHQPPADNAAGHTLQLGDGAWIAERTGVTTVGNFRTRDMAAGGQGAPLVPILDYLLLRDARRDRCIQNLGGIANVTYLRAGGGPEEVIAFDTGPANLLIDGTVQIALGEPFDRGGSLALQGTVDRDCLERWLADPYFRRPPPKSTGREYFGYARARRLAEESAHLPVADRVATVSELTVRSIERAYRDFLPRLPDEVFLCGGGARNGYIRARLGRLLAPARVAVSDEAGIDPDFKEAMAFALLAWLRCTGAPGNLPAVTGAGRAVPLGDVHPAG

SEQ ID NO: 29350 - DNA, 1119 bp, Photorhabdus luminescens subsp. laumondii TTO1
  CDS (1)..(1119): transl_table=11
atggttatgaagtcaggtcgttatattggtgtaatgtcgggtacaagtctggatggcgttgatgtggtgcttgccgcaatcaatgataaagttgttgctcagcaagccagttattcgcatccattcccatacgaattaaaacagaaaattctcgcagtctgtcaagggcagcaaacgacattatcggcaatcggtcggttggattatgaacttggttctttattcgctgaagctgtacaaggcttactgattaaaacagggttaaccgcgagtgacattactgctgtgggatgtcatgggcaaaccgtttggcatgagccaaatagtcatacgcctttcacgatgcaacttggcgacaataaccgtattgccgctttgactgggataactgtggttggtgattttcgtcggagggatatggcatatggtgggcagggcgcgccattagttccagcttttcatttcgccgtattaggccatctgacagaacgaaggataattctcaatatcggtggtattgccaatataacgacgctattacctggatcacctgtcaaagggtatgacacaggtccgggtaatatgctgatggatagttgggtatggcgtcatcagaaaaaaccttatgataaagatgcgcaatgggcgcgagaaggtgttgttaataacaaattgcttgggcaaatgctttctgatcactatttttcacgaccagctcctaaaagcacaggccgcgagtatttcaatatgagttggttggaggcgcaattagttaattttcctgacataccacctgtcgatgttcaggcaacgctggccgagctgacagcagcgtctgtatcacagcaaattatgttgagtggtggatgtgaacgtctgctggtttgtggtggtggcgcacataacccgcagataatgagccgactttctgccttattaccggggacggaggtttgcccgacagataaatatggcctaagcggtgatgatatggaagcactggcatttgcttggttagcattccgtacaatgtcaggtgcgccagggaatttaccctctgttactggtgcgagtactgaaactattttaggggcgatttatcctgttattaatcaataa

SEQ ID NO: 29351 - protein, 372 aa, Photorhabdus luminescens subsp. laumondii TTO1
MVMKSGRYIGVMSGTSLDGVDVVLAAINDKVVAQQASYSHPFPYELKQKILAVCQGQQTTLSAIGRLDYELGSLFAEAVQGLLIKTGLTASDITAVGCHGQTVWHEPNSHTPFTMQLGDNNRIAALTGITVVGDFRRRDMAYGGQGAPLVPAFHFAVLGHLTERRIILNIGGIANITTLLPGSPVKGYDTGPGNMLMDSWVWRHQKKPYDKDAQWAREGVVNNKLLGQMLSDHYFSRPAPKSTGREYFNMSWLEAQLVNFPDIPPVDVQATLAELTAASVSQQIMLSGGCERLLVCGGGAHNPQIMSRLSALLPGTEVCPTDKYGLSGDDMEALAFAWLAFRTMSGAPGNLPSVTGASTETILGAIYPVINQ

SEQ ID NO: 29352 - DNA, 1164 bp, Vibrio vulnificus YJ016
  CDS (1)..(1164): transl_table=11
atgaatttgcattacaatggtttgcatgatgaaaacacaatggaattgagtgtgagcacaaaagagttatatatcggtgtcatgtccggcacgagtatggatggggtagattgtgccctcgtggagttcgaccaagagcaagtccgcttaattgcccacagtgactacccgatgccagcagacttgcgccagcaactgctctccgtttgcactgggcaagccaccaacttaaagcagattggcgaacttgatcaccgcctcggccatctttttgccgatgccgtgatggatttgctcagccaagcaggcgtcgacgcgagccagatctgcgctatcggtaatcatggccaaacggtatttcatcaaccgaatggcgagtttccttttaccacccaattgggcgacgccaacattattgccacccgcaccaacattgacaccgtggcagattttcgtcgcaaagacatggcattgggcggccaaggcgcccctttggttccggcttttcatcaaagtgtatttgcgctgcaagattccacgaccgtggtgttgaatatcggcgggattgccaatatctcagtgctccacccaacccgccctgttcttggttacgacacaggacctgggaatatgttgatggatgcttggtgtgaaacacacacacaacagaattacgacaaagacgcgcggtttgctctccaaggagaggtaaatgaggcgttactgaattcgctgttgcaagagccttatttgcatcaagatgccccaaagagcacagggcgcgagcttttcaatatggaatggttgacagcaaaactgcaagggcagaactatcgaagcgaagatgtacagcgcaccttgtgtgagtacaccgccttaaccattagtaaagaagttgagcgctttcgctatggtccaacaccgcagttgctggtttgtggtggcggcgcgcgtaacccactgttgatgcaacgattgcagcaacagctgtctcactggcaggtctcaacgaccgatgcaaaaggggtcagtggggactacatggaagccatggcgtttgcttggttggcctatcgccacatgcaccgcttaccgagtaatttacccgaagtgactggcgcgagccgcttggcgagcctcggtgtcctctatcccaaagcctag

SEQ ID NO: 29353 - protein, 387 aa, Vibrio vulnificus YJ016
MNLHYNGLHDENTMELSVSTKELYIGVMSGTSMDGVDCALVEFDQEQVRLIAHSDYPMPADLRQQLLSVCTGQATNLKQIGELDHRLGHLFADAVMDLLSQAGVDASQICAIGNHGQTVFHQPNGEFPFTTQLGDANIIATRTNIDTVADFRRKDMALGGQGAPLVPAFHQSVFALQDSTTVVLNIGGIANISVLHPTRPVLGYDTGPGNMLMDAWCETHTQQNYDKDARFALQGEVNEALLNSLLQEPYLHQDAPKSTGRELFNMEWLTAKLQGQNYRSEDVQRTLCEYTALTISKEVERFRYGPTPQLLVCGGGARNPLLMQRLQQQLSHWQVSTTDAKGVSGDYMEAMAFAWLAYRHMHRLPSNLPEVTGASRLASLGVLYPKA

SEQ ID NO: 29354 - DNA, 1104 bp, Rhodopseudomonas palustris CGA009
  CDS (1)..(1104): transl_table=11
atgatgatgacggcgatcggactgatgagcgggacgtcgctcgacggcgtcgatgtcgctctgatcaagaccgacggacggcgcgtcggagcgctcggaccgtcgggctaccggccttacaccgagaccgagcgcagcctgctgcgccaagcgcttgctgaagcggtgcaactgactgcgcgcgatgctcggcccggcgtgctcgccgaagccgagcgcgcggtgacgatcgcccacgccgaggctgtcgccgcgtttgtggcgcagaaccggctgtcccccgggagcgtcgatatcgtcggcttccacggccagaccgtgctgcaccggccggccgaaaagctcacggtgcagatcggcgacgccaaggcgctggccaaggcgatccgcattccggtggtgtgcgacttccgcgccgccgatgtcgcggccggcgggcagggcgcgccgctggtgccggtgtatcaccgcgcgctggcgcaatcgctcggccgtgacggcccgatcggcgtaatcaatgtcggcggggtctccaacgtcacttatatcgacggcaccgacacgctgattgcctgcgacactggcccaggcaacgcgctgctcgacgacttcatgttccgcacgctcggcaagccgttcgattgcgaaggccggctggcgtcgcagggcgtgatcgatcaggcgtggctcacggaagcgctgcagcatccgttcttcgccaagccgacgccgaaatcgctcgaccgcaacgacttcgccaacctgaccttgcgcgactggtcgccagcggacggggcggcgacgctgacggcgttcaccgcgcgcgcgattgcggcggtgcagccgctgctgccgaagccgcctcagagttggatcgtgaccggcggcggtgcgcgcaacctgacgctgatgcggatgttgcgcgaggcgctggctccagccagcgtcgagagcgccgatgcgctcggctggtcggccgacgcgatggaggcgcaggcgttcggcttcctcgccacgcgcgggctgaagggcctgccgctgagctatccggcgaccacgggcgtcgcctttccgatgaccggcgggcttctggcgcggccgtaa

SEQ ID NO: 29355 - protein, 367 aa, Rhodopseudomonas palustris CGA009
MMMTAIGLMSGTSLDGVDVALIKTDGRRVGALGPSGYRPYTETERSLLRQALAEAVQLTARDARPGVLAEAERAVTIAHAEAVAAFVAQNRLSPGSVDIVGFHGQTVLHRPAEKLTVQIGDAKALAKAIRIPVVCDFRAADVAAGGQGAPLVPVYHRALAQSLGRDGPIGVINVGGVSNVTYIDGTDTLIACDTGPGNALLDDFMFRTLGKPFDCEGRLASQGVIDQAWLTEALQHPFFAKPTPKSLDRNDFANLTLRDWSPADGAATLTAFTARAIAAVQPLLPKPPQSWIVTGGGARNLTLMRMLREALAPASVESADALGWSADAMEAQAFGFLATRGLKGLPLSYPATTGVAFPMTGGLLARP

SEQ ID NO: 29356 - DNA, 1152 bp, Bacillus cereus ATCC 10987
  CDS (1)..(1152): transl_table=11
atgtatgttgcaggggtaatgtctggtacttcgttagatggtatagatgtagcactcgttcatatagaaggaagcggtgtaggttctaaagttgaactcatccattttactactgtgccatttcgtaatgatataaaaaatgagattcagcaagtattatcaataaaaaattcaaatgtccaactcatatgtagtttgaattttaagttaggtttatgtttcgctaaagccgtaaaggaagtttgtaaagaggccaatttttctttggaacaattagatttgataggttctcacggacaaacgatttaccatcagccaaagccagaaggtaatatgatatcttccacattgcaaattggggaacctgcagtaatagcatatgaaacgaatacgacggttatttctaattttcgaacgatggacatggcagctgggggacaaggtgcaccacttgtaccatattcagagattattttatatcgtcatccaactaaaaatagactactacaaaatatcggcgggattggtaatgttaccgtaataccaagtcaaaaaagtgatcagaatgttatagcttttgatactggtccgggtaatatgataattgatgaagtatgtcaaaggttatttcagttgccatatgatcaaaatggtgaaattgcagaacagggtgaagttgtagatgaaattttgacatattgtatgaatcattcatttttgaaaatgaatccaccgaaatcaactggtagagaacagtttggtgaagagtttgtaagtcagttattgaagcggtatgaaaagcatagtaaagaaaatatattaacgactgtcacgatgtttacagcaagttcaattgttcatcattataaggagtttattctgccatattatgaaattgatgaggtaattttaggcggtggcggcagttataatgacacacttgttgaaatgatacggtatggattgaaggatgaaaaatgtacaatattcattcaagaagatataggctattcttcagaggcgaaagaagcaatcgcctttgccattttagcaaacgaaacgtatcatcgtaatccgagtaacgtgccgagcgcaacaggtgcaatgcaatctgtagtattagggaatataacattccctccaataagatga

SEQ ID NO: 29357 - protein, 383 aa, Bacillus cereus ATCC 10987
MYVAGVMSGTSLDGIDVALVHIEGSGVGSKVELIHFTTVPFRNDIKNEIQQVLSIKNSNVQLICSLNFKLGLCFAKAVKEVCKEANFSLEQLDLIGSHGQTIYHQPKPEGNMISSTLQIGEPAVIAYETNTTVISNFRTMDMAAGGQGAPLVPYSEIILYRHPTKNRLLQNIGGIGNVTVIPSQKSDQNVIAFDTGPGNMIIDEVCQRLFQLPYDQNGEIAEQGEVVDEILTYCMNHSFLKMNPPKSTGREQFGEEFVSQLLKRYEKHSKENILTTVTMFTASSIVHHYKEFILPYYEIDEVILGGGGSYNDTLVEMIRYGLKDEKCTIFIQEDIGYSSEAKEAIAFAILANETYHRNPSNVPSATGAMQSVVLGNITFPPIR

SEQ ID NO: 29358 - DNA, 1311 bp, Neurospora crassa
  CDS (1)..(1311)
atgccttccgcaacaaacctctcgtggggtgctcctctctctctcaaggtcatcggccacaatgccggaacctccatggacggagtcgacctcgtccacgtccacttcacccaggactcgcccacctcccccctcaacatgcagcttctccactacggggagtacccaatgccgcaaaaggtcaagaggcgcgtcatgaagctcatcaaggaaaacaagaccacccccgaggaaatggccattgtcaacatccagctcggcgaggtcattgccgacgccgtcaactcgttcgcccgggaccaaggcttcgacctggcaaaggacgtcgacctgattggtggtcagggccagaccatctggcatctgcctctgcccgagctcttcgagggtgaccagatgcgtgcccacttggacatggccgagattgccatcattgccgcaaacaccggcgtcacttccttgggcaacttccgcgtctctgacatggcactcggccgccagggctgtcctctctttgccgctctcgactcgctgctgttgagccaccctaccctcaaccgggccgttcagaacattggcggtattgccaacttctccatcctgcccaagggcaatgtgcagggttgctatgacttcgacacgggcccaggaaacgtctttatcgatgccgctgtccgttacttcaccgacggcgagcaggagtacgacaagaacggtgccatgggcgccaagggtagggtcgaccaagcgattgtggacgagatcctggcgggaccttactttgtccacgacattcccaagaccactggtcgagaaacgtttggtgaccgtatggccgaggacatttgcgacaggatgttggccgatggcgccactcccgaggactgcgtggcaaccatcacccgcatcacggctcagtctcttgccgacgcttacgagcgctggggccccgaaggcggtgttgacgagatctacatgggcggcggtggctcctataaccccaacattgtcaactatctcaagcagcgcctgcccagtacccgcatcacatatatcgacgagactggtatccccgtcggcgccaaggaggctctggggttcgcccttctcacacacgagtgcttcgttggcaggccaatgatcgtgcccaccaacaccgagtcggacaagcctggtgttgttggccagattcagccggggaagaacatgcaccgtattagacaagccgttgctcagttctggggtgactttccagaggaggaaattcgatgtaccacccagatgaaccttttgcctagcctctgcaactga

SEQ ID NO: 29359 - protein, 436 aa, Neurospora crassa
MPSATNLSWGAPLSLKVIGHNAGTSMDGVDLVHVHFTQDSPTSPLNMQLLHYGEYPMPQKVKRRVMKLIKENKTTPEEMAIVNIQLGEVIADAVNSFARDQGFDLAKDVDLIGGQGQTIWHLPLPELFEGDQMRAHLDMAEIAIIAANTGVTSLGNFRVSDMALGRQGCPLFAALDSLLLSHPTLNRAVQNIGGIANFSILPKGNVQGCYDFDTGPGNVFIDAAVRYFTDGEQEYDKNGAMGAKGRVDQAIVDEILAGPYFVHDIPKTTGRETFGDRMAEDICDRMLADGATPEDCVATITRITAQSLADAYERWGPEGGVDEIYMGGGGSYNPNIVNYLKQRLPSTRITYIDETGIPVGAKEALGFALLTHECFVGRPMIVPTNTESDKPGVVGQIQPGKNMHRIRQAVAQFWGDFPEEEIRCTTQMNLLPSLCN

SEQ ID NO: 29360 - DNA, 1305 bp, Dictyostelium discoideum
  CDS (1)..(1305)
atgagtgatatatttattggtgtaatgtcaggtacatcattggatggtattgatgttgtaattgttgaatttaatgataatgatgatgatataaaaagaataaatgttaaacaaagttattcacatccaatgccaattaatataaagaatgatatattatcaatgtgtcaaggtcaaaaaactacattatcagaagttggtaatttaaatagaagattaggtatagtttattcagaagcaataaatgaagcaataaagttatcatcaattgatccaaattcaatttcagcaattggatgtcatggtcaaactgtttggcatcaaccaccaaccagaaaacatggtgatgatggtgataatgatgataatgatgatgataatgatggatttacaattcaattaggtgattgtaatagaattgcaacattaactggtataactacaattggtgattttagaaatagagatatttcatatggtggacaaggtgcaccattaacaccatcatttcataaatattcattatcaagtttcaatgaaaatagaatcattttaaatattggtggaatttctaatataactttattaccatcattatcatcatcatcatcatcatcaaataatattcaagttacaggatttgatacaggagcaggtaatattttattagatagttggattcaattaaaaaaggatggtacaccatatgataaagatggtgaatgggcaaatcaaggaaatgtaaatgaaaaacttttaaaatcattatatgatcatagtgattcatttttaaataaattaccaccaaaatcaactggtcgtgaattgtttaatattcaatggttattaaatgtaattgaatcaattaaaaatgatgatgatgataatgataatgataatattattataaaagatgaagatgttcaagcaacactattagaatttacatgtaaaacaatagttgatgaaattaaaaaaattaaaatttgtaaaattgatagagttttagtttgtggaggtggtagtaaaaataaattattaatggataaactttctagattattaaaaaaagatgaaaatgaaaatggatgtggtggtagtgttagtagcggtagtagtggtagttgtaaactttcaataactgatgaatttggtatcagtagtcaagatatggaggcaattgcatttgcatggtttgcaaaaagaactttaaataatcaaccttcaaatttaataagtgtgactggtgcttcaaaagaaacaatcttgggtgcaatttatttaaaaaataattttaataattga

SEQ ID NO: 29361 - protein, 434 aa, Dictyostelium discoideum
MSDIFIGVMSGTSLDGIDVVIVEFNDNDDDIKRINVKQSYSHPMPINIKNDILSMCQGQKTTLSEVGNLNRRLGIVYSEAINEAIKLSSIDPNSISAIGCHGQTVWHQPPTRKHGDDGDNDDNDDDNDGFTIQLGDCNRIATLTGITTIGDFRNRDISYGGQGAPLTPSFHKYSLSSFNENRIILNIGGISNITLLPSLSSSSSSSNNIQVTGFDTGAGNILLDSWIQLKKDGTPYDKDGEWANQGNVNEKLLKSLYDHSDSFLNKLPPKSTGRELFNIQWLLNVIESIKNDDDDNDNDNIIIKDEDVQATLLEFTCKTIVDEIKKIKICKIDRVLVCGGGSKNKLLMDKLSRLLKKDENENGCGGSVSSGSSGSCKLSITDEFGISSQDMEAIAFAWFAKRTLNNQPSNLISVTGASKETILGAIYLKNNFNN

SEQ ID NO: 29362 - DNA, 1317 bp, Aspergillus nidulans FGSC A4
  CDS (1)..(1317)
atggccaacgaaactcccaaaaaccatgctctcgacatcacggtgctgggcttgaacagcggcacctcgatggatggcatcgactgtgctctgtgtcgcttccggcaggagactccagagtctcccatgcactttgagctgctcaagtatggagaaatcccgcttgagcagacgatcaagaagcgggtgatgaacatcatcctgcacaacaagacttcgccctcagagctatctgaggtcaatgtcatcctaggagagacattcgccgccgcggtcaagcagttctgtgcagactacaaggtggatatctcctccatcgatgtcattgggtctcatggacagaccatctggcttctgtcgatgcccgaggcgaatgaagtgcgaagcgccttgactatggccgaaggctcgttcctcgcctcgcgcactggtatcacttccgtgacagacttccgagtcagcgaccaggccgccggtcgtcaaggtgcaccgctcatcgctttctttgatgcgctggttctgcaccacccgaccaagcttcgggcgtgccagaacatcggcggcattgccaacgtctgcttcatccctcctgactcgcacggcggcgtcgatgcctgctacgactttgacaccggtcccggcaacgtgttcatcgatgccgtggtccgccactacaccaacggcgagcgcgagtacgacaaggacggcgagatgggcgctcgcggcaccgtcgaccaggagctcgtcgacgagttcatccagaaccacccctacttcaagctcgacccgcccaagactaccggccgcgaggtcttccgggataccttggccttggacctgatccgcaaggctgaaagcaagggcctgacccctgacgatgtcgtcgcgacaatcacccgagtcaccgcacaggcaatcgtcgaccactaccgccgctacgcccctgaaggcctagagatcgaggagatcttcatgtgcggaggaggcgcctacaaccccaacatcaccaagtacatccagcagcactaccccaacgctaagatcatgatgctcgacgaggccggtatccctgctggcgccaaggaggccatcaccttcgcctggcagggcatggaggctatcgttggccgttctattccagtgccgacgcgtgtagagacgcgtcaagaatacgtcctgggcaaagtgtctccgggcaagaactaccgcaaggtaatgcggcagggcatgctttttggcgctggccgcgatcacttgaagccagtcagcgaattaatcaactatgtagacgggaaggtgtttgacaataagtggtaa

SEQ ID NO: 29363 - protein, 438 aa, Aspergillus nidulans FGSC A4
MANETPKNHALDITVLGLNSGTSMDGIDCALCRFRQETPESPMHFELLKYGEIPLEQTIKKRVMNIILHNKTSPSELSEVNVILGETFAAAVKQFCADYKVDISSIDVIGSHGQTIWLLSMPEANEVRSALTMAEGSFLASRTGITSVTDFRVSDQAAGRQGAPLIAFFDALVLHHPTKLRACQNIGGIANVCFIPPDSHGGVDACYDFDTGPGNVFIDAVVRHYTNGEREYDKDGEMGARGTVDQELVDEFIQNHPYFKLDPPKTTGREVFRDTLALDLIRKAESKGLTPDDVVATITRVTAQAIVDHYRRYAPEGLEIEEIFMCGGGAYNPNITKYIQQHYPNAKIMMLDEAGIPAGAKEAITFAWQGMEAIVGRSIPVPTRVETRQEYVLGKVSPGKNYRKVMRQGMLFGAGRDHLKPVSELINYVDGKVFDNKW

SEQ ID NO: 29364 - DNA, 1149 bp, Bacillus anthracis str. Sterne
  CDS (1)..(1149): transl_table=11
atgtatattgcaggggtaatgtctggtacttcattagatggaatagatgtagcgctcgttcgtatagaagggagtggtgtagagtctaaggtcgaactcatccattttactacagttccattttgtaatgatataaaaagtgaaatacaacaagcgttatcaatagaaaattcaaatgtccaactcatatgtagtttgaattttaagctcggtttatgttttgccaatgctgtaaaggaagtttgtaaagaggccaatttttctttggaacaattagatttgataggttctcacggacaaacgatttatcatcagccgaagcaagatggtaataggataccttccacattgcaaattggggaacctgcagtaatagcatacgaaacgaacacgacggttatctcaaatttccgaacgatggacatggcagcaggaggacaaggtgcaccacttgtgccatattcagaggtcattttgtatcgtgatccaagtaaaaatagactactacaaaatattggtgggattagtaatgttacagtaataccaaatcaacaaagtgatcagaacgttatagcttttgatactggtccagggaatatgataattgatgaagtatgtcaaaggttatttcagttgtcatatgatcaaaatggtgaaattgcaaaacagggtagagttgtagatgaaattttgacatattgtatgagtcatccatttttgaaaatgaatccaccgaaatcaacaggtagagaacagtttggagaaaaatttgcaagtgaattattgaagcggtttgaaaagcatagtaaagaaaatatattgacgactgtcacgatgtttactgcaaattcaattgttcatcattataagaagtttatcttgccgtattatgaaatcgatgaggtgatattaggcggtggtggcagttataatagcacacttgttgaaatgttgcgaaatggattgaaggatgaaaactgcgcaatattcattcaagaagatataggctattcttcagaggcgaaagaagctatcgcctttgcaattttagcaaacgaaacgcatcattgcaatccgagtaatgtgccaagcgcaacaggtgcaaagcaatctgtagtttttgggaatataacattccctccggtatga

SEQ ID NO: 29365 - protein, 382 aa, Bacillus anthracis str. Sterne
MYIAGVMSGTSLDGIDVALVRIEGSGVESKVELIHFTTVPFCNDIKSEIQQALSIENSNVQLICSLNFKLGLCFANAVKEVCKEANFSLEQLDLIGSHGQTIYHQPKQDGNRIPSTLQIGEPAVIAYETNTTVISNFRTMDMAAGGQGAPLVPYSEVILYRDPSKNRLLQNIGGISNVTVIPNQQSDQNVIAFDTGPGNMIIDEVCQRLFQLSYDQNGEIAKQGRVVDEILTYCMSHPFLKMNPPKSTGREQFGEKFASELLKRFEKHSKENILTTVTMFTANSIVHHYKKFILPYYEIDEVILGGGGSYNSTLVEMLRNGLKDENCAIFIQEDIGYSSEAKEAIAFAILANETHHCNPSNVPSATGAKQSVVFGNITFPPV

SEQ ID NO: 29366 - DNA, 1149 bp, Bacillus thuringiensis serovar konkukian str. 97-27
  CDS (1)..(1149): transl_table=11
atgtatattgtaggggtaatgtctggtacttcattagatggaatagatgtagcactcgttcgtatagaagggagtggtgtagagtctaaggtcgaactcatccattttactacagttccattttgtaatgatataaaaagtgaaatacaacaagcgttatcaatagaaaattcaaatgtccaactcatatgtagtttgaattttaagctcggtttatgttttgccaatgctgtaaaggaagtttgtaaagaggccaatttttctttggaacaattagatttgataggttctcacggacaaacgatttatcatcagccgaagcaagatggtaataggataccttccacattgcaaattggggaacctgcagtaatagcatacgaaacgaacacgacggttatctcaaatttccgaacgatggacatggcagcaggaggacaaggtgcaccacttgtgccatattcagaggtcattttgtatcgtgatccaagtaaaaatagactactacaaaatattggtgggattagtaatgttacagtaataccaagtcaacaaagtgatcagaacgttatagcttttgatactggtccagggaatatgataattgatgaagtatgtcaaaggttatttcagttgccatatgatcaaaatggtgaaattgcaaaacagggtagagttgtagatgaaattttgacatattgtatgagtcatccatttttgaaaatgaatccaccgaaatcaacaggtagagaacagtttggagaaaaatttgtaagtgaattattgaagcggtttgaaaagcatagtaaagaaaatatattgacgacggtcacgatgtttactgtaaattcaattgttcatcattataagaagtttatcttgccgtattatgaaatcgatgaggtgatattaggcggtggtggcagctataatagcacacttgttgaaatgttgcgaaatggattgaaggatgaaaactgcgcaatattcattcaagaagatataggctattcttcagaggcgaaagaagctatcgcctttgcaattttagcaaacgaaacgcatcatcgtaatccgagtaatgtgccaagcgcaacaggtgcaaaacaatctgtagttttagggaatataaccttccctccgttatga

SEQ ID NO: 29367 - protein, 382 aa, Bacillus thuringiensis serovar konkukian str. 97-27
MYIVGVMSGTSLDGIDVALVRIEGSGVESKVELIHFTTVPFCNDIKSEIQQALSIENSNVQLICSLNFKLGLCFANAVKEVCKEANFSLEQLDLIGSHGQTIYHQPKQDGNRIPSTLQIGEPAVIAYETNTTVISNFRTMDMAAGGQGAPLVPYSEVILYRDPSKNRLLQNIGGISNVTVIPSQQSDQNVIAFDTGPGNMIIDEVCQRLFQLPYDQNGEIAKQGRVVDEILTYCMSHPFLKMNPPKSTGREQFGEKFVSELLKRFEKHSKENILTTVTMFTVNSIVHHYKKFILPYYEIDEVILGGGGSYNSTLVEMLRNGLKDENCAIFIQEDIGYSSEAKEAIAFAILANETHHRNPSNVPSATGAKQSVVLGNITFPPL

SEQ ID NO: 29368 - DNA, 1113 bp, Erwinia carotovora subsp. atroseptica SCRI1043
  CDS (1)..(1113): transl_table=11
atgagatcaggcagatatattggcgtgatgtccggcaccagtcttgatggtgtggatgtcgtgctagccgcgattgacgaacatacagtggctcagcaggcccgctactgccacccgataccgcaggatatcaaaatggctatcttggggatgtgtcaggggcaggcggtgacgttgtcagcgctgggccagttggatacgcgtctgggaatcttgtttgccgaagcagtgctgacgctgcttaaagagacgggcctgagggcgcagggtattactgcgattggctgccatgggcagacggtctggcatgagcccacgggcgaagcaccctgtacgttgcagataggtgataacaaccgcgttgccgccttgactggcatcacgaccataggggattttcgacgccgcgatttggcttatggcgggcagggtgctccgctggtgccatcattccatcacgcgttactattgcaccccgttgagcgccgtatcgtgcttaacatcgggggaatcgccaatttgtcgctgctggtgccgggggcgcctgtgcgcggctacgataccgggcctgggaatatgctgctggatgcttggatctggcggcactgcgcgcaaccgtatgataaagacgccctgtgggcgataaacggacaggcgaacccgttactgctgcgccggatgttgaccgatccttactttgcgttacgagcaccgaaaagcaccggacgtgagtatttcaacctgggctggctcgaaagaatgttggctggcttgccgccgatagcgccgcaggatgttcaggcgacgctggttgagttaacggccataagcatcgccgaccaagtgctgctggtcggtggatgtgaacgcttattagtttgtggcggtggtgcgcataatccactcatcatggcgcgtctctcggccctgctgccgggcatcgaagtcagcacgaccgatgagtgtggcgtgaacggcgatgatatggaagcgctggcatttgcctggctggcgtcgcgtacgctatcgggattgccgggtaatctgccgtctgtcacgggagcgagtcaggaaacggtgttaggtgcgatttatccggttaacgtggattaa

SEQ ID NO: 29369 - protein, 370 aa, Erwinia carotovora subsp. atroseptica SCRI1043
MRSGRYIGVMSGTSLDGVDVVLAAIDEHTVAQQARYCHPIPQDIKMAILGMCQGQAVTLSALGQLDTRLGILFAEAVLTLLKETGLRAQGITAIGCHGQTVWHEPTGEAPCTLQIGDNNRVAALTGITTIGDFRRRDLAYGGQGAPLVPSFHHALLLHPVERRIVLNIGGIANLSLLVPGAPVRGYDTGPGNMLLDAWIWRHCAQPYDKDALWAINGQANPLLLRRMLTDPYFALRAPKSTGREYFNLGWLERMLAGLPPIAPQDVQATLVELTAISIADQVLLVGGCERLLVCGGGAHNPLIMARLSALLPGIEVSTTDECGVNGDDMEALAFAWLASRTLSGLPGNLPSVTGASQETVLGAIYPVNVD

SEQ ID NO: 29370 - DNA, 1128 bp, Mannheimia succiniciproducens MBEL55E
  CDS (1)..(1128): transl_table=11
atgatgaaacaatattatatcggcgtaatgtcgggaaccagccttgacggtgtggatttagccttgatggatttcactctgaatcccccaaaattgatggcaacggattttactccgatgccggaaaaaattcgtgaaaaactgaccgcacttttgcgatccggagagacaagtttgcggaatttaggcgaaattgaccaccaattagggcttctttatgcagaaagtatcaatcgttttttgcaaaaagtgcggttaaaatccgaagatatttgcgcagtcggttgccacggacaaacggtgtggcattcgccgaattgcgaatttccgttcacaatgcaaatcggcgatatgaatttggttgcggcaaaaaccggtatcaccacggtaggtgatttccgccgtaaagatatggcgctgggcggtcagggcgcgcctttagtaccggcttttcatcaggatttattttttgcggcggaacgattgacggtggtgttgaatattggcggaatcagcaatatttccgtgctggaagaaaattgtccgaccgtcggttatgatgtgagcgtaggcaatgcgttgctggattcctggattgaacttcatcagggcaaacgctacgataaagacgctctatgggcaaaaaacggtaaaatttccaccgcacttttaacggatttgctggcggaacccttttttcagcaggcaccgccgaaaagtaccgggcgggaattgtttaatcttgcctggcttaataaaaaactggaaaaattcaccgcactttcgcaaccgatgccttcgccacaggatgtgcaacgcacactggtggaatttaccgctttaagtattgccaacgaattgaaaaaattgcaaaaatccgaccgcactaatttgctgttagtttgtggcggcggtgcgcgaaatccattgattatgcaacgtttaacggcacttttggctgagtggcaggtttcgaccacctcggaattcggtttggatatcgattacgtcgaggcggcggcatttgcctggcttgcttatcgcagaatacataatttgccgagcaacttgcctagtgtcaccggggcgaaaagtgaggttagtttaggtgtgatttttcctaaatag

SEQ ID NO: 29371 - protein, 375 aa, Mannheimia succiniciproducens MBEL55E
MMKQYYIGVMSGTSLDGVDLALMDFTLNPPKLMATDFTPMPEKIREKLTALLRSGETSLRNLGEIDHQLGLLYAESINRFLQKVRLKSEDICAVGCHGQTVWHSPNCEFPFTMQIGDMNLVAAKTGITTVGDFRRKDMALGGQGAPLVPAFHQDLFFAAERLTVVLNIGGISNISVLEENCPTVGYDVSVGNALLDSWIELHQGKRYDKDALWAKNGKISTALLTDLLAEPFFQQAPPKSTGRELFNLAWLNKKLEKFTALSQPMPSPQDVQRTLVEFTALSIANELKKLQKSDRTNLLLVCGGGARNPLIMQRLTALLAEWQVSTTSEFGLDIDYVEAAAFAWLAYRRIHNLPSNLPSVTGAKSEVSLGVIFPK

SEQ ID NO: 29372 - DNA, 1101 bp, Legionella pneumophila subsp. pneumophila str. Philadelphia 1
  CDS (1)..(1101): transl_table=11
atgagtttatatatcggtttgatgtccggtaccagtatggatggcattgatgctgccttgttggagcttccttccaatcatttgattcacgggattactaaacaatacagtgatgatgtcaggagaaatcttgatgatttaattatgggtaatcatttaaccctggcttcgatttgccaactgaacacgctaattggcagggagtttgcagaagcagttcgccaactcttgagtgaaataaaagtgcatccaaaagaaattcaggccattggcagtcatggtcaaactgtctgtcatgatacaagtggaaatatcccgtatactttgcagcttggttgtggccatacgatttcttctttaactggcattaccgttgtagcagattttagaacaagagatttggtgaatggtggtcaaggtgcgccttttgcccccctttaccatcaacagatattttctaaagtgaatgagtctgttgctgttgttaacattggtggtattgctaatgttacctttattgcaaagaatcaaatgactagaggttgggatatagggcctggcaattgtctgatggatgcctggatttataaaaataaaggagccctttttgataaaagtggggtttgggcgagccaaggtgaagtgatttatcctctgcttgaatatttgttacaagatccatttttccatttggattcacctaaaagcattggcaaagaatatttttctttatcctggctacaaaaacatttaaaaccggattacacaccagctgatattcaggctactttgttggcgcttacagcccatacgatagctgaaacaatattaaatgaatcaggagaaattaaacaattatatctctgtggaggcggggcccacaatacgcatttgaaagagaatttagctcgtctactgcctgggatagcagtaaaaagcatagcagagttagggattagtcctgattatcttgaggcaatgatgtttgcatggttagcagcacagacgattaatcaaataccagttaatttaacatcaataactggagctaaaggtattgcaattttaggtgcagtgtatcctataataaaatcatattga

SEQ ID NO: 29373 - protein, 366 aa, Legionella pneumophila subsp. pneumophila str. Philadelphia 1
MSLYIGLMSGTSMDGIDAALLELPSNHLIHGITKQYSDDVRRNLDDLIMGNHLTLASICQLNTLIGREFAEAVRQLLSEIKVHPKEIQAIGSHGQTVCHDTSGNIPYTLQLGCGHTISSLTGITVVADFRTRDLVNGGQGAPFAPLYHQQIFSKVNESVAVVNIGGIANVTFIAKNQMTRGWDIGPGNCLMDAWIYKNKGALFDKSGVWASQGEVIYPLLEYLLQDPFFHLDSPKSIGKEYFSLSWLQKHLKPDYTPADIQATLLALTAHTIAETILNESGEIKQLYLCGGGAHNTHLKENLARLLPGIAVKSIAELGISPDYLEAMMFAWLAAQTINQIPVNLTSITGAKGIAILGAVYPIIKSY

SEQ ID NO: 29374 - DNA, 1212 bp, Burkholderia pseudomallei K96243
  CDS (1)..(1212): transl_table=11
gtgccccccaccctcgatttcggagcgatcaccgtgacgtccaaccgcatgcaaaccggccatccggcggatggcgtgtatttcggcctgatgtccggcacgagcatggacggcgtcgacggcatcgccgtgcgcttcgaggcgggcaagccgcccgccgtgctgtccgaggcgttcgtcggcttcgccgacacgctgcgcgacgcgctcttcgcgctgcaacagccgggcgacgacgagatcgagcgcgaggcgctcgccgcgaacgcgctcgccgcgcgctacgcggtgtgctgccacgagctgctgcgcacggcgggcctctcgcccgacgacgtgcgcgcgctcggcgtgcacggccagacggtgcgccaccggcccgagcgcggctatacgcggcagctcaacaacgcggcgctgctcgcggagctgacccgcatcgacgtgatcgccgatttccgcagccgcgacgtcgccgcgggcggccagggcgcgccgctcgtgccggcgttccatgcgacggtgttcggctcgcccgacgagacgcgcgtggtctgcaacctgggcggcatcagcaacatcacgatcctgcccgccgggggcggcccgcagggcgaagggcacgcgcgcaacgacacggtgcgcggccacgattgcggcccggcgaacgcgctgatcgacgcgtgggtcgagcgccacctgaaacagccgttcgacgacggcggacgcttcgccgcgcgcggcaaagtcgacgaaacgctcctcgccgcgctgctcgacgagccgtacttccgccaaaacgcgccgaaaagcaccgggcgcgatctcttcaacgccgattggctcgatgcgaaactcgccggttttcagcacctcgcgcccgaaaacgtgcaggcgacgctcaccgcgctgaccgccgccaccgtcgccgacgagatcgcgcggcatgcgggcgattgccgagccgtctatgtgtgcggcggcggcgcgcgcaacccggtgctgctcgacgcgctcgcgacggcgctcgcggcgcgcgggctcgacgcggccgtcgccacgacggccgcgctcggcgtgccgccgcagcaagtcgaatcgctcgcgttcgcgtggcttgcgtaccggttcaacgcgcgcgcgccgggcaacgtgtcgaccgtcaccggcgcggcgggcgagcgcgtgctgggcgcgctctacccgcgctga

SEQ ID NO: 29375 - protein, 403 aa, Burkholderia pseudomallei K96243
MPPTLDFGAITVTSNRMQTGHPADGVYFGLMSGTSMDGVDGIAVRFEAGKPPAVLSEAFVGFADTLRDALFALQQPGDDEIEREALAANALAARYAVCCHELLRTAGLSPDDVRALGVHGQTVRHRPERGYTRQLNNAALLAELTRIDVIADFRSRDVAAGGQGAPLVPAFHATVFGSPDETRVVCNLGGISNITILPAGGGPQGEGHARNDTVRGHDCGPANALIDAWVERHLKQPFDDGGRFAARGKVDETLLAALLDEPYFRQNAPKSTGRDLFNADWLDAKLAGFQHLAPENVQATLTALTAATVADEIARHAGDCRAVYVCGGGARNPVLLDALATALAARGLDAAVATTAALGVPPQQVESLAFAWLAYRFNARAPGNVSTVTGAAGERVLGALYPR

SEQ ID NO: 29376 - DNA, 1158 bp, Photobacterium profundum SS9
  CDS (1)..(1158): transl_table=11
ttgctgattcagcacacactagaggttcttatggcaattgagcgttacatcggcattatgtctggtacaagtatggatggtgttgataccgttttggttgaaattgaagaaaacagtatccgcttgatgggtgaaaactcttttcctatgggtgaagatcttaaacaggcattgcttgatatttgcctaggtcaatccaccaatttgcaagcagttggagagctcgatcaccgactcgggcatttatttgctgatgctgtgatcgctttattagagaacaccggtatatctccagactctattacagctattggaagccacgggcaaaccgtatttcactctccagaaacacaatatgctttcaccatgcaactcggtgatgccaatattattgcggcaaaaacacacattacaaccatcgctgattttcgtcgaaaagatatggctctcggtgggcaaggcgcaccactcgttccagcttttcatcaacagctttttagttctcttgatacaacgcgcgtaatcctcaatattggcggcattgctaacatcacagtactcactcccaatcaacctgttacgggctatgatacaggcccaggtaacatgttaatggatgcatggatccaccagcataatggcagtcaatatgatgttaatgccaaatgggctaaaacaggcactgtaaacgaaatactgttagaaagactgctcgacgaaccttacttcaagcagccagcccctaaaagtacaggtcgtgaattatttaatttaccgtggttaaaacaaaaattatcaggtttagatatacccgcagaagatgtacaagcaaccctagctgaatttactgcagtcaccattacaaatgatgtcattacatatcaacataatgaaaggtctgaattatcaaccaaacaggaattgttagtctgtggcggtggtgctcataatccattattaatggcacgtttagctgcacaattacccaagtggcaagtaatgacgacaacagaacgaggtgtagatagcgataatatggaagccatggctttcgcgtggttagcttaccgaacacatcataatatgccgggaaatttaccagaagtaactggcgcttctggattaacaagcctaggggcaatttacccagcatcgtaa

SEQ ID NO: 29377 - protein, 385 aa, Photobacterium profundum SS9
MLIQHTLEVLMAIERYIGIMSGTSMDGVDTVLVEIEENSIRLMGENSFPMGEDLKQALLDICLGQSTNLQAVGELDHRLGHLFADAVIALLENTGISPDSITAIGSHGQTVFHSPETQYAFTMQLGDANIIAAKTHITTIADFRRKDMALGGQGAPLVPAFHQQLFSSLDTTRVILNIGGIANITVLTPNQPVTGYDTGPGNMLMDAWIHQHNGSQYDVNAKWAKTGTVNEILLERLLDEPYFKQPAPKSTGRELFNLPWLKQKLSGLDIPAEDVQATLAEFTAVTITNDVITYQHNERSELSTKQELLVCGGGAHNPLLMARLAAQLPKWQVMTTTERGVDSDNMEAMAFAWLAYRTHHNMPGNLPEVTGASGLTSLGAIYPAS

SEQ ID NO: 29378 - DNA, 1122 bp, Salmonella enterica subsp. enterica serovar Paratyphi A str. ATCC
  CDS (1)..(1122): transl_table=11
atgaaatcgggccgttttattggcgttatgtccggaaccagccttgatggcgttgatgttgtactggcggcaattgatgaaaccatggttgcgcaacaggcaagtctcacctggcccattcccgttcatctgaaaaaaggcattctcgatatttgccagggacagccgcttacgctctcgcaactcggccagctggatacccagttaggccggctttttgcacaggcggttaatgcgctgttagcgcaacaacgtttgcagccgcgggatatcgtcgctattggttgtcatgggcaaacggtctggcatgaaccgaccggcgaggccccgcatacgctgcaaattggcgataataatcacatcgtcgcccatacggggattacagtggtcggcgattttcggcggcgggatattgcgctgggcggacaaggcgcgccgctggtgcccgctttccatcacgcgctgttgggacatccgacggaaaaacgtatggtcctgaatatcggcggcatcgccaatttatctctgcttttccccggacaggcggtgcgcgggtacgacacggggccgggcaatatgttgatggatgcgtggatttggcgacaatgcgcgcagccctacgacaaagacgcggcatgggcgaaagaaggtcaggttattcttccattgctgcaaaagatgttgcgcgatccgtactttgctgcgtcggcgcccaaaagtacaggacgcgaatatttcaactatggctggttagagcgccatcttgcggctttccctggcgcagacgcgcgcgatgtacaggccacgctggcggagctgacggcggtctccatcgcccaacaggtgctgctcaacggcggctgcgagcggctgatggtctgtggcggcggtggccggaatccgttagtgatggcccgtctggcggcgctgttgaccggtatcgaggtttcgaccaccgataaggcggggatcagcggcgatgatatggaagcgctggcctttgcatggcttgcctggcgaacgctcgcgggcctgccgggaaatttaccttccgtgacgggggctacagaagccagtgttttaggcgctatttacccggctaacccaataactcagagttaa

SEQ ID NO: 29379 - protein, 373 aa, Salmonella enterica subsp. enterica serovar Paratyphi A str. ATCC
MKSGRFIGVMSGTSLDGVDVVLAAIDETMVAQQASLTWPIPVHLKKGILDICQGQPLTLSQLGQLDTQLGRLFAQAVNALLAQQRLQPRDIVAIGCHGQTVWHEPTGEAPHTLQIGDNNHIVAHTGITVVGDFRRRDIALGGQGAPLVPAFHHALLGHPTEKRMVLNIGGIANLSLLFPGQAVRGYDTGPGNMLMDAWIWRQCAQPYDKDAAWAKEGQVILPLLQKMLRDPYFAASAPKSTGREYFNYGWLERHLAAFPGADARDVQATLAELTAVSIAQQVLLNGGCERLMVCGGGGRNPLVMARLAALLTGIEVSTTDKAGISGDDMEALAFAWLAWRTLAGLPGNLPSVTGATEASVLGAIYPANPITQS

SEQ ID NO: 29380 - DNA, 1110 bp, Idiomarina loihiensis L2TR
  CDS (1)..(1110): transl_table=11
atgtttcagcgttatattggactgatgtcgggcaccagtatggatgcggttgacgcggcattggtccagatagatgcgcaaggcacgcccagacttgaagctcatcactctttgtctttccccccggaattgcgtactcgcttattggctttaagccacacagacaactggcaggccgatgaactggccggtttagacattgctttttcccagctcagtgccaaagtagtagagcggcttcttgaaaaagtcagtatcgcagcaaaagacattaccgccatagccagtcacggacaaaccgttcgccacaagcccaactcaataccagcctacacctgtcaaattggcgaccctacacggttagctttgggtacgggtattgatgtgatttacgattttcgtcgcaaagacatcgccgcaggtggtcagggtgcgccattggttccggcttttcataagcaagttttttcccgcaagaatcaaagcattgcggtgattaatttaggtggtattgccaatgtcacctggcttggccataacggcaacatactgggcttcgatacaggacctgccaacaccttgctcgaccaatgggttcagcataatgactcaagtaaaagcttcgatgaaaatgctcagtttgcgagagcaggcaaacttcagcctgacctgctaaagcgtttattgcagcatccgttttttgctaagccagctcccaaaagtacgggtcgcgaggagttcaacttaaaatggctgcaacgacaattgaccggacacaacattagcccggctgatgtacagcgcactttgaccgaacttaccgctattagcatcaaagatgcactgacaaccttgccacaacaacccgatacggcttatttttgtggtggcggcacccgaaacccattattgatggagcgcttaactcaacttttagcgccgattcaatgcgatactacagcgagtttaggcgttgacccgcaatgggttgaggcaatcgcttttgcctggttaggctggtgtttcgagcataaaaaaccgggcaaccagcctgaagttacaggagccagtcatccggttgttttaggcgctaaagtcctacatcaatag

SEQ ID NO: 29381 - protein, 369 aa, Idiomarina loihiensis L2TR
MFQRYIGLMSGTSMDAVDAALVQIDAQGTPRLEAHHSLSFPPELRTRLLALSHTDNWQADELAGLDIAFSQLSAKVVERLLEKVSIAAKDITAIASHGQTVRHKPNSIPAYTCQIGDPTRLALGTGIDVIYDFRRKDIAAGGQGAPLVPAFHKQVFSRKNQSIAVINLGGIANVTWLGHNGNILGFDTGPANTLLDQWVQHNDSSKSFDENAQFARAGKLQPDLLKRLLQHPFFAKPAPKSTGREEFNLKWLQRQLTGHNISPADVQRTLTELTAISIKDALTTLPQQPDTAYFCGGGTRNPLLMERLTQLLAPIQCDTTASLGVDPQWVEAIAFAWLGWCFEHKKPGNQPEVTGASHPVVLGAKVLHQ

SEQ ID NO: 29382 - DNA, 1146 bp, Zymomonas mobilis subsp. mobilis ZM4
  CDS (1)..(1146): transl_table=11
gtgaagaaaagatcaaagggctggaaaatagaaatcgggggaaattggatgctggcaatcggacttatgtccggcacgtctttagatggtgttgatgtcgccttgattgaaaccaatggcgaaaaacaagtaaagcctttgaattttgcttcctatccttattcggatacggataaagcctgcctgcgcgaagcctgtcgtcgcgctttgacgatggcggcaccttgtttcatccccgaagatgaagtgatttatcaggccgaacatattgtaacgctccgtcatattcaggcagtcaaagatttcttgaaaaagaatgcgttaggtaatcaggctatcaaagtcatcggcttccatggtcaaacaattgctcataggccggatttgggctggacatggcaaatcggtgatggcgccgctttggcacaggcgaccaaaatcagcgtagtcgatgatttccgttctcatgatgtccaagcaggcggcgagggcgctcctttgctccccatctatcattgggcattatttagcgaagcctctcaccctttggcggtgcttaatcttggcgggattgcgaatattacttggattggggcggatgaaaacgacctcattgcttgcgatacaggccccgctaacggaatgattgatgattgggtcaaggccaaaactggcctcgattatgatgaatccggtcttattgcgagcaaaggcgttgtccatcacgatctggtcgatgcgatgatgagccagaaattcttttcgcaattaccaccgaaatcgttggatagaagcgatttttcaatcgaggcggtcgccaatctctcgatcgaggatggtgctgcaacgctgaccgcttttaccgctgaatcggttgcccgatcgctgtctttctttcctgaaagaccttcaaagattattgtggccggtggtggtcgtcataatgtgacgatgatgaaaatgctgcatgacagtttgaaaatgcctgtccagccaattgaagatttccatttaaatggtgatgcgaccgaggccgaaggctttgcctatctcgcggtcagacgggtatttaacaagcctatcagcttccctaaaacaacaggggtgccgcatcctatgacgggtggccgtattcattatatctga

SEQ ID NO: 29383 - protein, 381 aa, Zymomonas mobilis subsp. mobilis ZM4
MKKRSKGWKIEIGGNWMLAIGLMSGTSLDGVDVALIETNGEKQVKPLNFASYPYSDTDKACLREACRRALTMAAPCFIPEDEVIYQAEHIVTLRHIQAVKDFLKKNALGNQAIKVIGFHGQTIAHRPDLGWTWQIGDGAALAQATKISVVDDFRSHDVQAGGEGAPLLPIYHWALFSEASHPLAVLNLGGIANITWIGADENDLIACDTGPANGMIDDWVKAKTGLDYDESGLIASKGVVHHDLVDAMMSQKFFSQLPPKSLDRSDFSIEAVANLSIEDGAATLTAFTAESVARSLSFFPERPSKIIVAGGGRHNVTMMKMLHDSLKMPVQPIEDFHLNGDATEAEGFAYLAVRRVFNKPISFPKTTGVPHPMTGGRIHYI

SEQ ID NO: 29384 - DNA, 1083 bp, Silicibacter pomeroyi DSS-3
  CDS (1)..(1083): transl_table=11
gtgacggcgctgggggcaatgtctggcacgtcgctggacggggtcgatgcggcggtggtcgagaccgacggtctggcgatttttgggttcgggccggtgggctaccgcgcctattcgcccgaggaacgcgcggtgttgcgcgccggactggggcgttgggccggacccgaggtggaggcggcgggcgatctggtgacgcgcgcccatgcgcaggcgctggccgggttcgagggcgtcgatctggtgggttttcacggacagaccctggcgcatgagccgcgcgggcgcggcaccttgcaggtcggcgatggtgcggctttggccgccgccctgcggcggccggtggtctgggatttccgcagcgacgatgtgcagctgggcggcgaaggcgcgcctttggcgccgttctttcactttgcctgcgccaagtggatcggtgcgaccgagcccttgtgtttcctgaacctgggcggggtgggcaacctgacctatgtggacccgtcatttgagcggcccgaggtgcccggcgcgcttctggcctttgacaccgggccggccaatgccccggtcaacgatctgatgcaggcgcggctggggctgccgatggacgagggcggcgcggtggcgcggggtggcacggtggagaccggcgcgctggagctgttcctggccgagccctatttctcaagaatgccacccaagtctctggaccggaacgattttgccgagatgatcgggttggtgtcggaactcagcgacagcgatgcggtggcaacgctgacagggatgtgcgcggctgcggtggcgcaagggatggagcattgtccgcgcccgcccgcccgcgtactggtcaccggcggcgggcggcacaacccggtgctgatggagatgctgcaagtgtccctggattgtgccgttgaaccggtcgaatgcgttggcctcgatggtgacatgctggaggcgcaggccttcgcctatctggcggtgcgggtcgcgcgcggcctgtcaacctcgtgccccggcaccaccggcgtgggcgcgctggtgggtggcggcatggtcagcctgccggacgaggcctga

SEQ ID NO: 29385 - protein, 360 aa, Silicibacter pomeroyi DSS-3
MTALGAMSGTSLDGVDAAVVETDGLAIFGFGPVGYRAYSPEERAVLRAGLGRWAGPEVEAAGDLVTRAHAQALAGFEGVDLVGFHGQTLAHEPRGRGTLQVGDGAALAAALRRPVVWDFRSDDVQLGGEGAPLAPFFHFACAKWIGATEPLCFLNLGGVGNLTYVDPSFERPEVPGALLAFDTGPANAPVNDLMQARLGLPMDEGGAVARGGTVETGALELFLAEPYFSRMPPKSLDRNDFAEMIGLVSELSDSDAVATLTGMCAAAVAQGMEHCPRPPARVLVTGGGRHNPVLMEMLQVSLDCAVEPVECVGLDGDMLEAQAFAYLAVRVARGLSTSCPGTTGVGALVGGGMVSLPDEA

SEQ ID NO: 29386 - DNA, 1137 bp, Synechococcus elongatus PCC 6301
  CDS (1)..(1137): transl_table=11
atgcgtgttttgggattgatcagtggcaccagtgccgatggcattgatgtagcgatcgcggaaattcagggttttcaggcagacttaagcgttgcgctactggcctttgagacgattgcctacgaaccgagcctgcgcgatcgcattttggaagtcgcagccggatttccgctgagcgtggcggaattgaccgcactcgacgctgcgatcgctcaagcctttgcgacagcagcccaaaccttgattcagcagcatggtgcagtggatctgatcgggtctcacggccagacggtttaccatcagccgctgcaagcagggcaactaggctggagtgtgcagttgggctggggagctgcgatcgcccagcagacagggattacaacggtcagcaacttccgcagtgccgatctggcgttgggcggtcagggagccccccccgttcctgcagtagacctgtggttgttaggcagtgattccgaaaatcgttgtgtgcagaatattggtggcatcggtaatctcacctggctgccgcgccgcgatcaccctgactggcagtcggaagtccgcggttgggataccggccctggtaattccctgctggatctggcggtgcaaaaactgagccaaggtcggctctcctacgatgacggtagtcagtgggccgcaactggacagatcgatcaggtgctctgcgatcgctggttgcaggaggatgactatttccgcttgccgccgccaaaatcgacaggacgcgaacgctacggttggcagtttttagagacttgggcggcagaactcgatcgcctcacagctgcggatcaactggcaactttgacagaatttactgctgccagcattgttaataactatcgccactttttgccagctttacccgatcgcgttttggtctgtggcggtgggttacataatcaatttttgctgcagcgattacagcagcaattaccaacagtgaagatcgcgagtacggatgattttggggtcaactcccaagccaaggaagcgatcgcgatcgcggttctagcctattggcgacagcacaacgttcctggcaatttgccggcagtgactggggcgtcgggtcctgccttactaggcgatgtttttgctcgaacctaa

SEQ ID NO: 29387 - protein, 378 aa, Synechococcus elongatus PCC 6301
MRVLGLISGTSADGIDVAIAEIQGFQADLSVALLAFETIAYEPSLRDRILEVAAGFPLSVAELTALDAAIAQAFATAAQTLIQQHGAVDLIGSHGQTVYHQPLQAGQLGWSVQLGWGAAIAQQTGITTVSNFRSADLALGGQGAPPVPAVDLWLLGSDSENRCVQNIGGIGNLTWLPRRDHPDWQSEVRGWDTGPGNSLLDLAVQKLSQGRLSYDDGSQWAATGQIDQVLCDRWLQEDDYFRLPPPKSTGRERYGWQFLETWAAELDRLTAADQLATLTEFTAASIVNNYRHFLPALPDRVLVCGGGLHNQFLLQRLQQQLPTVKIASTDDFGVNSQAKEAIAIAVLAYWRQHNVPGNLPAVTGASGPALLGDVFART

SEQ ID NO: 29388 - DNA, 1086 bp, Gluconobacter oxydans 621H
  CDS (1)..(1086): transl_table=11
atggtctgggcgctcgggctgatgagcggcacgtccctggacggggtggatgctgctctgatcgaaacggatggcgtgcgcatcggacggatagggccgtccctgacagtgccttacagcccggagctgcgcggccggacccgcgagctgctggatcgtgcggctggccttgctcctgatgatgccgaagtgctggctgtcacgcgggagctgactctccggcatgtggatgccgtgcgtctgctgcgcgaaaaggcgccgggtctggagcctgccgtcataggctttcatggtcagaccattctgcatcagccggaacgtggccggagctggcagatcggcgatgcccggctgcttcaggatctctgcggtgttccggtcgtccatgatttccggtcacgtgatctggaaaacggcggggaaggtgcaccattggtgccggtgtttcacgcggccctgcttcatcaggaagtgcggcccgtggccgttctcaacattggcggggtcgccaatgtgacggttctgggccagcaggagccaaacggacagcggggcgtctgggcctgtgataccgggccgggcaatgcccttctggatgactgggcgcttcagcatactggccagccctgtgattttgggggcgctctggcagcgtcaggggcggtccatcaggatgttctggaaaggcttctggccattccgtatttcgcgcgtcccatgcccaaatcgctcgacaggctgagtttccaccctgaagccatggcatgtgtacgggatctgtctgcggcagatggcgctgcaacgctggcgtcctttacggtcgaggcagtggcagggacaacgtttccggtacggccggagggatggttcgtcgcgggaggcggccgtcacaatccggtactgatggacgggttaaaccatcgtctgggaaatgtggcatctgtggatgtgctggggtgggacggggacgcccttgaagcgcagtgtttcggccttctggccatgcgctttctgcgggggctgccctcctcttggccgggaacgaccggtgtcaggcagccctgcattgcgggaagagccgtctga

SEQ ID NO: 29389 - protein, 361 aa, Gluconobacter oxydans 621H
MVWALGLMSGTSLDGVDAALIETDGVRIGRIGPSLTVPYSPELRGRTRELLDRAAGLAPDDAEVLAVTRELTLRHVDAVRLLREKAPGLEPAVIGFHGQTILHQPERGRSWQIGDARLLQDLCGVPVVHDFRSRDLENGGEGAPLVPVFHAALLHQEVRPVAVLNIGGVANVTVLGQQEPNGQRGVWACDTGPGNALLDDWALQHTGQPCDFGGALAASGAVHQDVLERLLAIPYFARPMPKSLDRLSFHPEAMACVRDLSAADGAATLASFTVEAVAGTTFPVRPEGWFVAGGGRHNPVLMDGLNHRLGNVASVDVLGWDGDALEAQCFGLLAMRFLRGLPSSWPGTTGVRQPCIAGRAV

SEQ ID NO: 29390 - DNA, 1134 bp, Xanthomonas oryzae pv. oryzae KACC10331
  CDS (1)..(1134): transl_table=11
atgcctgtcctggaacacgttgattccctcctttatctaggccttatgtcgggcaccagcgccgacggtatcgatgccgcactggtgcgctttgccgaggacacgcaccgccgctgcgaattggtggccggcacgacggtggcgtgggagccgcaattgcgcgagaccttggtggcgcttggccagggcgccgagaccgtggccatcgatgcgctggggcaattggacgcgcaggtggggttggcattcgcagcggcggccaatcagctgatccgcgacagtggcgtggagcgccggcggattcgcgcaatcggctcgcatgggcaaaccatccgccaccggcccgaggccgacccggccttcacctggcagatcggcgatgccagccggattgccgagcacaccggcatcaccacggtggccgatttccgccgccgtgacgtcgccgccggtggccagggcgcgccgctgatgccagccttccatctggccatgctgggcgcgggcgaccaagacagcgccgtgctcaacctgggcgggatcggcaacctgaccttgattccacgcgacggcgcggtgctgggattcgataccggcccggccaacgcactgctggacagttggtgccaacgccatcacggcacgccgttcgatgccgagggcgcgtttgccgccagcgggcgcgtcgatgcggctttgctgcaggcactgttggccgatccgtggtttgcattgccgccgcccaagagcaccggccgcgagcaattccatctggactgggtcctgcaggcgatgggcagcgcgcggttggatgctgccgatgtgcaggcgaccttgctcgaactcaccgctgccagcgtggccgatgccttgctgcggctgcaacccagcacacgccgcgtgctggtctgcggcggcggggtgcgtaacccagtgctactggcgcgcctggcggcgcggctgccgggcgtggtggtggaatccagcgcgcggtacgggctggacccggattacctggaagcgatgggctttgcctggctggcagccgagctgctggccggacgcgcagccaatctgccatcggtgaccggggcggccgggcctcggctgttgggagcgatctatccggcgtaa

SEQ ID NO: 29391 - protein, 377 aa, Xanthomonas oryzae pv. oryzae KACC10331
MPVLEHVDSLLYLGLMSGTSADGIDAALVRFAEDTHRRCELVAGTTVAWEPQLRETLVALGQGAETVAIDALGQLDAQVGLAFAAAANQLIRDSGVERRRIRAIGSHGQTIRHRPEADPAFTWQIGDASRIAEHTGITTVADFRRRDVAAGGQGAPLMPAFHLAMLGAGDQDSAVLNLGGIGNLTLIPRDGAVLGFDTGPANALLDSWCQRHHGTPFDAEGAFAASGRVDAALLQALLADPWFALPPPKSTGREQFHLDWVLQAMGSARLDAADVQATLLELTAASVADALLRLQPSTRRVLVCGGGVRNPVLLARLAARLPGVVVESSARYGLDPDYLEAMGFAWLAAELLAGRAANLPSVTGAAGPRLLGAIYPA

SEQ ID NO: 29392 - DNA, 1104 bp, Vibrio fischeri ES114
  CDS (1)..(1104): transl_table=11
atggaaaaatacattggcttaatgtctggaaccagtttagatggtgtggatgccgtcatcgttgagactaacggtacaacaatcaatctacttggtcatgctgattatcctatggatccacaactaaaagcggatttacttgctgtatgcacgggacaacaaaccaatttaaaagtgattggtgaaatagatcatcgtcttggtcatctttttgctgaagcaactctgcatttactgagtactttaaatattgcctcctctgacatcactgcgattggcagtcatggtcaaacggtgtttcactcacctgatgcagaataccctttcactatgcaacttggtgatagcaatattattgctgcaaaaacaggtattgatacggttgccgattttcgtagaaaagacatggcattaggaggccaaggagcacctttagttcctgcttttcataacactttatttggaaagccagagagcaccaatgtaattctaaatattggcggtatctctaatatctctattttacaaaaagactctcctgttattggttatgacacaggccctggcaatatgttgatggattcatggattactgagcataaaggggaaagttacgataaagatggcgcatgggctcgttctggtcaaattatagatgagctgctcaaccagctaaaaacacacgattattttgcgcgcccatacccgaaaagcaccggacgagagctgtttaatttagattggtttgcacaatacatcgaaaataaaccgtatcaaccacaagatgttcaagcaacgctattagaattcaccgtgacaactattgttgatcaagtgatccgattccaagttggcaatgacactaagctattagtctgtggtggcggagctcataaccagtttttaatggaacggctgcaatatcatttacctaattgggcagtttccaccactaacgactacaatgtagatagtgacaatatggaagcaatggcctttgcatggcttgctcatcaaagaattcatggcttgccaagtaatgaacctgatgtgacaggtgcttctcgttatgcgagtttaggtgtaatctacccggctaattaa

SEQ ID NO: 29393 - protein, 367 aa, Vibrio fischeri ES114
MEKYIGLMSGTSLDGVDAVIVETNGTTINLLGHADYPMDPQLKADLLAVCTGQQTNLKVIGEIDHRLGHLFAEATLHLLSTLNIASSDITAIGSHGQTVFHSPDAEYPFTMQLGDSNIIAAKTGIDTVADFRRKDMALGGQGAPLVPAFHNTLFGKPESTNVILNIGGISNISILQKDSPVIGYDTGPGNMLMDSWITEHKGESYDKDGAWARSGQIIDELLNQLKTHDYFARPYPKSTGRELFNLDWFAQYIENKPYQPQDVQATLLEFTVTTIVDQVIRFQVGNDTKLLVCGGGAHNQFLMERLQYHLPNWAVSTTNDYNVDSDNMEAMAFAWLAHQRIHGLPSNEPDVTGASRYASLGVIYPAN

SEQ ID NO: 29394 - DNA, 1131 bp, Neisseria gonorrhoeae FA 1090
  CDS (1)..(1131): transl_table=11
atggcgttttgcaccagtttgggagtgatgatggaaacacagctttacatcggcattatgtcgggaaccagtatggacggggcggatgccgtgctggtacggatggacggcggcaaatggctgggcgcggaagggcacgcctttaccccctaccctgaccggttgcgccgcaaattgctggatttgcaggacacaggcacagacgaactgcaccgcagcaggatgttgtcgcaagaactcagccgcctgtacgcgcaaaccgccgccgaactgctgtgcagtcaaaacctcgctccgtgcgacattaccgccctcggctgccacgggcaaaccgtccgacacgcgccggaacacggttacagcatacagcttgccgatttgccgctgctggcggaactgacgcggatttttaccgtcggcgacttccgcagccgcgaccttgctgccggcggacaaggtgcgccgctcgtccccgcctttcacgaagccctgttccgcgatgacagggaaacacgcgtggtactgaacatcggcgggattgccaacatcagcgtactcccccccggcgcacccgccttcggcttcgacacagggccgggcaatatgctgatggacgcgtggacgcaggcacactggcagctgccttacgacaaaaacggtgcaaaggcggcacaaggcaacatattgccgcaactgctcggcaggctgctcgcccacccgtatttctcacaaccccacccaaaaagcacggggcgcgaactgtttgccctaaattggctcgaaacctaccttgacggcggcgaaaaccgatacgacgtattgcggacgctttcccgattcaccgcgcaaaccgtttgcgacgccgtctcacacgcagcggcagatgcccgtcaaatgtacatttgcggcggcggcatccgcaatcctgttttaatggcggatttggcagaatgtttcggcacacgcgtttccctgcacagcaccgccgaactgaacctcgatcctcaatgggtggaggcggccgcatttgcgtggttggcggcgtgttggattaaccgcattcccggtagtccgcacaaagcgaccggcgcatccaaaccgtgtattctgggcgcgggatattattattga

SEQ ID NO: 29395 - protein, 376 aa, Neisseria gonorrhoeae FA 1090
MAFCTSLGVMMETQLYIGIMSGTSMDGADAVLVRMDGGKWLGAEGHAFTPYPDRLRRKLLDLQDTGTDELHRSRMLSQELSRLYAQTAAELLCSQNLAPCDITALGCHGQTVRHAPEHGYSIQLADLPLLAELTRIFTVGDFRSRDLAAGGQGAPLVPAFHEALFRDDRETRVVLNIGGIANISVLPPGAPAFGFDTGPGNMLMDAWTQAHWQLPYDKNGAKAAQGNILPQLLGRLLAHPYFSQPHPKSTGRELFALNWLETYLDGGENRYDVLRTLSRFTAQTVCDAVSHAAADARQMYICGGGIRNPVLMADLAECFGTRVSLHSTAELNLDPQWVEAAAFAWLAACWINRIPGSPHKATGASKPCILGAGYYY

SEQ ID NO: 29396 - DNA, 1122 bp, Salmonella enterica subsp. enterica serovar Choleraesuis str
  CDS (1)..(1122): transl_table=11
atgaaatcgggccgttttattggcgttatgtccggaaccagccttgatggcgtggatgttgtattggcggcaattgatgaaaccatggttgcgcaacaggcaagtctcacctggcccattcccgttcatctgaaaaaaggcattctcgatatttgccagggacagccgcttacgctctcgcaactcggccagcttgatacccagttaggccggctttttgcacaggcggttaatgcgctgttagcgcaacaacgtttgcagccgcgggatatcgtcgccattggttgtcatgggcaaacggtctggcatgaaccgaccggcgaggccccgcatacgctgcaaattggcgataataatcacatcgtcgcccatacggggattacagtggtcggcgattttcggcggcgggatattgcgctgggcggacaaggcgcgccgttggtgcctgctttccatcacgcgctgttgggacatccgacggaaaaacgtatggtcctgaatatcggcggcatcgccaatttatctctgcttttccccggacaggcggtgcgcgggtacgacacggggccgggtaatatgttgatggatgcgtggatttggcgacaatgcgcgcagccctacgacaaagacgcggcatgggcgaaagaaggtcaggttattcttccattgctgcaaaagatgttgcgcgatccgtactttgctgcgtcggcacccaaaagtacaggacgcgaatatttcaactatggctggttagagcgtcatcttacggctttccctggcgcagacgcgcgcgatgtacaggccacgttggcggagctgacggcggtctccatcgcccaacaggtgctgctcaatggcggctgcgagcggctgatggtctgtggcggcggaagccggaatccgttagtgatggcccgtctggcggcgctgttgcccggtatcgaggtttcgaccaccgataaggcggggatcagcggcgatgatatggaagcgctggcctttgcatggcttgcctggcgaacgctcgcgggcctgccgggaaatttgccttccgtgacgggtgctacagaagccagtgttttaggcgctatttacccggctaacccaataactcagagttaa

SEQ ID NO: 29397 - protein, 373 aa, Salmonella enterica subsp. enterica serovar Choleraesuis str
MKSGRFIGVMSGTSLDGVDVVLAAIDETMVAQQASLTWPIPVHLKKGILDICQGQPLTLSQLGQLDTQLGRLFAQAVNALLAQQRLQPRDIVAIGCHGQTVWHEPTGEAPHTLQIGDNNHIVAHTGITVVGDFRRRDIALGGQGAPLVPAFHHALLGHPTEKRMVLNIGGIANLSLLFPGQAVRGYDTGPGNMLMDAWIWRQCAQPYDKDAAWAKEGQVILPLLQKMLRDPYFAASAPKSTGREYFNYGWLERHLTAFPGADARDVQATLAELTAVSIAQQVLLNGGCERLMVCGGGSRNPLVMARLAALLPGIEVSTTDKAGISGDDMEALAFAWLAWRTLAGLPGNLPSVTGATEASVLGAIYPANPITQS

SEQ ID NO: 29398 - DNA, 1122 bp, Brucella abortus biovar 1 str. 9-941
  CDS (1)..(1122): transl_table=11
atgcccgatttgaaacgcgcaataggactgatgagcggcacctcgatggatgggatcgacattgctcttcttgctaccgacggcgaaaactggatagagcggcgcgcttctgcctcgatggattattcggatggttttcgcgcgcggctgaaagcagggcttgtcgatgcgcgcgccatcaaagacagggccgagcgtcccggcctgctgcggcagcttgagcatgacctgacattgctccatgccgttgctgttcatgatttccttcacgaacagggcttgcagccgcacgagatcgacgtgatcggttttcatggccagacggtgctgcatcgcccgaacgagagcctgactgtccagatcggcgacggcgcgctgctggctcgcgaaacgggcattcctgtcgtttatgacatgcgggcggaagacatgcgccatggcggtcagggtgctcccttgattcccgcctaccatgccgctttggcggccaatctgccgcttggcctcaaaggcccggtcgtcttcgtcaatatcggcggcatctccaatctcacctatgtcggcgaggatggcgcgctgatcgcctatgacagcgggccgggaaacatgctcatcgatcaatggatggaactgcatgggcatggccggtttgatccgggcggtgcaactgcgatgagcggaagtgtggaccgaaacaccgcccaccgatatctcgaacatgaattcttcaagggaaaccaccgccgttcgctcgatcgtggcgatttcgccattccggccaagggtgaattgaaccttgccgatggcgcgcgcacacttgcatttgtaagtgcggcggcaatcctcaaatccgcttcgcatctgcctgcccgtccgcgcacctatgtggtgagcggtggagggcgcaagaatggtgcgctcatggacgagctgaccgcgcttgccgagcgcgagggcgcgcatgtgatcgatgcggataatgccggtttcgatggggacgccatggaggcagaggcctgggcctatcttgcagtgcgttcgctttgcggcctgccgctcacctatccctccacgacgggctgcgacaagcccgtttccggcggcgttcctgttaggccctaa

SEQ ID NO: 29399 - protein, 373 aa, Brucella abortus biovar 1 str. 9-941
MPDLKRAIGLMSGTSMDGIDIALLATDGENWIERRASASMDYSDGFRARLKAGLVDARAIKDRAERPGLLRQLEHDLTLLHAVAVHDFLHEQGLQPHEIDVIGFHGQTVLHRPNESLTVQIGDGALLARETGIPVVYDMRAEDMRHGGQGAPLIPAYHAALAANLPLGLKGPVVFVNIGGISNLTYVGEDGALIAYDSGPGNMLIDQWMELHGHGRFDPGGATAMSGSVDRNTAHRYLEHEFFKGNHRRSLDRGDFAIPAKGELNLADGARTLAFVSAAAILKSASHLPARPRTYVVSGGGRKNGALMDELTALAEREGAHVIDADNAGFDGDAMEAEAWAYLAVRSLCGLPLTYPSTTGCDKPVSGGVPVRP

SEQ ID NO: 29400 - DNA, 1095 bp, Pseudomonas syringae pv. syringae B728a
  CDS (1)..(1095): transl_table=11
atggacttcttctatataggtgtgatgtccggcagcagtctcgatgggattgatatcgcccttttgaagcaggatgaccgatcaaggcttctggctactcactacatccccatgccggaagacctgcatgccgagctgctggggctttgctccagcggcgcggatgagcttgcgcgtgcggccattgcggagcaaaagtggtgcaggctggtcgcacagggcgtgcagaccttgctgcaagatcaaaacatggtgcccgctcagattcgcgccattggcagccacggccagactattcgtcatgagccatcgcgcggctacagcattcagatcggcaaccctgcgctgctggcagagctgactgaaattaccgtggtcagcgacttccgccgccgcgacatcgcagcaggcggccagggtgcccccctggtgccggctttccacgaagcgttgttcgacgacaacaaggatcatcgcgccgtgttgaacatcggcgggttcagtaacctgagcctgatcgagtcggatcgcccggtcgaaggcttcgactgcggccccggtaacgtactgctcgatgcgtggatatcttcacagctccatgaaagctacgacaaggatggcgcatggtcggcgagcggcaaggttgattctgcgctgctccagaaactgctcagcgatcagtttttcctgaccaagggccccaagagtacaggccgggaagtgttcaacctgggctgggttaaacaccatctgttccagtcgaaaacactggctccagaagatgtgcaggccactctgctggaactgacagcattgacgatcaccgattccctgaaatctgcacaaccgattacccgggagcttctggtctgtggtggcggtgcgcataacaaggcgctgatgaaacgccttgcagagctgttgcccgatacagaggtcagcagtaccgagaagttcggcgtaaaccctgactgggttgaggcaatggcgtttgcctggctggcccattgctgcctcgaaggcgttccggccaaccgtccgacggtaaccggcgccaagggcagacgcgttctgggcgcgatttaccccgcctga

SEQ ID NO: 29401 - protein, 364 aa, Pseudomonas syringae pv. syringae B728a
MDFFYIGVMSGSSLDGIDIALLKQDDRSRLLATHYIPMPEDLHAELLGLCSSGADELARAAIAEQKWCRLVAQGVQTLLQDQNMVPAQIRAIGSHGQTIRHEPSRGYSIQIGNPALLAELTEITVVSDFRRRDIAAGGQGAPLVPAFHEALFDDNKDHRAVLNIGGFSNLSLIESDRPVEGFDCGPGNVLLDAWISSQLHESYDKDGAWSASGKVDSALLQKLLSDQFFLTKGPKSTGREVFNLGWVKHHLFQSKTLAPEDVQATLLELTALTITDSLKSAQPITRELLVCGGGAHNKALMKRLAELLPDTEVSSTEKFGVNPDWVEAMAFAWLAHCCLEGVPANRPTVTGAKGRRVLGAIYPA

SEQ ID NO: 29402 - DNA, 1134 bp, Xanthomonas campestris pv. campestris str. 8004
  CDS (1)..(1134): transl_table=11
atgtctgctccgacacacacgcactccccgctctatctcggcttgatgtcaggcaccagtgccgacggcatcgatgcggcgttggtgcgcttcgacgacgccagccaccgccgctgcgaactggtcgctgggatcacggtgggctgggaaccacagttgcgcgaagcgttggtcgcgctcggccagggcgccgagcagatggcgatcgaccgcttgggccgtctggacgcgcaggtcgggctggcctttgcagacgcggccaatcagctgattgccgaggccggcgtggcgcgcgagcagatccgtgcgattggctcgcacgggcagaccatccgccaccggccacaggccgacccggcctttacctggcagatcggcgacgccagccggatcgccgaacacaccggcattaccacggcggccgatttccgccggcgcgatgtggcggccggcggccagggcgcgccgctgatgccggccttccacctggcgatgctgggtgccagcgacgaagaccgtgcggtgctcaacctgggcggcatcggcaacctgacgctgatcccgcgcgacggcgcggtgctgggctttgacaccggcccggccaatgccttgctcgatagctggtgccagcagcaccgaggcacgccgttcgacgccgacggcgcgtttgcagccagcggcaaggtagatgcagcgttgctacacgcgctgttggccgacccgtggttcgcactgccgccgcccaagagcaccggccgtgagcaatttcacctggcgtgggcactgcaggccatgggcaccgcgacgctgcgcccggccgatgtgcaggccaccttgctggaattgacggcggccacggtggccgatgcgttgctgcgccaccagccgacaacgcgccgcgtactggtctgcggcggcggcgtgcgcaacccggtgctgctggcgcggttggccgcgcgcctgcctggcgtggtggtggagtccagcgcgcgccatgggctggatccggattacctggaggcgatgggctttgcctggctggccgccgagctcctggccggacggccggccaatctgccatcggtgactggtgcggcggggccgcggctgctgggggcgatttatccggcctga

SEQ ID NO: 29403 - protein, 377 aa, Xanthomonas campestris pv. campestris str. 8004
MSAPTHTHSPLYLGLMSGTSADGIDAALVRFDDASHRRCELVAGITVGWEPQLREALVALGQGAEQMAIDRLGRLDAQVGLAFADAANQLIAEAGVAREQIRAIGSHGQTIRHRPQADPAFTWQIGDASRIAEHTGITTAADFRRRDVAAGGQGAPLMPAFHLAMLGASDEDRAVLNLGGIGNLTLIPRDGAVLGFDTGPANALLDSWCQQHRGTPFDADGAFAASGKVDAALLHALLADPWFALPPPKSTGREQFHLAWALQAMGTATLRPADVQATLLELTAATVADALLRHQPTTRRVLVCGGGVRNPVLLARLAARLPGVVVESSARHGLDPDYLEAMGFAWLAAELLAGRPANLPSVTGAAGPRLLGAIYPA

SEQ ID NO: 29404 - DNA, 1092 bp, Pseudomonas fluorescens Pf-5
  CDS (1)..(1092): transl_table=11
atggcgctctatataggtgtgatgtccggtaccagccttgatggcctggacatcgccctgatcgagcaaagcccggcgcttagattggtcgccactcgctacatccccatgcccgataccctgcgcgccgaactcctgggtttgtgcgccagtggccccgacgagatcgcccgttccgccatcgcccaacagcactgggtcgagctggccgcccagggcatcaaccagcttctgcaacaacagcaactgccccctcaagacattcgcgctatcggcagccacggacaaaccgtgcgtcatgagccaagccgcgggttcacggtgcagatcggcaacccggccctgctcactgagctgaccgggatcactgtcgtcagcgacttccgcagccgcgacgtggcagcgggcgggcaaggcgcgccgctggttccggcctttcacgaagccctgttcgaccagcgcccgggaaaccgcgccgtgctgaacgtcggcgggttcagcaacctgagcctgatcgaaaccgccaagccggtggccggattcgactgtggcccgggcaacgtcctgctcgatgcctggatccaggcccaacgcgcagagaacttcgaccgcaatggccaatgggctgccagcggccaggttgatccgcccctactgcaagccctgctcagcgacccgttcttcgccacccaaggcccgaagagcaccgggcgcgaggtattcaatcttgattggctacagcggcatctgagggcacggggcgctattgccgccgaaaacgtgcaggctacccttctggagctgacagctctaaccatcgtcgagtcgctgcagagcgctcaaagtgacacccaggagttgctggtgtgcggcggcggcgcgcataacgcagcgctcatgggccgcctggcagccctcctcccgcaaacacgggtcagcagcactgcggcgtatggcgtagatcccgactgggtagaggctatggcgtttgcctggctggcccactgctgcctggaaggcatcgctgccaaccggcccagcgtcaccggcgcccgtggcctgcgtgtactaggcgccatctacccggcttga

SEQ ID NO: 29405 - protein, 363 aa, Pseudomonas fluorescens Pf-5
MALYIGVMSGTSLDGLDIALIEQSPALRLVATRYIPMPDTLRAELLGLCASGPDEIARSAIAQQHWVELAAQGINQLLQQQQLPPQDIRAIGSHGQTVRHEPSRGFTVQIGNPALLTELTGITVVSDFRSRDVAAGGQGAPLVPAFHEALFDQRPGNRAVLNVGGFSNLSLIETAKPVAGFDCGPGNVLLDAWIQAQRAENFDRNGQWAASGQVDPPLLQALLSDPFFATQGPKSTGREVFNLDWLQRHLRARGAIAAENVQATLLELTALTIVESLQSAQSDTQELLVCGGGAHNAALMGRLAALLPQTRVSSTAAYGVDPDWVEAMAFAWLAHCCLEGIAANRPSVTGARGLRVLGAIYPA

SEQ ID NO: 29406 - DNA, 1401 bp, Psychrobacter arcticum 273-4
  CDS (1)..(1401): transl_table=11
atgaccaaccccgcatcgattactgatagtcagcataataatttttcagatatgagtttagataatgattttaatagccgtctagataatatggacgatttaaactatgccactctgactgaagcacttgaacaaacggttttcgaaaacttcgatgatggcttatatatcggcatgatgtcgggcactagcttagatggtatggatgcgattctttgtcaatttagtaatcatactaatagttcaaatattagtaatgaagacaatacacagcagccaatgcacttgctagcgacatatagccaagattttccgccacgtttacgtgaggtgttattggccttgtgtcagcctaatggcatcaatcaattaacaccaacggcgggtgaaccagatagtgaattagaatggttcggttgggcaagtaaagcatatgctgagtttgcaagcgacgtggtcaatacgttattgcagcaatcaaataccgatatagagtctgtattggcgattggctgtcatggtcaaacggtacgccatcgtccgcagatgggctttagcttgcaattggtcgatgccaacatcatcgccgagcgtactggcattagcgtcgtcagtgattttcgacgccgagatatggcagtcggcggtcaaggtgcgcctctagttcctgcttttcaccaagccttatttgctgtgcctgatagcactcgcatattactcaatctgggtggtattgctaatatcgctgtcttgccagcgatttctgatgacctctcggattttaatgaacactcagacaatcagccatctgatagcgtggttggttatgatacgggtcctgccaatctactattagatgcatggacagcactgcatactgacaaggattatgatgctggcggtacatgggcgcagtcaggtcaagtcgttgagccgctactcaatcaactattagagcatccattttttgttaaagcttatccaaaaagcacagggcgcgaagattttaacttagcatggctgcaagatgagttacaaaaattcgatcaagctgctgctgatattcgctactcatcagccgatgtacaagcaacgctcactgagctgaccgccatcagtgccagtgcacaaatcaatatatttatcaatgctagtagcaataatgccgtctatgtctgcggcggcggtgcactgaacgattatctcatgatgcggttacaagcacatctaccgcgctgcaaagtagaaaccacagccagtttgggacttgagccaacttgggtggaagccgtcgcctttgcatggttggcaagacaaacactcatgggtgaaacgggtaacttacctgccgtaacgggtgcaagtaaaggcgtggtattaggacaagtatgttttgcttga

SEQ ID NO: 29407 - protein, 466 aa, Psychrobacter arcticum 273-4
MTNPASITDSQHNNFSDMSLDNDFNSRLDNMDDLNYATLTEALEQTVFENFDDGLYIGMMSGTSLDGMDAILCQFSNHTNSSNISNEDNTQQPMHLLATYSQDFPPRLREVLLALCQPNGINQLTPTAGEPDSELEWFGWASKAYAEFASDVVNTLLQQSNTDIESVLAIGCHGQTVRHRPQMGFSLQLVDANIIAERTGISVVSDFRRRDMAVGGQGAPLVPAFHQALFAVPDSTRILLNLGGIANIAVLPAISDDLSDFNEHSDNQPSDSVVGYDTGPANLLLDAWTALHTDKDYDAGGTWAQSGQVVEPLLNQLLEHPFFVKAYPKSTGREDFNLAWLQDELQKFDQAAADIRYSSADVQATLTELTAISASAQINIFINASSNNAVYVCGGGALNDYLMMRLQAHLPRCKVETTASLGLEPTWVEAVAFAWLARQTLMGETGNLPAVTGASKGVVLGQVCFA

SEQ ID NO: 29408 - DNA, 1128 bp, Candidatus Pelagibacter ubique HTCC1062
  CDS (1)..(1128): transl_table=11
atggaaaaattttatacttctttagggttaatgagtggcacatctatggatggggttgatgcgtcaattattagatcagatggtgaaagtaactatgaacctatatttgataaatattttgagtatgatggagtaatttactcaaacttactaaatctaagagataagataaattcaataaaagatttacaagataattcttatcaaattaacgagctcgagagaaaaattaccttatttcatgcaaaaattagcaaagaaattataaagaatgcaggagtggatgtagatatagttgggtttcacggtcaaacaatttttcacaatgctcaggaaaaaatatcaaaacaaataggagatggcaatttactatcaagtcttttaaaaaaaaatgtagtttataactttagagaaaatgacattcataatggcggccaaggagctccattagctccaatctttcacaacttacttataaaccagaataaaatagagaaacctgcttgtgttttaaacataggaggtatcgcaaatattactcttgttatctcaaaaaataatgaagatttaaaaagttttgatgtaggtcctggtaattgtcttttagatgaatgggttagaagacacacacaaatgaaatatgatgaaaatggaaaagcatcaaatttaggaaaaacaagtgaagttattctaaatcaagcgattgataattttgacaatataagtaatcaaaaaaaactttcatttgatataaaagattttgatttaagttttgtaaaaggtctcacatatgaggatggcttatctacattagtagattttacagcaataataatttatcaatcaattttaaaatcaatcaacagtgaagaaaataaaaagttattaataatagtttgtggtggtggaagaaaaaacctttcattaatggagagcataagaaaaagactaccaaaaaatatttatttaaaaataattgatgattataaagttgatggtgatttcatcgagtctcaagcttttgcttatcttgcaattaggtctgcacttaaaaaagtaatttcattccccaatactacaaatgtcaaaaaaccgtcaataggtggagttttagttaaaaactattaa

SEQ ID NO: 29409 - protein, 375 aa, Candidatus Pelagibacter ubique HTCC1062
MEKFYTSLGLMSGTSMDGVDASIIRSDGESNYEPIFDKYFEYDGVIYSNLLNLRDKINSIKDLQDNSYQINELERKITLFHAKISKEIIKNAGVDVDIVGFHGQTIFHNAQEKISKQIGDGNLLSSLLKKNVVYNFRENDIHNGGQGAPLAPIFHNLLINQNKIEKPACVLNIGGIANITLVISKNNEDLKSFDVGPGNCLLDEWVRRHTQMKYDENGKASNLGKTSEVILNQAIDNFDNISNQKKLSFDIKDFDLSFVKGLTYEDGLSTLVDFTAIIIYQSILKSINSEENKKLLIIVCGGGRKNLSLMESIRKRLPKNIYLKIIDDYKVDGDFIESQAFAYLAIRSALKKVISFPNTTNVKKPSIGGVLVKNY

SEQ ID NO: 29410 - DNA, 1191 bp, Colwellia psychrerythraea 34H
  CDS (1)..(1191): transl_table=11
atgattaataataaaacggtagcagaaggaagatactatattggcttaatgtcaggcaccagtgctgatggtatcgacttggcgctagtagactttactgataaggggcaacagcctcgattagttgctagtttctatcaaagttatagcgctattattgcagataaaatcacctcactttatcaacctgggagtaatgagattgatcgtgcatttcatttggatgttgaattagcgcagttattttctcaggccattaatgcattacttaatcaagaaaagctaacccctgaagatattattgccattggtaatcacgggcaaaccattcgtcatcgtccaagtggcgataacccatttactttacaaataggttgctgccaaacgttggctacgttgactgggattcgcgtggtaggtcagtttcgtcgtaaagatatggcgttaggtggtcaaggcgcacctttagtcccgatttttcatcaacagttattcactcaaacaaccgccgcgaactttgtggtgaatataggcggtattgccaatataacctttttgccaacacgagattctaatcaagctgttttgggttttgatacaggaccaggtaatgctttacttgatgattggttcactaaacatcacccaaatagtgatgactgctttgataaaaatggcgcttgggcaacaacgggacaagttattccgttgttgctagagcagttgatgcaagatgattatataaattctgcagcacctaaaagtacaggaagagaatattttcaccttgaatggcttgaacagcaattaacagcttttaaagaggcaactcattcgcaacatgaaacagtaatcaatcataatgccgatattcaagcgacactattggcttttaccgcacagagtattagcgacgccattatggcgctaacggcacaaggtaaagtctacttgtgtggcggcggtgtccataataaggctctagtggaagcgcttagcagtagattaactgcatccgacactgtctttgaaataaacaccatgcaagcactgaatattgatggtgatattcttgaagctatggcgtttgcttggcttgcatacgcttttgatcaaggtttagacagtaatctgccagcagtcactggtgcgagcgcaagttgtaccttaggtagtgcttttcttccttaa

SEQ ID NO: 29411 - protein, 396 aa, Colwellia psychrerythraea 34H
MINNKTVAEGRYYIGLMSGTSADGIDLALVDFTDKGQQPRLVASFYQSYSAIIADKITSLYQPGSNEIDRAFHLDVELAQLFSQAINALLNQEKLTPEDIIAIGNHGQTIRHRPSGDNPFTLQIGCCQTLATLTGIRVVGQFRRKDMALGGQGAPLVPIFHQQLFTQTTAANFVVNIGGIANITFLPTRDSNQAVLGFDTGPGNALLDDWFTKHHPNSDDCFDKNGAWATTGQVIPLLLEQLMQDDYINSAAPKSTGREYFHLEWLEQQLTAFKEATHSQHETVINHNADIQATLLAFTAQSISDAIMALTAQGKVYLCGGGVHNKALVEALSSRLTASDTVFEINTMQALNIDGDILEAMAFAWLAYAFDQGLDSNLPAVTGASASCTLGSAFLP

SEQ ID NO: 29412 - DNA, 1095 bp, Pseudomonas syringae pv. phaseolicola 1448A
  CDS (1)..(1095): transl_table=11
atggacttcttctatataggtgtgatgtccggcagcagtctcgatgggattgatatcgcccttttgaagcaggatgaccgctcaaggcttctggctactcactacatcccgatgccggaagatctgcatgccgaactgctggggctttgctccagtggcgtcgatgagcttgcacgcgcagcaatcgccgagcagaagtggtgcaggctggtcgcacagggcgtgcagaccttgctggaagatcaaaacatggtgcctgctcagattcgcgccattggcagccacggccagactattcgtcatgaacctgcgcgcggctacagcattcagatcggcaacccggcgctgctggcagagctgacagaaatcaccgtggtaagcgattttcgtcgtcgcgacatcgccgcaggcggacagggtgcgccgctcgtacccgccttccacgaagcactgttcgacgataacaaagaccaccgcgctgtattgaacatcggcggcttcagcaatctgagcctgatcgaatccgatcgcccggtcgaaggcttcgattgcggtccaggtaacgtgctgctggatgcctggatacaatcccagcgccatgaaagctacgacaaggacggggaatgggcggcgagcggcgaggttgatcaagcgcttctccagaaactgctcagcgatcagtttttcctgaccaaaggcccaaaaagcaccggtcgggaagtgttcaacctgggttgggtgcaccatcatctgttccagctgccaacgttgacacctgaagacgtgcaagccacgctgctggaactgactgcattgaccatcacagagtccctgcaatcggcacaagcgatcaccaaggagcttctggtctgtggcggcggcgcacataacaaggcgctgatgaaacgccttgcagagctattgcctgacacagaggtcagcagtaccgagaagttcggcgtggaccctgactgggttgaggccatggcatttgcctggctggctcattgctgcctcgaaggcgtaccggccaaccgcccaacggtaaccggcgctaaaggcagacgtgttctgggcgcgatctaccccgcctga

SEQ ID NO: 29413 - protein, 364 aa, Pseudomonas syringae pv. phaseolicola 1448A
MDFFYIGVMSGSSLDGIDIALLKQDDRSRLLATHYIPMPEDLHAELLGLCSSGVDELARAAIAEQKWCRLVAQGVQTLLEDQNMVPAQIRAIGSHGQTIRHEPARGYSIQIGNPALLAELTEITVVSDFRRRDIAAGGQGAPLVPAFHEALFDDNKDHRAVLNIGGFSNLSLIESDRPVEGFDCGPGNVLLDAWIQSQRHESYDKDGEWAASGEVDQALLQKLLSDQFFLTKGPKSTGREVFNLGWVHHHLFQLPTLTPEDVQATLLELTALTITESLQSAQAITKELLVCGGGAHNKALMKRLAELLPDTEVSSTEKFGVDPDWVEAMAFAWLAHCCLEGVPANRPTVTGAKGRRVLGAIYPA

SEQ ID NO: 29414 - DNA, 1137 bp, Prochlorococcus marinus str. NATL2A
  CDS (1)..(1137): transl_table=11
atgcgtgtattgggtttgatgagtggtacgagtgcggatggaatagatgcagttttagttgattttacaggtgatccttcaaggccaaaatggcaaattttaaacacattttcttatgaatatccttcatcaattagagaaaaaataatacaagtaggtcaaggattaaaaattagtagcaaagattggctcgagttggctgaggaaattactgaactaaatgcttttgctgctcgtacttgtgaccctgattcaaccgcagaggttgttggatgtcatgggcaaactttatttcatagaagtgtaaaaaaatctaaaagaggaggaagtcttcaaattcttttaggacctttactcgcaaatcttttagatcaaattgttatttatgattttagatctaaggatattgcttcaggtggtcatggtgcccctttagtagcattagtcgatgaagctttagttggaaggttatatggatggagaggagtcctcaaccttggtggaattgctaatcttacaattattccacctaaaactggaattgataaaacttctcaatgcttaggctgggattgcggaccggctaattctttagttgatttagctgttaaagaaagtacaaattcatctttaacttttgatgaaaatggatcattagcatcgcttgggattcctaaattagaaatcatcgataagtggttgagggatccttttttttatctagagcctccacgatctacaggtagagaacaattcggttttcaatacttacagaaaagaaaaaaggaattgggtgatatttccaaagaagatttaatatctacattaactacatttaccgcgtcaattatctctcaagatttagataatctttttaagcttaaacagatacgtttaattgagcttttggttgctggaggtggaagtaaaaatctatttttaatgaggcaactacagaaacaatgttgtggtgttcatgttcgtccaatacatgaaattggtgttccatcgcaatatagagaagccctcgtttttgcaactttatcttggtggaactttttaggaaaaaaagttcacccgaagtacatcacaggagcaaataaacctattttatatggagtacgtgttgatccttaa

SEQ ID NO: 29415 - protein, 378 aa, Prochlorococcus marinus str. NATL2A
MRVLGLMSGTSADGIDAVLVDFTGDPSRPKWQILNTFSYEYPSSIREKIIQVGQGLKISSKDWLELAEEITELNAFAARTCDPDSTAEVVGCHGQTLFHRSVKKSKRGGSLQILLGPLLANLLDQIVIYDFRSKDIASGGHGAPLVALVDEALVGRLYGWRGVLNLGGIANLTIIPPKTGIDKTSQCLGWDCGPANSLVDLAVKESTNSSLTFDENGSLASLGIPKLEIIDKWLRDPFFYLEPPRSTGREQFGFQYLQKRKKELGDISKEDLISTLTTFTASIISQDLDNLFKLKQIRLIELLVAGGGSKNLFLMRQLQKQCCGVHVRPIHEIGVPSQYREALVFATLSWWNFLGKKVHPKYITGANKPILYGVRVDP

SEQ ID NO: 29416 - DNA, 1119 bp, Thiobacillus denitrificans ATCC 25259
  CDS (1)..(1119): transl_table=11
ttgagcgcagttcccacgcatgaggccgaaccctacgtcggcctcatgtccggcaccagccttgacggcatagacgcggtcctggccgagatcggcaccggcaaccaagttcgcctgctccgtacccgatacatccattatcccgacgacctgcgcgcgcagttgctcgcgctccatacgccgcaggccgacgaagtccatctcgcggcgcttgccgccaacgctctggcacgtctctacgccgaagcggtcggagcgctgcttgagggcatcgatccggccaaaatccgcgcgatcggctgccacggccagaccctgcgccaccggccgggggacggctatacgatccagatcggaaacgcgtcgctgctggccgaactcgcgggcatcgccgtcgtctcggacttccgaagccgcgacatcgcggcgggcggccagggcgcgccgctggtcccggccttccacgcccgcgtgctggcccatcccgagattcaccgggtcattgccaacgtcggggggatcgcgaacatcacggaccttccgccgaatggcccgatccggggctgggatacggggccgggcaacatgctcatggacgcgtggatccatcggcatcagggaagccggtacgatcgcgatgggagttgggccgccgagggcagcgtggccgccggactcctgcaagcattgctgcgccacccctacctggagcagcgcccgccgaaaagcgccgggcgcgagcagttcaacctggaaagtctcgacacgacgctggccggactagggcagaggctcgagccgggcacggtacaggccaccctgctcgaatttaccgccgtctcgctctgcgacgccgtgacgcaggagtgccgcggcgcgcaagaactctacgtctgtggcggcggcgcgcacaacggcgccttgatgcggcgcatcgcggcgctcctcccgcacgtccgcgtcacgacgactgccgacctgggcatcgacccggattgggtcgaggcgctcgcgtttgcttggctcgcccggcagacgatgcacggcgaagccggcaacctgcctgccgtgacaggcgcatgcggggaacgcatactcggcgcgatccatccggcctga

SEQ ID NO: 29417 - protein, 372 aa, Thiobacillus denitrificans ATCC 25259
MSAVPTHEAEPYVGLMSGTSLDGIDAVLAEIGTGNQVRLLRTRYIHYPDDLRAQLLALHTPQADEVHLAALAANALARLYAEAVGALLEGIDPAKIRAIGCHGQTLRHRPGDGYTIQIGNASLLAELAGIAVVSDFRSRDIAAGGQGAPLVPAFHARVLAHPEIHRVIANVGGIANITDLPPNGPIRGWDTGPGNMLMDAWIHRHQGSRYDRDGSWAAEGSVAAGLLQALLRHPYLEQRPPKSAGREQFNLESLDTTLAGLGQRLEPGTVQATLLEFTAVSLCDAVTQECRGAQELYVCGGGAHNGALMRRIAALLPHVRVTTTADLGIDPDWVEALAFAWLARQTMHGEAGNLPAVTGACGERILGAIHPA

SEQ ID NO: 29418 - DNA, 1158 bp, Haemophilus somnus 129PT
  CDS (1)..(1158)
atgttattatgtttagcaaacatacgttcttcttttatgcaaaaaaataatcactattatattggaattatgtccggtacaagtttagacggtgttgatatagccttaatggattttaatcaaagaccgcccaaactgcttgcaagttattgtttctctatgccggaaaatttacgccaaaaacttaccgcacttttatcatccggcacaatcggtttgcagcaattaggcgagttggatcatcaactgggattactttacgcaaactcggtacaacgtttcttagcacaaaatcaaatgaccgctgataatattcaagccatcggttgtcatggacaaacgatttggcattcaccccaaggtcaatatcctttcactatgcaaattggcgatgctaacctgattagtgtactgacaggaattacgactatcgctgattttcgtcgcaaagatatggcttatggtggacaaggtgcacctttgtccactgcatttcatcaagccttatttgcacaacccgatcgtattacagtagtgttaaatattggcggtatcagtaatatttcttgtttaattccggaacaagaagttattggttatgataccggtgtaggtaatgctttgatggatagttggattgaacaacatttaggggtgcctttcgaccaagacggtgaatgggcaaagagcggtagtgttcaccaagatttgctaaaagatttattggacgaacctttttttcaacaacttccccctaaaagtactggacgggaattatttaatttggcgtggttgaacaaaaaactgaaaaaacataccgcactttctgcacaagatgtacaggcaacgttgctggaatttacggtacaatgcacggtgcaagagctggttaaactcgctaatccgaaccatttgccttgtttgttgttggtttgtggcggtggtgcaaaaaacagacaactaatggctcgtttacaagcctgtttaccgcaatggcacgtagcaacaactacagagcatggtttatcggttgattatgttgaagccgccgcttttgcttggttagcgtatcagcgtataaatcatttaccctctaatttgccaagtgtaaccggtgctaaaagtgcggtcagtcttggcgttatttatccgaaataa

SEQ ID NO: 29419 - protein, 385 aa, Haemophilus somnus 129PT
MLLCLANIRSSFMQKNNHYYIGIMSGTSLDGVDIALMDFNQRPPKLLASYCFSMPENLRQKLTALLSSGTIGLQQLGELDHQLGLLYANSVQRFLAQNQMTADNIQAIGCHGQTIWHSPQGQYPFTMQIGDANLISVLTGITTIADFRRKDMAYGGQGAPLSTAFHQALFAQPDRITVVLNIGGISNISCLIPEQEVIGYDTGVGNALMDSWIEQHLGVPFDQDGEWAKSGSVHQDLLKDLLDEPFFQQLPPKSTGRELFNLAWLNKKLKKHTALSAQDVQATLLEFTVQCTVQELVKLANPNHLPCLLLVCGGGAKNRQLMARLQACLPQWHVATTTEHGLSVDYVEAAAFAWLAYQRINHLPSNLPSVTGAKSAVSLGVIYPK

SEQ ID NO: 29420 - DNA, 1158 bp, Haemophilus somnus 2336
  CDS (1)..(1158)
atgttattatgtttagcaaacatacgttcttcttttatgcaaaaaaataatcactattatattggaattatgtccggtacaagtttagacggtgttgatatagccttaatggattttaatcaaagaccgcccaagctacttgcaagccattgtttctctatgccggaaaatttacgccaacaactcaccgcacttttaaaaaacggagaaattggcttacagcaattaggcgagttggatcatcaactgggattactttacgcaaactcggtacaacgtttcttagcacaaaatcaaatgaccgctgatagtattcaagccatcggttgtcatggacaaacgatttggcattcaccccaaggtcaatatcctttcactatgcaaattggcgatgctaacctgattagtgtactgacaggaattacgactatcgctgattttcgtcgcaaagatatggctcatggtggacaaggtgcacctttgtcccctgcatttcatcaagccttatttgcacaacccgatcgcattacggtagtgttaaatattggcggtatcagtaatatttcttgtttaattccggaacaagaagttattggttatgataccggtgtaggtaatgctttgatggatagttggattgaacaacatttaggggtgcctttcgaccaagacggtgaatgggcaaagagcggtagtgttcaccaagatttgctaaaagatttattggacgaacctttttttcaacaacttccccctaaaagtaccggacgggaattatttaatttggcgtggttgaacaaaaaactgaaaaaacataccgcactttctgcacaagatgtacaggcaacgttgctggaatttacggtacaatgcacggtgcaagagctggttaaactcactaatccgaaccatttgccttgtttgttgttggtttgtggcggtggtgcaaaaaacagacaactaatggctcgtttacaagcctgtttaccgcaatggcacgtagcaacaactacagagcatggtttatcggttgattatgttgaagccgccgcttttgcttggttagcgtatcagcgtataaatcatttaccctctaatttaccaagtgtaaccggtgctaaaagtgcggtcagtcttggcgttatttatccgaaataa

SEQ ID NO: 29421 - protein, 385 aa, Haemophilus somnus 2336
MLLCLANIRSSFMQKNNHYYIGIMSGTSLDGVDIALMDFNQRPPKLLASHCFSMPENLRQQLTALLKNGEIGLQQLGELDHQLGLLYANSVQRFLAQNQMTADSIQAIGCHGQTIWHSPQGQYPFTMQIGDANLISVLTGITTIADFRRKDMAHGGQGAPLSPAFHQALFAQPDRITVVLNIGGISNISCLIPEQEVIGYDTGVGNALMDSWIEQHLGVPFDQDGEWAKSGSVHQDLLKDLLDEPFFQQLPPKSTGRELFNLAWLNKKLKKHTALSAQDVQATLLEFTVQCTVQELVKLTNPNHLPCLLLVCGGGAKNRQLMARLQACLPQWHVATTTEHGLSVDYVEAAAFAWLAYQRINHLPSNLPSVTGAKSAVSLGVIYPK

SEQ ID NO: 29422 - DNA, 1110 bp, Actinobacillus pleuropneumoniae serovar 1 str. 4074
  CDS (1)..(1110)
atgactaaaaacctctacctcggcgtgatgtccggcaccagccttgacggcgtggatttatgtgtgatggactttgcaaaaaatccgccaaaattgaccgcttgcggctttaccccaatgccggaagatttacgcaccgatttatcgcacttactcaaaagcggagaaacttccttacaaaagttaggtgaaatcgatcaccgtttaggcttgctgtatgccgaaagtatcaagcgttttttagccgaacatcaactcagtgcaagtgatattcaggcaatcggctgtcacggacaaactgtctggcattctccaaacggcaacttcccgtttactatgcaaatcggcgatatgaatttggttgccgctcataccggcattactactattgcagatttccgtcgtaaagatatggcagtcggcggacaaggcgcaccattagtgcctgcttttcacgaagggatttttgcctcgccggaacgcttaaccgtagtgctgaacatcggcggtatttccaatatttcggtacttgcgccacagcagccgacaatcggctacgatgtcagtgtcggtaatgcactgatggattcgtggatagagctgcaccaagctaaacgctatgacaaaaatgccgaatgggcaaaaaccggaacactgattccggcattgctcgacagtctgcttgacgagccttttttcaaattacctgccccgaaaagcaccggacgagaattatttaatctcgaatggcttgcaaaaaaatcggcaaatttaaccgcttatcgtcctgaagacgtacagcgtacattggcggaatttaccgtacaaagtgtagtaaacgaactaaaaaccttagaaagtgaaaagcaatgcttgttacttgcttgtggtggtggcgcacgcaacccattgttaatgcagagattttcagaattactgccaaaatggcaggtggctaccaccgatgagtacggattggatattgattatgtcgaagcagctgcttttgcctggctggcttatcaacgagtgcataatttaacgaacaacttaccaagcgtaaccggagcaaaagagccggtgagtttaggggtaatttatcctaagtaa

SEQ ID NO: 29423 - protein, 369 aa, Actinobacillus pleuropneumoniae serovar 1 str. 4074
MTKNLYLGVMSGTSLDGVDLCVMDFAKNPPKLTACGFTPMPEDLRTDLSHLLKSGETSLQKLGEIDHRLGLLYAESIKRFLAEHQLSASDIQAIGCHGQTVWHSPNGNFPFTMQIGDMNLVAAHTGITTIADFRRKDMAVGGQGAPLVPAFHEGIFASPERLTVVLNIGGISNISVLAPQQPTIGYDVSVGNALMDSWIELHQAKRYDKNAEWAKTGTLIPALLDSLLDEPFFKLPAPKSTGRELFNLEWLAKKSANLTAYRPEDVQRTLAEFTVQSVVNELKTLESEKQCLLLACGGGARNPLLMQRFSELLPKWQVATTDEYGLDIDYVEAAAFAWLAYQRVHNLTNNLPSVTGAKEPVSLGVIYPK

SEQ ID NO: 29424 - DNA, 1116 bp, Microbulbifer degradans 2-40
  CDS (1)..(1116)
atgaaaccctctttgtttgtaggcgttatgtctggcacgagcgcagatggcattgatgtcgcgctcgtagattttagccaagctacacctgcactagtaggcagcgaatcgcatgcctaccccaaccacattcgcgagcacgttttaggcttgtgcacacccgccaacaacgaaatagacgctctcggtcagctggatgtagaattgggcaaattgtacgcccacgcggtgaactcactactggccaacacccaaacacccgcagcacaaatccaagccattggttgccacggccaaaccttgcgccaccgcccgctaggcagcggttatgctagcccgtttagcttacaaattggcgatccaaacactattgctgcccttaccggcattgctacggtggccgattttcgtcgcaaagacgtggccctaggcggccaaggagcaccacttgtgccagcgtttcatgcggctgtttttggcagcactacaaccgatagatgtatcgccaacattggcggtatagctaacattacctgcctacccgcaaatagccatattgctggctacgatacaggccctgggaacgcgttgatggacgcatggatagaggccaatcaaggcgctaaatacgacgcaggtggcgcgtgggcgcaaaccggcaagcttaaccagccgctgctagaaatattgctgcaacacccctatttcgcgctgccagcccctaaaagcactggccgcgaagactttaatatgacatggctacaggcctgtctaaaccaaacgaatttaccgctaccacccgaagatgtgcaggccacgctcacagaattgacggctataagcctaaccgacggcgtaaaacgaagctgccccaacgctgagctggtcatttgtggcggcggagcctttaacaccgccctacttgaacgcattcaacaccattacccccaaaagcccacagtaacgagccagcagcttggtatagcaccaacatgggtagaagccatggcctttgcttggttggctatgcgcaggctagaaaaccaaccgggcaatgtccctgcagtaactggcgctagtcgtgaagcggtgttgggcggcatatacacaccctaa

SEQ ID NO: 29425 - protein, 371 aa, Microbulbifer degradans 2-40
MKPSLFVGVMSGTSADGIDVALVDFSQATPALVGSESHAYPNHIREHVLGLCTPANNEIDALGQLDVELGKLYAHAVNSLLANTQTPAAQIQAIGCHGQTLRHRPLGSGYASPFSLQIGDPNTIAALTGIATVADFRRKDVALGGQGAPLVPAFHAAVFGSTTTDRCIANIGGIANITCLPANSHIAGYDTGPGNALMDAWIEANQGAKYDAGGAWAQTGKLNQPLLEILLQHPYFALPAPKSTGREDFNMTWLQACLNQTNLPLPPEDVQATLTELTAISLTDGVKRSCPNAELVICGGGAFNTALLERIQHHYPQKPTVTSQQLGIAPTWVEAMAFAWLAMRRLENQPGNVPAVTGASREAVLGGIYTP

SEQ ID NO: 29426 - DNA, 1212 bp, Brevibacterium linens BL2
  CDS (1)..(1212)
atgatcatcgccggcctgatgacaggaacgtccgccgatgccctcgacgtcgtcctcgctgatttcatccacgatgacggtgacgagctgagtgtccgccaggcggctggtctctccgaacttggtgtccgcatcctcgccagccgagaggtcgaattcgaccagcagctgcgccgcgacatcctgcgtctgctcgagcctgccgacgtccccctgtccttggtctccagtgtcgatgcccgcttgggccgcttctgcgcccaggccgtcagcgacctctgcaccgaaaccggagtcgaggccgagctcatcgtctcccacgggcagaccgtgcgccacgacatcaccgagggtgccgtcacctccacactgcagatcggccaaccggcatggatcgccgaggcgaccggagctcccgtactctccgacgtccgtgcccgcgacgttgccgccggtgggcagggcgccccgctcgtcggaatcctcgacagcctccttgtcggtgacgtcgaggctccgattgcggtgctcaacctcggcggcatcgccaacatcacggtcctcgcgcccgagcgcgcaccgctggccttcgacaccggccccgccaatgcactcatcgacatcctcgcccgcaggatcaccaaaggggaggcgggcttcgaccgtgacggggagctggccgcacgcggtcgggtcgatgaggagctgctcgagcagctgctggccgatccgtactaccaacttccggcaccgaagtcgacgggcaaggaactcttccacgcggactacctcgatggattcctcgaacccaggacccacctcggcgagcatgatgccatcgcgacggtcacggcgctgaccgcgcgcacggtcgccgatgcctgccacgcacacggagtcaccacggtcatcgcctccggcgggggcacccggaacccgacgttgctggggcgaatggcctcggaactcggccccggcatcaccctgaccagcacggatcaggccttcgggctgcccgaaggtgccaaagaagccctcctcatggcgctgctcggatggctgagctggaacggactcgcaggcaccgagccgaacctcaccggtgccgcgcattcgagcatcgccggacggctgagtccgggacgcggcccgctgaacctgcccgagcctctggaagccagacccacacgcctgagaatcctggaccgatga

SEQ ID NO: 29427 - protein, 403 aa, Brevibacterium linens BL2
MIIAGLMTGTSADALDVVLADFIHDDGDELSVRQAAGLSELGVRILASREVEFDQQLRRDILRLLEPADVPLSLVSSVDARLGRFCAQAVSDLCTETGVEAELIVSHGQTVRHDITEGAVTSTLQIGQPAWIAEATGAPVLSDVRARDVAAGGQGAPLVGILDSLLVGDVEAPIAVLNLGGIANITVLAPERAPLAFDTGPANALIDILARRITKGEAGFDRDGELAARGRVDEELLEQLLADPYYQLPAPKSTGKELFHADYLDGFLEPRTHLGEHDAIATVTALTARTVADACHAHGVTTVIASGGGTRNPTLLGRMASELGPGITLTSTDQAFGLPEGAKEALLMALLGWLSWNGLAGTEPNLTGAAHSSIAGRLSPGRGPLNLPEPLEARPTRLRILDR

SEQ ID NO: 29428 - DNA, 1095 bp, Azotobacter vinelandii AvOP
  CDS (1)..(1095): transl_table=11
atgacgctttatctgggagtaatgtcaggcaccagcctggacggaatagacattgccctcgtcgcgcaggagggtacccacaccaggctactcggcacccactatttgcccatgccggcgggtcttcgcatcgatctgctgtccctatgctctcccggtcccgatgaactggtacgagcagctctcgctgaacagcagtgggtgcgtctggccgcccaaggtatcggcagtctgctcgaacggcaaggcatcgagcctacccggattcgcgccattggcagccatggacaaaccgtccgccaccaccccgctcaaggcgttaccatccagatcggcaatccggccctgctggccgaatgcaccggcatcagcgtcgtcagcgatttccggcgacgcgacctggccgctggcggccaaggtgcgccactggtaccagccttccatcagacgctcttcgcagacgacaacagtcgccgcgccattctcaatatcggtggtttcagcaacctgaccctgatcgagccgggaaaaccggtctacggtttcgactgcggccccggcaacgttcttctggatgcctggatacaacatcagcagggtgccgagttcgatcgcgacggagcctgggcggccagtggcaaggtgcagccggcattactgcagacattgcttggcgaccccttcttcctgacccatggcccgaaaagcacgggtcgcgaactgttcaacatggactggctgagccggcaactggccaaactgccagccatggcaccggtggacatacaggccacgctgcttgagctcaccgccgccagcaccgtaaacgccttgcaggcaatccaggacaagactgacgagttgctcgtctgcggcggcggcgcccataacctggcactcatgggacgactggccgcgctattgcctgctaccagggtagccagcaccgaagcctacggaatccccccggactggatcgaggccatggccttcgcctggttggcacattgttgcctggaaagtattcctgccaaccgaccgagcgtgaccggtgcgcggggtcccaggattctcggggcgatctatccggcctga

SEQ ID NO: 29429 - protein, 364 aa, Azotobacter vinelandii AvOP
MTLYLGVMSGTSLDGIDIALVAQEGTHTRLLGTHYLPMPAGLRIDLLSLCSPGPDELVRAALAEQQWVRLAAQGIGSLLERQGIEPTRIRAIGSHGQTVRHHPAQGVTIQIGNPALLAECTGISVVSDFRRRDLAAGGQGAPLVPAFHQTLFADDNSRRAILNIGGFSNLTLIEPGKPVYGFDCGPGNVLLDAWIQHQQGAEFDRDGAWAASGKVQPALLQTLLGDPFFLTHGPKSTGRELFNMDWLSRQLAKLPAMAPVDIQATLLELTAASTVNALQAIQDKTDELLVCGGGAHNLALMGRLAALLPATRVASTEAYGIPPDWIEAMAFAWLAHCCLESIPANRPSVTGARGPRILGAIYPA

SEQ ID NO: 29430 - DNA, 1116 bp, Chromohalobacter salexigens DSM 3043
  CDS (1)..(1116): transl_table=11
atgcccctttacatcggcttgatgtccggcaccagcctggatggtatcgacgccgccctggtacggtgcggcgagggccgtcccgagtggctcggcgccaccggcctgcccttttccgctgcgctgcacgatgacctgctggcactctgcctggcacgcgaggtttcgttcgccgaactggcacgcctcgagaccgccttctgcgaacgtcaggccgaagcggtcaaccgcctgctgctcgaaacgggcacgccccgggaagcgatcacggccatcggcagccacggccaaaccatcgaacacgccccgaacgccacgccggcgcatacctaccagctcgacaatcccagcctgctggccgagctgaccgggtgcgccgtggtcggcgatctgcggcgccgggacctggcggccggaggccaggccgcccctctggcgcccgcctttcatgctgccctcttcaccgcgtcggaggcctatcgcctggtactcaatctcggcggcatcgccaacctgacgcgactgccgccgtccggccaggctgcccccgtggtgggcttcgataccggtcccgccaacatgctcatggatgcctggagccagcgccacctgggacacccctacgatgccgacggtgcctgggccgccagcggtcgtgtcgatgatgcgctgctcgcccgactgctcgatgacgactacttctcacgcctgccgcccaagagcacgggacgcgagcattttcacctcgactggctgacgtcacgcttgagcgggcacgaatccccttgtgacgtacaggcgaccctggccgagctgaccgccgccagcatcgccatgggcgtcacccaatgcagcgctggcgtctccactgcctatgacgccctgatcccctgcggcggaggcgcccacaacgccgacctgctgacacgcatacagcgccacttgcccgagattccgctgacgccctgtgaacggttcggctggtcgccggactggctcgaagccggcgccttcgcctggctggcgcatcaacgcgtggcaggactccccggcaacctgcccgacgtcacgggtgcacgcggcccacgggtattgggcggtctctacgccggctga

SEQ ID NO: 29431 - protein, 371 aa, Chromohalobacter salexigens DSM 3043
MPLYIGLMSGTSLDGIDAALVRCGEGRPEWLGATGLPFSAALHDDLLALCLAREVSFAELARLETAFCERQAEAVNRLLLETGTPREAITAIGSHGQTIEHAPNATPAHTYQLDNPSLLAELTGCAVVGDLRRRDLAAGGQAAPLAPAFHAALFTASEAYRLVLNLGGIANLTRLPPSGQAAPVVGFDTGPANMLMDAWSQRHLGHPYDADGAWAASGRVDDALLARLLDDDYFSRLPPKSTGREHFHLDWLTSRLSGHESPCDVQATLAELTAASIAMGVTQCSAGVSTAYDALIPCGGGAHNADLLTRIQRHLPEIPLTPCERFGWSPDWLEAGAFAWLAHQRVAGLPGNLPDVTGARGPRVLGGLYAG

SEQ ID NO: 29432 - DNA, 1080 bp, Methylobacillus flagellatus KT
  CDS (1)..(1080): transl_table=11
atgtcaggcaccagcctggatggtgccgacagcgtaatcgtcaagctggaaaatcagcgctgccaagtcatccagcaacagttcacaccttaccccgcagctttgaaacatatgctgttggcattgcataatccgggccataacgagctcgagtcaatggcacgtacaggcaaccaacttgccacgttatacgccgaaaatatagaagcattgctgaagaaggcctgtctccaccctaaggcaatacgtgcgattggctgccacggccaaaccatacgccatcgtcctgaatggggctttacgctgcagatcggcaacccagcattgttggccgagctgacaggaatcgacgtcgtcgccgacttccgtagccgcgacattgcggcaggcggtcatggcgctcccctggtacctgccttccatgccgccatgttctcttctgccgagaagcaccgggttgtgctcaatattggcggtattgccaaccttaccaacctaccggcaacagggggcaacatcatcggatttgatacaggccctggcaatatgctcatggatgcttggatcaataaacaccaaggcagggactacgataggcaaggaacttgggcagcaagcggctccatccttcccgatctgttacaccgcatgctttccgactcatttttcgccagacagccacctaaaagtacgggccgtgatacgttcaacctggcttggcttgagcagctattgcaccaaattaaagacaaaccccggccgcaggatgtgcaacgcacactattggaactgactgccgtttcaattgccatggcagtgacacagcattgcggtaatgttgatgagctgtatgtatgtggtggtggcgcttataataacgccttgatgcaacgcttacggcaattgctgcagccagtgcctattgcactgagtgatacactgggccttgcagccaatgctgtagaagcagctgcttttgcctggctggcgaaacagactttacatggactgcctggcaacctgcctgccgtgactggcgcatgtggtccgagaatacttggcgcagtttatgctgcttaa

SEQ ID NO: 29433 - protein, 359 aa, Methylobacillus flagellatus KT
MSGTSLDGADSVIVKLENQRCQVIQQQFTPYPAALKHMLLALHNPGHNELESMARTGNQLATLYAENIEALLKKACLHPKAIRAIGCHGQTIRHRPEWGFTLQIGNPALLAELTGIDVVADFRSRDIAAGGHGAPLVPAFHAAMFSSAEKHRVVLNIGGIANLTNLPATGGNIIGFDTGPGNMLMDAWINKHQGRDYDRQGTWAASGSILPDLLHRMLSDSFFARQPPKSTGRDTFNLAWLEQLLHQIKDKPRPQDVQRTLLELTAVSIAMAVTQHCGNVDELYVCGGGAYNNALMQRLRQLLQPVPIALSDTLGLAANAVEAAAFAWLAKQTLHGLPGNLPAVTGACGPRILGAVYAA

SEQ ID NO: 29434 - DNA, 1110 bp, Shewanella baltica OS155
  CDS (1)..(1110): transl_table=11
atgaaaaacgcttattatattggacttatgtcaggcaccagcatggacggtgtcgatgccgtattggtcgacttttctggcgcgcagccgcagcttatcaccagccataccgaagccataccgagccatttgctcaaaggcctacagcgcctttgttcacccagcacagatgaaattaaccgcctcggccgtttagatcgtaatgtgggtgaactgtttgctttagcagtgaataatctactaaccaaatgcgccattgccaaagaagatgtcatcgccattggtagccacggccaaaccgtgcgccacatgccaaacctcgaagtcggctttaccctgcaaattggcgacccgaatactattgcgaccgaaaccggtattgatgtgattgccgattttcgccgtaaagatattgccctaggtggccaaggcgcgcccttagtgccagcattccaccagcaaacctttgctgaagtcggcaaaaaacgcatcattttaaatattggcggcatagccaacattacttatttaccaggcaacagtgaccaagtactgggtttcgacacgggacctggcaataccttgatcgatgcttggatccagcaggtgaaaagtgagcccttcgatagagatggtgcatgggctgagtccggcaaaaccgaccaagacctgttaactcaactgctttcgcacccgtatttctcccttgcttaccctaaaagcaccggccgagagctatttaaccaagcttggttagaacagcaattatcgccttttaatcatttagatgaagaagatatccaatcgacgttattggatttaacctgccacagcatagcccgcgatatgattaaattatcgaatgaaggggagttgtacgtctgtggtggcggcgcgttcaacggccaactgatgcagcgtcttgccgccctattgccaggttataccttgaataccacctcagctcttggcgtcgaccctaaatgggctgaaggcatcgccttcgcgtggctcgccatgcgtaaccacttaggcttacccgccaacctccctgcagtcacaggcgcctcccgcgaagctgtactcggcggaagatttagcgctaagtaa

SEQ ID NO: 29435 - protein, 369 aa, Shewanella baltica OS155
MKNAYYIGLMSGTSMDGVDAVLVDFSGAQPQLITSHTEAIPSHLLKGLQRLCSPSTDEINRLGRLDRNVGELFALAVNNLLTKCAIAKEDVIAIGSHGQTVRHMPNLEVGFTLQIGDPNTIATETGIDVIADFRRKDIALGGQGAPLVPAFHQQTFAEVGKKRIILNIGGIANITYLPGNSDQVLGFDTGPGNTLIDAWIQQVKSEPFDRDGAWAESGKTDQDLLTQLLSHPYFSLAYPKSTGRELFNQAWLEQQLSPFNHLDEEDIQSTLLDLTCHSIARDMIKLSNEGELYVCGGGAFNGQLMQRLAALLPGYTLNTTSALGVDPKWAEGIAFAWLAMRNHLGLPANLPAVTGASREAVLGGRFSAK

SEQ ID NO: 29436 - DNA, 1110 bp, Shewanella amazonensis SB2B
  CDS (1)..(1110): transl_table=11
atgagccaatctttgtttatcggactcatgtccggcaccagtatggacggtgtggacgctgtcctggtggatttcgacactccatcccccaaactcattgccacccacacagaagccattccggaacacctgttcaaagggctgcagcgtttatgtcagcccggacaggatgaagtaaatcggcttggacgactcgaccgcagcgttggcagtctctttgccaaagccgtcaacaacctgcttgccagcagtggcatagataagtcccaggtcgtggccattggcagccatggtcaaaccgttaggcacatgcccaacctcgaggtggggttcactgtgcaaatcggcgatcccaacaccattgccgccgaaacaggtatcgatgtcattgctgattttcgccgcaaagatattgcacttggcggccagggagcaccgctggtcccggcattccaccagcagatttttgctaaagcagataaacgccgggtgatcctcaacataggtggtatcgccaatatcacctggttgccgggcaatgcagaggctgtacttggatttgataccgggccgggcaacaccctgatagatggctggatacagcaggtaaaacaacaggctttcgatcgggacggcgcctttgccgccagtggtaaaaccgacaatacgctcttggcccagttgctgtcgcatccgtattttatgcagccataccccaagagcaccggtcgtgagcttttcaataacgcttggctggaacagcaactggaaaagtttggccacctcgacgaggccgatattcagtcaaccctgctggacttaacctgccacagtatcgcggcggatattctcaagctgtcaaacagtggcgagttgtttgtatgcggcggtggcgccctcaatattgagctgatgaaccgcctgcaggccctgttacccgggtttacactgactaccacttcggtgcttggagttgacccgaaatgggttgaggccatcgcctttgcctggcttgccctgcgccaccatcagggactgccggccaacctgcccgccgtgacaggggcaagacgcgaagccatactcggcgcccgcttcccggcggcttga

SEQ ID NO: 29437 - protein, 369 aa, Shewanella amazonensis SB2B
MSQSLFIGLMSGTSMDGVDAVLVDFDTPSPKLIATHTEAIPEHLFKGLQRLCQPGQDEVNRLGRLDRSVGSLFAKAVNNLLASSGIDKSQVVAIGSHGQTVRHMPNLEVGFTVQIGDPNTIAAETGIDVIADFRRKDIALGGQGAPLVPAFHQQIFAKADKRRVILNIGGIANITWLPGNAEAVLGFDTGPGNTLIDGWIQQVKQQAFDRDGAFAASGKTDNTLLAQLLSHPYFMQPYPKSTGRELFNNAWLEQQLEKFGHLDEADIQSTLLDLTCHSIAADILKLSNSGELFVCGGGALNIELMNRLQALLPGFTLTTTSVLGVDPKWVEAIAFAWLALRHHQGLPANLPAVTGARREAILGARFPAA

SEQ ID NO: 29438 - DNA, 1134 bp, Mesorhizobium sp. BNC1
  CDS (1)..(1134): transl_table=11
atggagcctgcctgggcgatcggcttgatgaccggaaccgtgcttgatgggaatatcgacatcgccatgatccgcaccgacggagaaaaggtggatgcgttcgggccatataagctggcgccttacccgcccgaattgccgatcctgcttggccgcgcgctcgaagaggccgccaaatggcgttttcagggtcaagagcccgccattttccgtgaagcagaagcggccctcacccaggcacaggctttggccgtttgcgactttctgcgcgagaacgggctttcgcctggcgatatcaaggcgattggctttcacgggcagacggtgcttcacatcgccccaaaagatggccggcgcggccacacgcgccagctcggcgatgggccgctgatggccaagatcgtcggcgcggatgtggtctatgacttccgcaccgcagatgttgaggcaggcggacaaggcgcgcccctggtgccgatctatcatcgagcgcttctcgacaggatcggcggcggctgcgagaccgcaatgctcaatctgggtggcgtcggcaatataagttggttcgacggcgatcaaatggtcgcgttcgacaccggtccggccaacgctccgatcaatgactgggtcaaacgccatggccggggtaatttcgacacggacgggcgcatcgcactttccggaaccgtggatgaagctcggctctcgcgcctgctcgaccacccgtatcttaatgcaccttatccaaagtcgctcgaccgcaactccttcaccgcggacatggcggagggtttaagtcttgagaacggcgcggcgacgctgacggccttcagcgcggccgcggtcgggcgggcgctcgaccttctgcctgaacgccccaaccggcttctggtgtgcggaggcgggcgcaagaacccggcgctgatggcgcagcttcgccgccgtgcgaatgtccaggccatggatgtggaccagtttggaatgcgaggggatgccatcgaagccgaatgcttcgcttttctcgcggtgcgaagcatacgcgggttgccgatcagctttccgcaaaccacaggcgtatcgaagccgatgagcggcggcaggctcgcgcccgcctcagccaggaatgcagcctga

SEQ ID NO: 29439 - protein, 377 aa, Mesorhizobium sp. BNC1
MEPAWAIGLMTGTVLDGNIDIAMIRTDGEKVDAFGPYKLAPYPPELPILLGRALEEAAKWRFQGQEPAIFREAEAALTQAQALAVCDFLRENGLSPGDIKAIGFHGQTVLHIAPKDGRRGHTRQLGDGPLMAKIVGADVVYDFRTADVEAGGQGAPLVPIYHRALLDRIGGGCETAMLNLGGVGNISWFDGDQMVAFDTGPANAPINDWVKRHGRGNFDTDGRIALSGTVDEARLSRLLDHPYLNAPYPKSLDRNSFTADMAEGLSLENGAATLTAFSAAAVGRALDLLPERPNRLLVCGGGRKNPALMAQLRRRANVQAMDVDQFGMRGDAIEAECFAFLAVRSIRGLPISFPQTTGVSKPMSGGRLAPASARNAA

SEQ ID NO: 29440 - DNA, 1101 bp, Nitrobacter hamburgensis X14
  CDS (1)..(1101): transl_table=11
atgatgacggcgatcggcctgatgagcggcacctctctggatggcgtcgatatcgccttgatcgaaaccgacggcaaccaggtggcggcgtttgggccgaccggctaccgcccttacacggaacacgaacgcggcctgctgcgcgaagccctcgcggaggccgtcaatctgccgcggcgcgacgcgcggccaggcgtgatcggcgaggccgagcgtgccgtgactctggctcacgccgaagccgtagcggcgttcaccgcgcaaaatcgcatcgtccgtgaggccatcgatatcgtcggcttccatggtcagaccgtgctgcatcggccggcgcagcggttgaccgtgcagatcggcgacgggacggctttggcaaaagcgatccgcgttccggtgatgcatgatttccgcgcggccgacgtggccgccggcgggcagggcgcgccatttgtccccgtctatcatcgcgcactggcgcaatcgctcggccgcgagggaccgatctgcgtggtcaatatcggcggcgtctccaacatcacctatatcgacggcgccgatacgctgatcgcttgcgacaccggacccggcaatgcgctgctcgatgatttcatggtccgcgtgatgggccagccgttcgaccgcgagggccggctggcggcgcagggccgtcccgacgcggactggatcgcgcacgccttgcaacacccgttcttcgcgctgccgccgcccaagtctctcgaccgcaacgatttcgcttcgttcgcaccgcacgacatggcgccggccgatggcgcggcaaccctgacggccttcaccgcggcggccattacgcggatcgttccgctgttgcccaaatcgccagcgaactggatcgtggctggcgggggagcccgcaacctgaccatgctcgggatgctgcgggagaggcttgctccggcgacggtcgagccggccgatgcgctgggctggtcggtcgatgccatggaggcgcaagccttcggctatctcgcggtgaggggcctgaaaggcttgcccttgagctatccggcgaccaccggcgtgccgatgccgatgaccggcggaatgatcgcgcgaccgtaa

SEQ ID NO: 29441 - protein, 366 aa, Nitrobacter hamburgensis X14
MMTAIGLMSGTSLDGVDIALIETDGNQVAAFGPTGYRPYTEHERGLLREALAEAVNLPRRDARPGVIGEAERAVTLAHAEAVAAFTAQNRIVREAIDIVGFHGQTVLHRPAQRLTVQIGDGTALAKAIRVPVMHDFRAADVAAGGQGAPFVPVYHRALAQSLGREGPICVVNIGGVSNITYIDGADTLIACDTGPGNALLDDFMVRVMGQPFDREGRLAAQGRPDADWIAHALQHPFFALPPPKSLDRNDFASFAPHDMAPADGAATLTAFTAAAITRIVPLLPKSPANWIVAGGGARNLTMLGMLRERLAPATVEPADALGWSVDAMEAQAFGYLAVRGLKGLPLSYPATTGVPMPMTGGMIARP

SEQ ID NO: 29442 - DNA, 1113 bp, Shewanella denitrificans OS-217
  CDS (1)..(1113): transl_table=11
atgagcaagcctgaatattttatcggcctaatgtctggcaccagcatggatggcgtagatgccgttttggtggatttctcccaagctaaacctcaattaatcgccggccacacccaagctattcctaagcatctacttaagggcctacaaagattatgtaaccctgccgccgatgagattaatcgtttaggccgcttagacagagccgtgggcagcttgtttgccgatgcggttaatgccttgcttgagaaaactaatatccctaagtcgcagatcattgccataggtagccacggtcagactgtgcgtcatatgcccaatttagaggtgggttttaccctgcaaattggcgatcccaataccatagccgttgagacaggcatagatgtcatcgccgattttcgtcgtaaagacattgccttaggtggtcaaggcgctcccttagtgcccgctttccaccagcaagtgtttgccgaaaaagatcaaatcagggtcattttaaacattggcggtatcgccaatgtgacttacctgcccggcaacagcgagcaagtgctagggtttgataccggccctggtaacaccttaattgatgcgtatattctacaaaacctagagcaagccttcgatgaagatggccaatgggcagactcaggaaacagcaatcaagccctgttaacccaaatgctatcccatccgtatttttcgctgcactaccctaaaagtaccggccgggagttgtttaaccaagcttggctcgagcagcaactggctaactttagccacttagatgccgaagatatccaatccaccttgctggacttaacctgtcacagcatagccaatgacatcaataaactcgcccctaaaggtcagttattcgtctgcggtggtggggccttaaatggcgcgttaatgaagcgcttaactcagcttgtacctgggtatcagctgcaaaccacttcggccttaggtgtagatgccaaatgggtagaaggcatagcgtttgcgtggcttgccatgcgccatcatcataatttacccgccaacttacccgcggtgacgggtgcatcaaaatctgctgtacttggtgggcgctacagcgctaaataa

SEQ ID NO: 29443 - protein, 370 aa, Shewanella denitrificans OS-217
MSKPEYFIGLMSGTSMDGVDAVLVDFSQAKPQLIAGHTQAIPKHLLKGLQRLCNPAADEINRLGRLDRAVGSLFADAVNALLEKTNIPKSQIIAIGSHGQTVRHMPNLEVGFTLQIGDPNTIAVETGIDVIADFRRKDIALGGQGAPLVPAFHQQVFAEKDQIRVILNIGGIANVTYLPGNSEQVLGFDTGPGNTLIDAYILQNLEQAFDEDGQWADSGNSNQALLTQMLSHPYFSLHYPKSTGRELFNQAWLEQQLANFSHLDAEDIQSTLLDLTCHSIANDINKLAPKGQLFVCGGGALNGALMKRLTQLVPGYQLQTTSALGVDAKWVEGIAFAWLAMRHHHNLPANLPAVTGASKSAVLGGRYSAK

SEQ ID NO: 29444 - DNA, 1107 bp, Thiomicrospira denitrificans ATCC 33889
  CDS (1)..(1107): transl_table=11
gtgagtgagttttatataggtgttatgtctgggactagtcttgatggaatcgatttagctctttgtgagatagaagatgatgcttttgagcttcttttatgcgcttcttacccttttgatgcagagttaaagagcgatattttaaatgctataaatgcgcaaacaacgcttaaaaacattggcgaaatagatattcgtttaggcaaaatgtatgctgatgcgttagagaaatttattgaagaaaatagccttaagagagttaaaataagagctatcggtctgcatgggcaaacactttggcatgagccagagagccaaaatcctttctccatgcagttaggaaatgccaacatactaacagctaggcttggcatctgcgtagtgagtgattttaggcaaaaagatatagctcttggaggtcaaggggcaccatttactcccgcttttcatgaatttttattctctaaattaagtgggaatgtagctgttttaaatattggtggaatggcgaacattacgcttcttagagagatgcttagcggttatgatactggatgcggaaatgtacttatggattactggatttctaaatataacggctccccatacgacaaagatggagagtgggcaaaatcaggaactccaaacagagaactcttaagagagtttttaaaggagccttactttttaaagagtcccccaaagagtactgggcgtgagctttttggcgaaaaatggctgaaaaaacagttgagtgaatttgctaaaaaaaatcaaaactgctcatacttaaaagcaagagatattcaagctacactccttgagttgagtgttcaaagtattgcaaatgagataaaaaaaagtgatacaactctgctaatagtctgcggtggaggtataaacaaccgctatcttatggaacgcttgcaagaggagctaggagatataaagatagcttcaagtgacgaatatggcgtaagtagcgaatttatggaggctatggcatttgcttggctcgcacatgagagaatccataaaaaatgtgttaaaatttcatctgttagcggagcgttaagagactcaattttaggtgctatttatgaataa

SEQ ID NO: 29445 - protein, 368 aa, Thiomicrospira denitrificans ATCC 33889
MSEFYIGVMSGTSLDGIDLALCEIEDDAFELLLCASYPFDAELKSDILNAINAQTTLKNIGEIDIRLGKMYADALEKFIEENSLKRVKIRAIGLHGQTLWHEPESQNPFSMQLGNANILTARLGICVVSDFRQKDIALGGQGAPFTPAFHEFLFSKLSGNVAVLNIGGMANITLLREMLSGYDTGCGNVLMDYWISKYNGSPYDKDGEWAKSGTPNRELLREFLKEPYFLKSPPKSTGRELFGEKWLKKQLSEFAKKNQNCSYLKARDIQATLLELSVQSIANEIKKSDTTLLIVCGGGINNRYLMERLQEELGDIKIASSDEYGVSSEFMEAMAFAWLAHERIHKKCVKISSVSGALRDSILGAIYE

SEQ ID NO: 29446 - DNA, 1146 bp, Xylella fastidiosa Dixon
  CDS (1)..(1146): transl_table=11
atgcctgtgcatgatgatcactgcaatccaaatccagctcctctctacctcggtctcatgtccggcaccagcatcgacggcatcgacgcagcgttggtacggattaacgcaaacccgataacacattgtgagctgattgccgcgcaaacctccgcttgggaccctaacctacgcacgacattgttggaactaagtcaaggtcagaacacagcatcccttgaccaactaggctggctcgacgcccaagtcggactggccttcgccacagccgctaatacactgatcgcaaaaacgggcataaagcacacacagatacgtgcgattggctgtcatggccagaccatacgccatcgcccacacggcgatctacccttcacttggcaattaggcgatgcccaccggatcgccgaactcactggaatcactaccgtcgcagacttccgccgccgtgacgtggctgccggcggccaaggcgcaccactcatgcccgctttccatctagcgatccttggatccgccaatgaaaaccgagcagtgctgaacttaggcgggattgcaaacttgacactgatcccgatgaccggcccagtactcggcttcgacaccggaccagcgaacgcactgctcgacagctggtatcaacgccatcatcacgagacattcgatcaaagcggtaacttcgccgcaagcggcaaaatcaaccagaagttactggcctgcctgctagacgacccttggttcaccctcccacctcccaaaagcacagggcgcgaacaattccatttggactggatgaccaaacaactagaacctacaccaccatcaccagccgatgtgcaggcaacactgctcgaactgaccgcagtcaccgtagcagatgccctactacgccaacaacccaagacgactcggctactgatatgcggtggcggtgcgcataacccagtattgatggcacgcctggccgcacacctacccaacgtaacagtggaatcgattcaaacctatggactcaatccggactatctggaagcaatggggtttgcttggctggccgcacaaacactggacggccaaccaagtaacctgccaagcgtcactggcgcacgcggcctgcgtttgctcggcgcaatccacccagcctga

SEQ ID NO: 29447 - protein, 381 aa, Xylella fastidiosa Dixon
MPVHDDHCNPNPAPLYLGLMSGTSIDGIDAALVRINANPITHCELIAAQTSAWDPNLRTTLLELSQGQNTASLDQLGWLDAQVGLAFATAANTLIAKTGIKHTQIRAIGCHGQTIRHRPHGDLPFTWQLGDAHRIAELTGITTVADFRRRDVAAGGQGAPLMPAFHLAILGSANENRAVLNLGGIANLTLIPMTGPVLGFDTGPANALLDSWYQRHHHETFDQSGNFAASGKINQKLLACLLDDPWFTLPPPKSTGREQFHLDWMTKQLEPTPPSPADVQATLLELTAVTVADALLRQQPKTTRLLICGGGAHNPVLMARLAAHLPNVTVESIQTYGLNPDYLEAMGFAWLAAQTLDGQPSNLPSVTGARGLRLLGAIHPA

SEQ ID NO: 29448 - DNA, 1374 bp, Psychrobacter cryohalolentis K5
  CDS (1)..(1374): transl_table=11
atgaccaaccctgcatcgattgctgatagtcagcataataatttttcaaatctgagtttagatgatgattttgatagccgtctagataatatggacgatttaaactatgccaccttgaccgatgcgctcgaacaaacggtgtttgaaaacttcgatgatggcttatatataggtatgatgtcgggcactagcttagatggtatggacgcggtcctttgtcaattcagtgagaaagataatacccaacaaccgatgcacgtgttagcgactcatagccaagatttcccaccgcgtctgcgtgaagtgctactagcattgtgtcagcctaatgggattcaagcattaacgccatccgatgatgaaccaaatagcgaattagactggtttggctgggcaagtaaagaatatgcagaattttcaagcgacgtggttaatacgttattgcagcaatcaaatactgatagtgaatctgtactagcgattggctgtcatggtcaaacggtacgccatcgtccgcagatgggttttagcttgcaattggtcgatgccaatatcattgctgaacgtacgggcattagcgtcgtcagtgatttccgtcgccgtgatatggcagttggtggtcaaggtgcgcctttggttccagcttttcatcaagcattgtttgcggtgcctgatagcacgcgtgtgttattaaacttgggcggtattgctaatatcgctgtcttgccagcgatttctaatgaccttgtagattctaatgaacactcagaaaatcagccatctgatagcgtggttggttatgataccggacctgccaatctattattggatgcgtggacaacattgcacacggacaaggattatgatgcgggcggtacatgggcacagtcaggtcaagtcgttgagcctttactgaatcagctattagagcatccattttttaagaaaacctatccaaaaagtacggggcgtgaagattttaacttagcatggctacaagatgagttacaaaaattcgaccaagcttctgctgatgttcgctactcatccgccgacgtacaagcaacgctcactgagctgaccgccatcagtgccagtgcgcaaatcaatttatttatcaatgctagtagcagtaatgctgtttatgtctgcggcggcggggcgttaaataattatttaatgactcgcttacaagtacacctgcaacgatgcaaagtagaaacgacagccagcttgggacttgaaccaacttgggtcgaagccgttgcctttgcttggttagcaagacaaacacttatgggtgaaaccggtaacttgcctgccgtgacaggcgcaagtaaaggcgtggtattgggacaagtatgttttgcctga

SEQ ID NO: 29449 - protein, 457 aa, Psychrobacter cryohalolentis K5
MTNPASIADSQHNNFSNLSLDDDFDSRLDNMDDLNYATLTDALEQTVFENFDDGLYIGMMSGTSLDGMDAVLCQFSEKDNTQQPMHVLATHSQDFPPRLREVLLALCQPNGIQALTPSDDEPNSELDWFGWASKEYAEFSSDVVNTLLQQSNTDSESVLAIGCHGQTVRHRPQMGFSLQLVDANIIAERTGISVVSDFRRRDMAVGGQGAPLVPAFHQALFAVPDSTRVLLNLGGIANIAVLPAISNDLVDSNEHSENQPSDSVVGYDTGPANLLLDAWTTLHTDKDYDAGGTWAQSGQVVEPLLNQLLEHPFFKKTYPKSTGREDFNLAWLQDELQKFDQASADVRYSSADVQATLTELTAISASAQINLFINASSSNAVYVCGGGALNNYLMTRLQVHLQRCKVETTASLGLEPTWVEAVAFAWLARQTLMGETGNLPAVTGASKGVVLGQVCFA

SEQ ID NO: 29450 - DNA, 1101 bp, Nitrobacter winogradskyi Nb
  CDS (1)..(1101): transl_table=11
atgatgacggcgatcggcatgatgagcggtacctcgcttgacggcgttgatgtcgccctgatcgaaaccgacggcgagcgcgtgacggcgttcgggccgacaggctatcgcccttacacgaacgacgaacgcggcctgttgcgggaggcgctggcggaggcggtcaatctgacgcgacgtgacgcacggccgggcgtgatcggcatggccgaacacgccgtgaccatggcgcactctgacgccgtcacgtccttcctcgcgcggaacggcatcaggcgcgaggatatcgatatcgtcggttttcacggccagacggttctgcatcggccgggggagcggctgaccgtgcagatcggcgatgcggacgcgctggcgaaagcgatccgcgtgccggtgatgcatgatttccgcgcggccgacgtcgccgccggcgggcagggcgcgccattcgtccccgcctatcatcgcgcgctggcgcagtcgctcggccgcgacggtccgatttgcgtggtcaatatcggcggcgtctccaatgtcacctatatcgacggcgcggacactttgatcgcctgcgacaccggacccggtaatgcgctgctcgacgatttcatgcttcgcacgacgggtgaaccgttcgaccgcgatggcaggctggcgcagcagggccgccccgacgcggactggatcgcgagcgccctgaatcacccctttttcgcgctgccaccacccaaatcgctcgaccgcaacgattttgcctctctcgccctgcccgataggccgccagccgatggcgccgccaccctgacggcgtttaccgcggcggccatcgcgcggatcgttccgctgctgccgaaggcgccggaaagatggatcgtcgcaggcggcggagcccgcaacccgatcatgctcgagatgctacgggagaaggttgcccctgcgcctgtcgagcgggcggacgcgctcggctggtcgattgacgcgatggaggcgcaggccttcggctatctcgcggcgcgtggcctgaaaggcttgcccttgagctaccccgcgaccaccggagtgccggtgccgatgaccggcggtgtggtcacgcggccctga

SEQ ID NO: 29451 - protein, 366 aa, Nitrobacter winogradskyi Nb
MMTAIGMMSGTSLDGVDVALIETDGERVTAFGPTGYRPYTNDERGLLREALAEAVNLTRRDARPGVIGMAEHAVTMAHSDAVTSFLARNGIRREDIDIVGFHGQTVLHRPGERLTVQIGDADALAKAIRVPVMHDFRAADVAAGGQGAPFVPAYHRALAQSLGRDGPICVVNIGGVSNVTYIDGADTLIACDTGPGNALLDDFMLRTTGEPFDRDGRLAQQGRPDADWIASALNHPFFALPPPKSLDRNDFASLALPDRPPADGAATLTAFTAAAIARIVPLLPKAPERWIVAGGGARNPIMLEMLREKVAPAPVERADALGWSIDAMEAQAFGYLAARGLKGLPLSYPATTGVPVPMTGGVVTRP

SEQ ID NO: 29452 - DNA, 1134 bp, Zymomonas mobilis
  CDS (1)..(1134): transl_table=11
atgggttttcagcttgtgaagaaaagatcaaagggctggaaaatagaaatcgggggaaattggatgctggcaatcggacttatgtccggcacgtctttagatggtgttgatgtcgccttgattgaaaccaatggcgaaaaacaagtaaagcctttgaattttgcttcctatccttattcggatacggataaagcctgcctgcgcgaagctgtcgtcgcgcttttgacgatggcggcaccttgtttcatccccgaagatgaagtgatttatcaggccgaacatattgtaacgctccgtcatattcaggcagtcaaagatttcttgaaaaagaatgcgttaggtaatcaggctatcaaagtcatcggcttccatggtcaaacaattgctcataggccggatttgggctggacatggcaaatcggtgatggcgccgctttggcacaggcgaccaaaatcagcgtagtcgatgatttccgttctcatgatgtccaagcaggcggcgagggcgctcctttgctccccatctatcattgggcattatttagcgaagctctcaccctttggcggtgcttaatcttggcgggattgcgaatattacttggatttggggcggatgaaaacgacctcattgcttgcgatacaggccccgctaacggaatgattgatgattgggtcaaggccaaaactggcctcgattatgatgaatccggtcttattgcgagcaaaggcgttgtccatcacgatctggtcgatgcgatgatgagccagaaattcttttcgcaattaccaccgaaatcgttggatagaagcgatttttcaatcgaggcggtcgccaatctctcgatcgaggatggtgctgcaacgctgaccgcttttaccgctgaatcggttgcccgatcgctgtctttctttcctgaaagaccttcaaagattattgtggccggtggtggtcgtcataatgtgacgatgatgaaaatgctgcatgacagtttgaaaatgcctgtccagccaattgaagatttccatttaaatggtgatgcgaccgaggccgaaggtttgcctatctcgcggtcagacgggtatttaacaagcctatcagcttccctaaaacaacaggggtgccgcatcctatga

SEQ ID NO: 29453 - protein, 377 aa, Zymomonas mobilis
MGFQLVKKRSKGWKIEIGGNWMLAIGLMSGTSLDGVDVALIETNGEKQVKPLNFASYPYSDTDKACLREAVVALLTMAAPCFIPEDEVIYQAEHIVTLRHIQAVKDFLKKNALGNQAIKVIGFHGQTIAHRPDLGWTWQIGDGAALAQATKISVVDDFRSHDVQAGGEGAPLLPIYHWALFSEALTLWRCLILAGLRILLGFGADENDLIACDTGPANGMIDDWVKAKTGLDYDESGLIASKGVVHHDLVDAMMSQKFFSQLPPKSLDRSDFSIEAVANLSIEDGAATLTAFTAESVARSLSFFPERPSKIIVAGGGRHNVTMMKMLHDSLKMPVQPIEDFHLNGDATEAEGLPISRSDGYLTSLSASLKQQGCRIL

SEQ ID NO: 29454 - DNA, 1095 bp, Gamma
  CDS (1)..(1095)
atgagtaaaaagatctatattggagcaatgacaggaactagtcatgacgctattgatatttcatttcttagcattggtacaaaaatacatcttgagtatttccattcaattaaattcccaaaatccctaagattaaaagtaaaaaaacttattgaaaataacgaaagctcgttgtcagatttaggcactatcaataaagagataggattcttattttcaaaatctattaatgaggcgattggatttagtaaaattaagaaatcatctatagagtgtgttgctatttctggacaaaccattaggcatgaaattaataagagatttccattttctatgcaaattggtgatccaaatattgttgcaaaagaaacgggccttctggtggtaagtgattttagaaatatgcatattgctctgggtggcgaaggcgcccctcttgttccggaattccataatcaattattttataaagctagaaacccacgaattattttaaatataggggggatttcaaattactcatttgtaaaaaatagaaatgacatatggggaactgatgtaggccctggtaatgcaattttagatgcatattgtagtgattttcttcagattccttttgataaaaatggtgcaattgcagccaaaggaaaagtagatcacattgagttaggaagattgcttcaaaataatttttttaaaagaaaatgtccaaaatcaacaggcaaagagctctttaatataaaaatattatccaagaaattcttaaaaaagaaagctgaagatattctatgtaccctggttgaattttcagcaaaatctataataaattcaatccataaaaatggtcataataattgtgacattgtcatttgtggcggtggtgcccataacaagtatctggtaaaaagaatttctgagatggctagtaatgatatcgtcctctcaagtgatttaggccatgatgtttttgctattgagtccatggcatttgcctggatgggatataaaagagtcagtaatgaggctctgatagttcagacatcaagcaagaatgtaaaaggacttttgggttcaattacaaaatctaaactgtaa

SEQ ID NO: 29455 - protein, 364 aa, Gamma
MSKKIYIGAMTGTSHDAIDISFLSIGTKIHLEYFHSIKFPKSLRLKVKKLIENNESSLSDLGTINKEIGFLFSKSINEAIGFSKIKKSSIECVAISGQTIRHEINKRFPFSMQIGDPNIVAKETGLLVVSDFRNMHIALGGEGAPLVPEFHNQLFYKARNPRIILNIGGISNYSFVKNRNDIWGTDVGPGNAILDAYCSDFLQIPFDKNGAIAAKGKVDHIELGRLLQNNFFKRKCPKSTGKELFNIKILSKKFLKKKAEDILCTLVEFSAKSIINSIHKNGHNNCDIVICGGGAHNKYLVKRISEMASNDIVLSSDLGHDVFAIESMAFAWMGYKRVSNEALIVQTSSKNVKGLLGSITKSKL

SEQ ID NO: 29456 - DNA, 1131 bp, Synechocystis sp
  CDS (1)..(1131): transl_table=11
gtggatggcattgatgcctgtttagtcgacattagtgggtctggattagacctcaaggttgatttgttgcggggggaaacctacccttaccccgatgcattgcgccaggagattttagctttgtgtgcaggaactcccgttagtccggaggcgatcgcctttttggatgacagtattgccaaggaatttgcccaggcggcccagcaaattcaacaatctttgcccccagcggatctcattggttcccatggccaaactattttccaccgtccccccaatccagagaaagccttttccctcggttacagttggcagttgggccggggagaggcgatcgccaatttgacaggcattaccacggtgagtaattttcgggcggcggacattgccgcagggggccagggagcaccattagtttctaaaatcgatgtctgcctgttgagccatcaaaatgaacaccgctgtgtgcagaatttaggtggcattggtaatgtgacctatctccctccccgcagtcagacaaattggcaggaaaaaatttgtggctgggatacggggcccgccaacgtcctagttgacctggcagtgcaaaaatttacccagggagaaaaaacctatgatcaggggggacaatgggcggcccagggtaagccccgccaagaactggtagaccaatggttacaagaaccctttttcgagcaatatccgcctaaatccaccgggcgggaattgtttggggcgttgtacctcgataactgttggatagaagcccagcgccatggcttgaatgaaaccgattttttgaccactctgacagaatttacggcccgctctgtagtgactgaataccaaagatttttaccccaactgcccgatcgcctgttactgtgtggcggtggtgcccataacctctatctgagggagcggctccaatatcacttaggctccaacacaaaaattcagcgcaccgacgatgttggtctgaacagcgatttcaaagaggcgatcgcctttgcggtgctggcctattggcgtttccaggagcaatttccaggtaatgtccccctagtcaccggtgctagtcaagattgtctgttgggggatattcaccttgtcccagttggtagttaa

SEQ ID NO: 29457 - protein, 376 aa, Synechocystis sp
MDGIDACLVDISGSGLDLKVDLLRGETYPYPDALRQEILALCAGTPVSPEAIAFLDDSIAKEFAQAAQQIQQSLPPADLIGSHGQTIFHRPPNPEKAFSLGYSWQLGRGEAIANLTGITTVSNFRAADIAAGGQGAPLVSKIDVCLLSHQNEHRCVQNLGGIGNVTYLPPRSQTNWQEKICGWDTGPANVLVDLAVQKFTQGEKTYDQGGQWAAQGKPRQELVDQWLQEPFFEQYPPKSTGRELFGALYLDNCWIEAQRHGLNETDFLTTLTEFTARSVVTEYQRFLPQLPDRLLLCGGGAHNLYLRERLQYHLGSNTKIQRTDDVGLNSDFKEAIAFAVLAYWRFQEQFPGNVPLVTGASQDCLLGDIHLVPVGS

SEQ ID NO: 29458 - DNA, 1149 bp, Haemophilus influenzae
  CDS (1)..(1149): transl_table=11
atgattaatatgaaacctcaatattatcttggtatgatgtcgggtactagcttagatggcgtggatattgtgttggttgatttttctcaagatcctcaacttatcctatctgatttttttcctatgccagaagatttgcgtgagaaattaaccacacttattcaagtaggtgaaacaactctacaaaatttaggcgaactggatcataaacttgccttgctatacagtgattgtgtcaatgcttttctgcagaaaaatacttttttgccaaatcaaattcaggctattggttgccacgggcaaacggtatggcattctccaaattcacaatttccctttacaatgcaattaggcgatatgaatttacttgccgctaaaacaggcatttcggttattggggattttcgccgtaaggatatggcttggggtggacaaggtgcgcctcttgtgcctgcgtttcacgaggcggtattttcaaattctaattttgctacagctgttttaaatattggcgggattagtaatgtgtctattttgtttccaaatcaagctgtcatcggctttgatacaggtccaggtaatacattattagatcaatggatcgaaaaacatcaagggcttcgttatgatgaaaatggcgagtgggcagcaaaaggcaacgtgaataaagttctgcttgatgaattactcaatgaacctttcttttctttacctgcacccaagagtactgggagagaattatttaaccttgtttggttaaatcacaaaatagcaaaaataagggaaaaattgaccgcactttcagttgaaatgtcttttcgcccagaggatgtgcaagcgacgcttgttgaattgacggtaacaagcattgttaatgcactaaatcagctccaaacagatttaccaaaacgtttactagtatgtggcggtggtgccaagaatagcttaattatgcgtggattgcatgataatttactcgattggcaggtcagcacaacgacagagcaaggttttgatattgattatgtcgaagccgctgcttttgcttggttagcttattgtcgaatcaacaatttacctgcaaatctaccaagtgtaactggggcaaaaagtgcggttagtttgggggctatttttcctaaagactaa

SEQ ID NO: 29459 - protein, 382 aa, Haemophilus influenzae
MINMKPQYYLGMMSGTSLDGVDIVLVDFSQDPQLILSDFFPMPEDLREKLTTLIQVGETTLQNLGELDHKLALLYSDCVNAFLQKNTFLPNQIQAIGCHGQTVWHSPNSQFPFTMQLGDMNLLAAKTGISVIGDFRRKDMAWGGQGAPLVPAFHEAVFSNSNFATAVLNIGGISNVSILFPNQAVIGFDTGPGNTLLDQWIEKHQGLRYDENGEWAAKGNVNKVLLDELLNEPFFSLPAPKSTGRELFNLVWLNHKIAKIREKLTALSVEMSFRPEDVQATLVELTVTSIVNALNQLQTDLPKRLLVCGGGAKNSLIMRGLHDNLLDWQVSTTTEQGFDIDYVEAAAFAWLAYCRINNLPANLPSVTGAKSAVSLGAIFPKD

SEQ ID NO: 29460 - DNA, 23 bp, Artificial sequence
  Primer sequence
atgaaatcgggccgctttattgg

SEQ ID NO: 29461 - DNA, 24 bp, Artificial sequence
  Primer sequence
ttacgggttagcggggaaaatagc

SEQ ID NO: 29462 - protein, 468 aa, Artificial sequence
  Consensus
  Variant (12)..(12): Xaa in position 12 is any or no amino acid
  Variant (15)..(16): Xaa in position 15 to 16 is any amino acid
  Variant (19)..(34): Xaa in position 19 to 34 is any amino acid
  Variant (35)..(54): Xaa in position 35 to 54 is any or no amino acid
  Variant (57)..(58): Xaa in position 57 to 58 is any amino acid
  Variant (60)..(77): Xaa in position 60 to 77 is any amino acid
  Variant (78)..(91): Xaa in position 78 to 91 is any or no amino acid
  Variant (93)..(96): Xaa in position 93 to 96 is any amino acid
  Variant (98)..(103): Xaa in position 98 to 103 is any amino acid
  Variant (105)..(108): Xaa in position 105 to 108 is any amino acid
  Variant (109)..(114): Xaa in position 109 to 114 is any or no amino acid
  Variant (116)..(117): Xaa in position 116 to 117 is any amino acid
  Variant (120)..(120): Xaa in position 120 is any amino acid
  Variant (126)..(126): Xaa in position 126 is any amino acid
  Variant (128)..(128): Xaa in position 128 is any amino acid
  Variant (130)..(133): Xaa in position 130 to 133 is any amino acid
  Variant (134)..(150): Xaa in position 134 to 150 is any or no amino acid
  Variant (152)..(152): Xaa in position 152 is any amino acid
  Variant (156)..(159): Xaa in position 156 to 159 is any amino acid
  Variant (162)..(163): Xaa in position 162 to 163 is any amino acid
  Variant (165)..(165): Xaa in position 165 is any amino acid
  Variant (167)..(168): Xaa in position 167 to 168 is any amino acid
  Variant (170)..(170): Xaa in position 170 is any amino acid
  Variant (174)..(175): Xaa in position 174 to 175 is any amino acid
  Variant (179)..(179): Xaa in position 179 is any amino acid
  Variant (189)..(193): Xaa in position 189 to 193 is any amino acid
  Variant (195)..(202): Xaa in position 195 to 202 is any amino acid
  Variant (203)..(209): Xaa in position 203 to 209 is any or no amino acid
  Variant (221)..(221): Xaa in position 221 is any amino acid
  Variant (223)..(225): Xaa in position 223 to 225 is any amino acid
  Variant (226)..(243): Xaa in position 226 to 243 is any or no amino acid
  Variant (245)..(245): Xaa in position 245 is any or no amino acid
  Variant (249)..(249): Xaa in position 249 is any amino acid
  Variant (254)..(254): Xaa in position 254 is any amino acid
  Variant (258)..(267): Xaa in position 258 to 267 is any amino acid
  Variant (268)..(270): Xaa in position 268 to 270 is any or no amino acid
  Variant (273)..(274): Xaa in position 273 to 274 is any amino acid
  Variant (276)..(277): Xaa in position 276 to 277 is any amino acid
  Variant (279)..(280): Xaa in position 279 to 280 is any amino acid
  Variant (282)..(282): Xaa in position 282 is any amino acid
  Variant (284)..(286): Xaa in position 284 to 286 is any amino acid
  Variant (289)..(291): Xaa in position 289 to 291 is any amino acid
  Variant (293)..(295): Xaa in position 293 to 295 is any amino acid
  Variant (296)..(297): Xaa in position 296 to 297 is any or no amino acid
  Variant (300)..(303): Xaa in position 300 to 303 is any amino acid
  Variant (311)..(311): Xaa in position 311 is any amino acid
  Variant (313)..(316): Xaa in position 313 to 316 is any amino acid
  Variant (318)..(327): Xaa in position 318 to 327 is any amino acid
  Variant (328)..(345): Xaa in position 328 to 345 is any or no amino acid
  Variant (348)..(350): Xaa in position 348 to 350 is any amino acid
  Variant (353)..(354): Xaa in position 353 to 354 is any amino acid
  Variant (356)..(366): Xaa in position 356 to 366 is any amino acid
  Variant (367)..(375): Xaa in position 367 to 375 is any or no amino acid
  Variant (377)..(377): Xaa in position 377 is any or no amino acid
  Variant (379)..(379): Xaa in position 379 is any or no amino acid
  Variant (383)..(384): Xaa in position 383 to 384 is any amino acid
  Variant (386)..(387): Xaa in position 386 to 387 is any amino acid
  Variant (390)..(391): Xaa in position 390 to 391 is any amino acid
  Variant (393)..(395): Xaa in position 393 to 395 is any amino acid
  Variant (397)..(398): Xaa in position 397 to 398 is any amino acid
  Variant (399)..(418): Xaa in position 399 to 418 is any or no amino acid
  Variant (420)..(425): Xaa in position 420 to 425 is any amino acid
  Variant (428)..(432): Xaa in position 428 to 432 is any amino acid
  Variant (435)..(435): Xaa in position 435 is any amino acid
  Variant (439)..(439): Xaa in position 439 is any amino acid
  Variant (442)..(451): Xaa in position 442 to 451 is any amino acid
  Variant (452)..(453): Xaa in position 452 to 453 is any or no amino acid
  Variant (455)..(456): Xaa in position 455 to 456 is any amino acid
  Variant (460)..(464): Xaa in position 460 to 464 is any amino acid
  Variant (467)..(467): Xaa in position 467 is any amino acid
IGLMSGTSLDGXVDXXLVXXXXXXXXXXXXXXXXXXXXXXXXXXXXXXXXXXXXLRXXLXXXXXXXXXXXXXXXXXXXXXXXXXXXXXXXXLXXXXAXXXXXXLXXXXXXXXXXIXXIGXHGQTVXHXPXXXXXXXXXXXXXXXXXXXXXTXQIGXXXXIAXXTXIXXVXDFRXXDMAXGGQGAPLVPXXXXXLXXXXXXXXXXXXXXXVLNIGGIANITXLXXXXXXXXXXXXXXXXXXXXXVXGFDXGPGNXLLDXXXXXXXXXXXXXYDXXGXXAXXGXVXXXLLXXXLXXXXXYFXXXXPKSTGREXFXXXXLXXXXXXXXXXXXXXXXXXXXXXXXXXXXTLXXXTAXXIXXXXXXXXXXXXXXXXXXXXLXVXGGGXXNXXLMXXLXXXLXXXXXXXXXXXXXXXXXXXXXXVXXXXXXGLXXXXXEAXAFAXLAXXXXXXXXXXXXPXXTGAXXXXXLGXI

SEQ ID NO: 29463 - protein, 15 aa, Artificial sequence
  Consensus
  Variant (2)..(2): Xaa in position 2 is Ile, Leu, Met or Val
  Variant (3)..(3): Xaa in position 3 is Ile or Met
  Variant (8)..(8): Xaa in position 8 is any amino acid
  Variant (11)..(11): Xaa in position 11 is any amino acid
  Variant (13)..(14): Xaa in position 13 to 14 is any amino acid
  Variant (15)..(15): Xaa in position 15 is Ala, Ile, Leu or Val
GXXSGTSXDGXDXXX

SEQ ID NO: 29464 - protein, 11 aa, Artificial sequence
  Consensus
  Variant (2)..(2): Xaa in position 2 is any amino acid
  Variant (7)..(7): Xaa in position 7 is Ile, Leu or Val
  Variant (8)..(8): Xaa in position 8 is any amino acid
  Variant (10)..(10): Xaa in position 10 is any amino acid
GXHGQTXXHXP

SEQ ID NO: 29465 - protein, 36 aa, Artificial sequence
  Consensus
  Variant (2)..(2): Xaa in position 2 is Ile or Leu
  Variant (3)..(7): Xaa in position 3 to 7 is any amino acid
  Variant (8)..(8): Xaa in position 8 is Ile, Leu, Met or Val
  Variant (9)..(15): Xaa in position 9 to 15 is any amino acid
  Variant (16)..(16): Xaa in position 16 is Thr or Val
  Variant (17)..(17): Xaa in position 17 is Ala, Ile or Val
  Variant (18)..(18): Xaa in position 18 is any amino acid
  Variant (19)..(19): Xaa in position 19 is Asp or Asn
  Variant (22)..(23): Xaa in position 22 to 23 is any amino acid
  Variant (25)..(25): Xaa in position 25 is Ile, Leu, Met or Val
  Variant (26)..(27): Xaa in position 26 to 27 is any amino acid
  Variant (30)..(30): Xaa in position 30 is any amino acid
  Variant (35)..(35): Xaa in position 35 is any amino acid
  Variant (36)..(36): Xaa in position 36 is Ala, Pro, Ser or Thr
QXXXXXXXXXXXXXXXXXXFRXXDXXXGGXGAPLXX

SEQ ID NO: 29466 - protein, 11 aa, Artificial sequence
  Consensus
  Variant (2)..(2): Xaa in position 2 is Ile, Leu or Val
  Variant (6)..(6): Xaa in position 6 is Ala, Gly or Ser
  Variant (8)..(8): Xaa in position 8 is any amino acid
  Variant (9)..(9): Xaa in position 9 is Ala, Cys, Ser or Thr
  Variant (10)..(10): Xaa in position 10 is any amino acid
  Variant (11)..(11): Xaa in position 11 is Ile, Leu, Pro or Val
NXGGIXNXXXX

SEQ ID NO: 29467 - protein, 10 aa, Artificial sequence
  Consensus
  Variant (2)..(2): Xaa in position 2 is Cys or Thr
  Variant (5)..(5): Xaa in position 5 is Ala or Gly
  Variant (7)..(7): Xaa in position 7 is any amino acid
  Variant (8)..(8): Xaa in position 8 is Phe, Ile, Leu, Met or Val
  Variant (9)..(9): Xaa in position 9 is Ile, Leu, Met or Val
DXGPXNXXXD

SEQ ID NO: 29468 - protein, 39 aa, Artificial sequence
  Consensus
  Variant (2)..(2): Xaa in position 2 is any amino acid
  Variant (3)..(3): Xaa in position 3 is Asp, Glu, Gly, Asn, Gln or Ser
  Variant (4)..(4): Xaa in position 4 is Ala or Gly
  Variant (5)..(6): Xaa in position 5 to 6 is any amino acid
  Variant (7)..(7): Xaa in position 7 is Ala, Gly or Ser
  Variant (8)..(9): Xaa in position 8 to 9 is any amino acid
  Variant (11)..(16): Xaa in position 11 to 16 is any amino acid
  Variant (17)..(17): Xaa in position 17 is Ile, Leu or Val
  Variant (18)..(24): Xaa in position 18 to 24 is any amino acid
  Variant (25)..(25): Xaa in position 25 is Phe, Trp or Tyr
  Variant (26)..(26): Xaa in position 26 is Phe, Ile or Leu
  Variant (27)..(30): Xaa in position 27 to 30 is any amino acid
  Variant (34)..(34): Xaa in position 34 is any amino acid
  Variant (35)..(35): Xaa in position 35 is Asp or Gly
  Variant (37)..(38): Xaa in position 37 to 38 is any amino acid
DXXXXXXXXGXXXXXXXXXXXXXXXXXXXXPKSXXRXXF

SEQ ID NO: 29469 - protein, 10 aa, Artificial sequence
  Consensus
  Variant (4)..(5): Xaa in position 4 to 5 is any amino acid
  Variant (7)..(7): Xaa in position 7 is any amino acid
  Variant (8)..(8): Xaa in position 8 is any or no amino acid
  Variant (10)..(10): Xaa in position 10 is Ile, Leu, Met or Val
GGGXXNXXLX

SEQ ID NO: 29470 - protein, 35 aa, Artificial sequence
  Consensus
  Variant (2)..(2): Xaa in position 2 is Ala, Gly or Ser
  Variant (3)..(4): Xaa in position 3 to 4 is any amino acid
  Variant (5)..(5): Xaa in position 5 is Phe, Ile or Met
  Variant (6)..(6): Xaa in position 6 is Ala or Gly
  Variant (7)..(7): Xaa in position 7 is any amino acid
  Variant (8)..(8): Xaa in position 8 is Phe, Leu or Met
  Variant (9)..(9): Xaa in position 9 is Ala, Gly or Ser
  Variant (10)..(23): Xaa in position 10 to 23 is any amino acid
  Variant (26)..(27): Xaa in position 26 to 27 is any or no amino acid
  Variant (29)..(32): Xaa in position 29 to 32 is any amino acid
  Variant (33)..(34): Xaa in position 33 to 34 is any or no amino acid
EXXXXXXXXXXXXXXXXXXXXXXTGXXAXXXXXXG

SEQ ID NO: 29471 - DNA, 1047 bp, Escherichia coli K12; identical to SEQ ID NO: 1323
  CDS (1)..(1047)

SEQ ID NO: 29472 - protein, 348 aa, Escherichia coli K12; identical to SEQ ID NO: 1324

SEQ ID NO: 29473 - DNA, 1235 bp, Salmonella typhimurium; identical to SEQ ID NO: 1325
  CDS (165)..(1235)

SEQ ID NO: 29474 - protein, 356 aa, Salmonella typhimurium; identical to SEQ ID NO: 1326

SEQ ID NO: 29475 - DNA, 1086 bp, Deinococcus radiodurans; identical to SEQ ID NO: 1327
  CDS (1)..(1086)

SEQ ID NO: 29476 - protein, 361 aa, Deinococcus radiodurans; identical to SEQ ID NO: 1328

SEQ ID NO: 29477 - DNA, 1056 bp, Neisseria meningitidis; identical to SEQ ID NO: 1329
  CDS (1)..(1056)

SEQ ID NO: 29478 - protein, 351 aa, Neisseria meningitidis; identical to SEQ ID NO: 1330

SEQ ID NO: 29479 - DNA, 1047 bp, Yersinia pestis; identical to SEQ ID NO: 1331
  CDS (1)..(1047)

SEQ ID NO: 29480 - protein, 348 aa, Yersinia pestis; identical to SEQ ID NO: 1332

SEQ ID NO: 29481 - DNA, 1071 bp, Escherichia coli; identical to SEQ ID NO: 1333
  CDS (1)..(1071)

SEQ ID NO: 29482 - protein, 356 aa, Escherichia coli; identical to SEQ ID NO: 1334

SEQ ID NO: 29483 - DNA, 1131 bp, Nostoc sp. PCC 7120; identical to SEQ ID NO: 1335
  CDS (1)..(1131)

SEQ ID NO: 29484 - protein, 376 aa, Nostoc sp. PCC 7120; identical to SEQ ID NO: 1336

SEQ ID NO: 29485 - DNA, 1053 bp, Salmonella enterica subsp. enterica serovar Typhi; identical to SEQ ID NO: 1337
  CDS (1)..(1053)

SEQ ID NO: 29486 - protein, 350 aa, Salmonella enterica subsp. enterica serovar Typhi; identical to SEQ ID NO: 1338

SEQ ID NO: 29487 - DNA, 1077 bp, Pseudomonas aeruginosa; identical to SEQ ID NO: 1339
  CDS (1)..(1077)

SEQ ID NO: 29488 - protein, 358 aa, Pseudomonas aeruginosa; identical to SEQ ID NO: 1340

SEQ ID NO: 29489 - DNA, 1047 bp, Buchnera sp; identical to SEQ ID NO: 1341
  CDS (1)..(1047)

SEQ ID NO: 29490 - protein, 348 aa, Buchnera sp; identical to SEQ ID NO: 1342

SEQ ID NO: 29491 - DNA, 1074 bp, Vibrio cholerae; identical to SEQ ID NO: 1343
  CDS (1)..(1074)

SEQ ID NO: 29492 - protein, 357 aa, Vibrio cholerae; identical to SEQ ID NO: 1344

SEQ ID NO: 29493 - DNA, 1038 bp, Lactococcus lactis subsp. lactis; identical to SEQ ID NO: 1345
  CDS (1)..(1038)

SEQ ID NO: 29494 - protein, 345 aa, Lactococcus lactis subsp. lactis; identical to SEQ ID NO: 1346

SEQ ID NO: 29495 - DNA, 1023 bp, Lactococcus lactis subsp. lactis; identical to SEQ ID NO: 1347
  CDS (1)..(1023)

SEQ ID NO: 29496 - protein, 340 aa, Lactococcus lactis subsp. lactis; identical to SEQ ID NO: 1348

SEQ ID NO: 29497 - DNA, 1032 bp, Streptococcus pneumoniae; identical to SEQ ID NO: 1349
  CDS (1)..(1032)

SEQ ID NO: 29498 - protein, 343 aa, Streptococcus pneumoniae; identical to SEQ ID NO: 1350

SEQ ID NO: 29499 - DNA, 1095 bp, Pseudomonas aeruginosa; identical to SEQ ID NO: 1351
  CDS (1)..(1095)

SEQ ID NO: 29500 - protein, 364 aa, Pseudomonas aeruginosa; identical to SEQ ID NO: 1352

SEQ ID NO: 29501 - DNA, 1110 bp, Caulobacter crescentus; identical to SEQ ID NO: 1353
  CDS (1)..(1110)

SEQ ID NO: 29502 - protein, 369 aa, Caulobacter crescentus; identical to SEQ ID NO: 1354

SEQ ID NO: 29503 - DNA, 1032 bp, Streptococcus pneumoniae; identical to SEQ ID NO: 1355
  CDS (1)..(1032)

SEQ ID NO: 29504 - protein, 343 aa, Streptococcus pneumoniae; identical to SEQ ID NO: 1356

SEQ ID NO: 29505 - DNA, 1047 bp, Buchnera aphidicola; identical to SEQ ID NO: 1357
  CDS (1)..(1047)

SEQ ID NO: 29506 - protein, 348 aa, Buchnera aphidicola; identical to SEQ ID NO: 1358

SEQ ID NO: 29507 - DNA, 1089 bp, Haemophilus influenzae; identical to SEQ ID NO: 1359
  CDS (1)..(1089)

SEQ ID NO: 29508 - protein, 362 aa, Haemophilus influenzae; identical to SEQ ID NO: 1360

SEQ ID NO: 29509 - DNA, 1502 bp, Candida albicans; identical to SEQ ID NO: 1361
  CDS (336)..(1442)

SEQ ID NO: 29510 - protein, 368 aa, Candida albicans; identical to SEQ ID NO: 1362

SEQ ID NO: 29511 - DNA, 1113 bp, Saccharomyces cerevisiae; identical to SEQ ID NO: 1363
  CDS (1)..(1113)

SEQ ID NO: 29512 - protein, 370 aa, Saccharomyces cerevisiae; identical to SEQ ID NO: 1364

SEQ ID NO: 29513 - DNA, 2048 bp, Saccharomyces cerevisiae; identical to SEQ ID NO: 1365
  CDS (619)..(1731)

SEQ ID NO: 29514 - protein, 370 aa, Saccharomyces cerevisiae; identical to SEQ ID NO: 1366

SEQ ID NO: 29515 - DNA, 1107 bp, Schizosaccharomyces pombe; identical to SEQ ID NO: 1367
  CDS (1)..(1107)

SEQ ID NO: 29516 - protein, 368 aa, Schizosaccharomyces pombe; identical to SEQ ID NO: 1368

SEQ ID NO: 29517 - DNA, 1089 bp, Amycolatopsis orientalis; identical to SEQ ID NO: 1369
  CDS (1)..(1089)

SEQ ID NO: 29518 - protein, 362 aa, Amycolatopsis orientalis; identical to SEQ ID NO: 1370

SEQ ID NO: 29519 - DNA, 1119 bp, Schizosaccharomyces pombe; identical to SEQ ID NO: 1371
  CDS (1)..(1119)

SEQ ID NO: 29520 - protein, 372 aa, Schizosaccharomyces pombe; identical to SEQ ID NO: 1372

SEQ ID NO: 29521 - DNA, 1248 bp, Corynebacterium glutamicum; identical to SEQ ID NO: 1373
  CDS (101)..(1228)

SEQ ID NO: 29522 - protein, 375 aa, Corynebacterium glutamicum; identical to SEQ ID NO: 1374

SEQ ID NO: 29523 - DNA, 1083 bp, Methylophilus methylotrophus; identical to SEQ ID NO: 1375
  CDS (1)..(1083)

SEQ ID NO: 29524 - protein, 360 aa, Methylophilus methylotrophus; identical to SEQ ID NO: 1376

SEQ ID NO: 29525 - DNA, 1107 bp, Debaryomyces hansenii; identical to SEQ ID NO: 1377
  CDS (1)..(1107)

SEQ ID NO: 29526 - protein, 368 aa, Debaryomyces hansenii; identical to SEQ ID NO: 1378

SEQ ID NO: 29527 - DNA, 1074 bp, Yarrowia lipolytica; identical to SEQ ID NO: 1379
  CDS (1)..(1074)

SEQ ID NO: 29528 - protein, 357 aa, Yarrowia lipolytica; identical to SEQ ID NO: 1380

SEQ ID NO: 29529 - DNA, 1089 bp, Yarrowia lipolytica; identical to SEQ ID NO: 1381
  CDS (1)..(1089)

SEQ ID NO: 29530 - protein, 362 aa, Yarrowia lipolytica; identical to SEQ ID NO: 1382

SEQ ID NO: 29531 - DNA, 1119 bp, Kluyveromyces lactis; identical to SEQ ID NO: 1383
  CDS (1)..(1119)

SEQ ID NO: 29532 - protein, 372 aa, Kluyveromyces lactis; identical to SEQ ID NO: 1384

SEQ ID NO: 29533 - DNA, 1095 bp, Kluyveromyces lactis; identical to SEQ ID NO: 1385
  CDS (1)..(1095)

SEQ ID NO: 29534 - protein, 364 aa, Kluyveromyces lactis; identical to SEQ ID NO: 1386

SEQ ID NO: 29535 - DNA, 1074 bp, Erwinia carotovora subsp; identical to SEQ ID NO: 1387
  CDS (1)..(1074)

SEQ ID NO: 29536 - protein, 357 aa, Erwinia carotovora subsp; identical to SEQ ID NO: 1388

SEQ ID NO: 29537 - DNA, 1047 bp, Erwinia carotovora subsp; identical to SEQ ID NO: 1389
  CDS (1)..(1047)

SEQ ID NO: 29538 - protein, 348 aa, Erwinia carotovora subsp; identical to SEQ ID NO: 1390

SEQ ID NO: 29539 - DNA, 1056 bp, Erwinia carotovora subsp; identical to SEQ ID NO: 1391
  CDS (1)..(1056)

SEQ ID NO: 29540 - protein, 351 aa, Erwinia carotovora subsp; identical to SEQ ID NO: 1392

SEQ ID NO: 29541 - DNA, 1113 bp, Acinetobacter sp; identical to SEQ ID NO: 1393
  CDS (1)..(1113)

SEQ ID NO: 29542 - protein, 370 aa, Acinetobacter sp; identical to SEQ ID NO: 1394

SEQ ID NO: 29543 - DNA, 1056 bp, Acinetobacter sp; identical to SEQ ID NO: 1395
  CDS (1)..(1056)

SEQ ID NO: 29544 - protein, 351 aa, Acinetobacter sp; identical to SEQ ID NO: 1396

SEQ ID NO: 29545 - DNA, 1119 bp, Candida glabrata; identical to SEQ ID NO: 1397
  CDS (1)..(1119)

SEQ ID NO: 29546 - protein, 372 aa, Candida glabrata; identical to SEQ ID NO: 1398

SEQ ID NO: 29547 - DNA, 1071 bp, Candida glabrata; identical to SEQ ID NO: 1399
  CDS (1)..(1071)

SEQ ID NO: 29548 - protein, 356 aa, Candida glabrata; identical to SEQ ID NO: 1400

SEQ ID NO: 29549 - DNA, 1083 bp, Photobacterium profundum; identical to SEQ ID NO: 1401
  CDS (1)..(1083)

SEQ ID NO: 29550 - protein, 360 aa, Photobacterium profundum; identical to SEQ ID NO: 1402

SEQ ID NO: 29551 - DNA, 1053 bp, Photobacterium profundum; identical to SEQ ID NO: 1403
  CDS (1)..(1053)

SEQ ID NO: 29552 - protein, 350 aa, Photobacterium profundum; identical to SEQ ID NO: 1404

SEQ ID NO: 29553 - DNA, 1113 bp, Photobacterium profundum; identical to SEQ ID NO: 1405
  CDS (1)..(1113)

SEQ ID NO: 29554 - protein, 370 aa, Photobacterium profundum; identical to SEQ ID NO: 1406

SEQ ID NO: 29555 - DNA, 1056 bp, Photobacterium profundum; identical to SEQ ID NO: 1407
  CDS (1)..(1056)

SEQ ID NO: 29556 - protein, 351 aa, Photobacterium profundum; identical to SEQ ID NO: 1408

SEQ ID NO: 29557 - DNA, 1092 bp, Parachlamydia sp; identical to SEQ ID NO: 1409
  CDS (1)..(1092)

SEQ ID NO: 29558 - protein, 363 aa, Parachlamydia sp; identical to SEQ ID NO: 1410

SEQ ID NO: 29559 - DNA, 1095 bp, Rhodopseudomonas palustris; identical to SEQ ID NO: 1411
  CDS (1)..(1095)

SEQ ID NO: 29560 - protein, 364 aa, Rhodopseudomonas palustris; identical to SEQ ID NO: 1412

SEQ ID NO: 29561 - DNA, 1100 bp, Amycolatopsis methanolica; identical to SEQ ID NO: 1413
  CDS (1)..(1086)

SEQ ID NO: 29562 - protein, 361 aa, Amycolatopsis methanolica; identical to SEQ ID NO: 1414

SEQ ID NO: 29563 - DNA, 1071 bp, Treponema denticola; identical to SEQ ID NO: 1415
  CDS (1)..(1071)

SEQ ID NO: 29564 - protein, 356 aa, Treponema denticola; identical to SEQ ID NO: 1416

SEQ ID NO: 29565 - DNA, 1068 bp, Geobacter sulfurreducens; identical to SEQ ID NO: 1417
  CDS (1)..(1068)

SEQ ID NO: 29566 - protein, 355 aa, Geobacter sulfurreducens; identical to SEQ ID NO: 1418

SEQ ID NO: 29567 - DNA, 1095 bp, Ashbya gossypii; identical to SEQ ID NO: 1419
  CDS (1)..(1095)

SEQ ID NO: 29568 - protein, 364 aa, Ashbya gossypii; identical to SEQ ID NO: 1420

SEQ ID NO: 29569 - DNA, 1122 bp, Ashbya gossypii; identical to SEQ ID NO: 1421
  CDS (1)..(1122)

SEQ ID NO: 29570 - protein, 373 aa, Ashbya gossypii; identical to SEQ ID NO: 1422

SEQ ID NO: 29571 - DNA, 1098 bp, Amycolatopsis balhimycina; identical to SEQ ID NO: 1423
  CDS (1)..(1098)

SEQ ID NO: 29572 - protein, 365 aa, Amycolatopsis balhimycina; identical to SEQ ID NO: 1424

SEQ ID NO: 29573 - DNA, 1071 bp, Vibrio vulnificus; identical to SEQ ID NO: 1425
  CDS (1)..(1071)

SEQ ID NO: 29574 - protein, 356 aa, Vibrio vulnificus; identical to SEQ ID NO: 1426

SEQ ID NO: 29575 - DNA, 1047 bp, Photorhabdus luminescens; identical to SEQ ID NO: 1427
  CDS (1)..(1047)

SEQ ID NO: 29576 - protein, 348 aa, Photorhabdus luminescens; identical to SEQ ID NO: 1428

SEQ ID NO: 29577 - DNA, 1053 bp, Photorhabdus luminescens; identical to SEQ ID NO: 1429
  CDS (1)..(1053)

SEQ ID NO: 29578 - protein, 350 aa, Photorhabdus luminescens; identical to SEQ ID NO: 1430

SEQ ID NO: 29579 - DNA, 1095 bp, Photorhabdus luminescens; identical to SEQ ID NO: 1431
  CDS (1)..(1095)

SEQ ID NO: 29580 - protein, 364 aa, Photorhabdus luminescens; identical to SEQ ID NO: 1432

SEQ ID NO: 29581 - DNA, 1119 bp, Gloeobacter violaceus; identical to SEQ ID NO: 1433
  CDS (1)..(1119)

SEQ ID NO: 29582 - protein, 372 aa, Gloeobacter violaceus; identical to SEQ ID NO: 1434

SEQ ID NO: 29583 - DNA, 1107 bp, Chromobacterium violaceum; identical to SEQ ID NO: 1435
  CDS (1)..(1107)

SEQ ID NO: 29584 - protein, 368 aa, Chromobacterium violaceum; identical to SEQ ID NO: 1436

SEQ ID NO: 29585 - DNA, 1059 bp, Chromobacterium violaceum; identical to SEQ ID NO: 1437
  CDS (1)..(1059)

SEQ ID NO: 29586 - protein, 352 aa, Chromobacterium violaceum; identical to SEQ ID NO: 1438

SEQ ID NO: 29587 - DNA, 1140 bp, Neurospora crassa; identical to SEQ ID NO: 1439
  CDS (1)..(1140)

SEQ ID NO: 29588 - protein, 379 aa, Neurospora crassa; identical to SEQ ID NO: 1440

SEQ ID NO: 29589 - DNA, 1092 bp, Neurospora crassa; identical to SEQ ID NO: 1441
  CDS (1)..(1092)

SEQ ID NO: 29590 - protein, 363 aa, Neurospora crassa; identical to SEQ ID NO: 1442

SEQ ID NO: 29591 - DNA, 1068 bp, Synechococcus sp; identical to SEQ ID NO: 1443
  CDS (1)..(1068)

SEQ ID NO: 29592 - protein, 355 aa, Synechococcus sp; identical to SEQ ID NO: 1444

SEQ ID NO: 29593 - DNA, 1053 bp, Rhodopirellula baltica; identical to SEQ ID NO: 1445
  CDS (1)..(1053)

SEQ ID NO: 29594 - protein, 350 aa, Rhodopirellula baltica; identical to SEQ ID NO: 1446

SEQ ID NO: 29595 - DNA, 1068 bp, Prochlorococcus marinus subsp; identical to SEQ ID NO: 1447
  CDS (1)..(1068)

SEQ ID NO: 29596 - protein, 355 aa, Prochlorococcus marinus subsp; identical to SEQ ID NO: 1448

SEQ ID NO: 29597 - DNA, 1083 bp, Prochlorococcus marinus; identical to SEQ ID NO: 1449
  CDS (1)..(1083)

SEQ ID NO: 29598 - protein, 360 aa, Prochlorococcus marinus; identical to SEQ ID NO: 1450

SEQ ID NO: 29599 - DNA, 1074 bp, Prochlorococcus marinus; identical to SEQ ID NO: 1451
  CDS (1)..(1074)

SEQ ID NO: 29600 - protein, 357 aa, Prochlorococcus marinus; identical to SEQ ID NO: 1452

SEQ ID NO: 29601 - DNA, 1113 bp, Haemophilus ducreyi; identical to SEQ ID NO: 1453
  CDS (1)..(1113)

SEQ ID NO: 29602 - protein, 370 aa, Haemophilus ducreyi; identical to SEQ ID NO: 1454

SEQ ID NO: 29603 - DNA, 1080 bp, Haemophilus ducreyi; identical to SEQ ID NO: 1455
  CDS (1)..(1080)

SEQ ID NO: 29604 - protein, 359 aa, Haemophilus ducreyi; identical to SEQ ID NO: 1456

SEQ ID NO: 29605 - DNA, 1086 bp, Candidatus Blochmannia floridanus; identical to SEQ ID NO: 1457
  CDS (1)..(1086)

SEQ ID NO: 29606 - protein, 361 aa, Candidatus Blochmannia floridanus; identical to SEQ ID NO: 1458

SEQ ID NO: 29607 - DNA, 1074 bp, Bordetella pertussis; identical to SEQ ID NO: 1459
  CDS (1)..(1074)

SEQ ID NO: 29608 - protein, 357 aa, Bordetella pertussis; identical to SEQ ID NO: 1460

SEQ ID NO: 29609 - DNA, 1119 bp, Bordetella bronchiseptica; identical to SEQ ID NO: 1461
  CDS (1)..(1119)

SEQ ID NO: 29610 - protein, 372 aa, Bordetella bronchiseptica; identical to SEQ ID NO: 1462

SEQ ID NO: 29611 - DNA, 1179 bp, Nitrosomonas europaea; identical to SEQ ID NO: 1463
  CDS (1)..(1179)

SEQ ID NO: 29612 - protein, 392 aa, Nitrosomonas europaea; identical to SEQ ID NO: 1464

SEQ ID NO: 29613 - DNA, 1083 bp, Coxiella burnetii; identical to SEQ ID NO: 1465
  CDS (1)..(1083)

SEQ ID NO: 29614 - protein, 360 aa, Coxiella burnetii; identical to SEQ ID NO: 1466

SEQ ID NO: 29615 - DNA, 834 bp, Vibrio anguillarum; identical to SEQ ID NO: 1467
  CDS (1)..(834)

SEQ ID NO: 29616 - protein, 277 aa, Vibrio anguillarum; identical to SEQ ID NO: 1468

SEQ ID NO: 29617 - DNA, 1143 bp, Xylella fastidiosa; identical to SEQ ID NO: 1469
  CDS (1)..(1143)

SEQ ID NO: 29618 - protein, 380 aa, Xylella fastidiosa; identical to SEQ ID NO: 1470

SEQ ID NO: 29619 - DNA, 1053 bp, Vibrio parahaemolyticus; identical to SEQ ID NO: 1471
  CDS (1)..(1053)

SEQ ID NO: 29620 - protein, 350 aa, Vibrio parahaemolyticus; identical to SEQ ID NO: 1472

SEQ ID NO: 29621 - DNA, 1053 bp, Vibrio parahaemolyticus; identical to SEQ ID NO: 1473
  CDS (1)..(1053)

SEQ ID NO: 29622 - protein, 350 aa, Vibrio parahaemolyticus; identical to SEQ ID NO: 1474

SEQ ID NO: 29623 - DNA, 1074 bp, Vibrio parahaemolyticus; identical to SEQ ID NO: 1475
  CDS (1)..(1074)

SEQ ID NO: 29624 - protein, 357 aa, Vibrio parahaemolyticus; identical to SEQ ID NO: 1476

SEQ ID NO: 29625 - DNA, 1083 bp, Pseudomonas syringae; identical to SEQ ID NO: 1477
  CDS (1)..(1083)

SEQ ID NO: 29626 - protein, 360 aa, Pseudomonas syringae; identical to SEQ ID NO: 1478

SEQ ID NO: 29627 - DNA, 1077 bp, Pseudomonas syringae; identical to SEQ ID NO: 1479
  CDS (1)..(1077)

SEQ ID NO: 29628 - protein, 358 aa, Pseudomonas syringae; identical to SEQ ID NO: 1480

SEQ ID NO: 29629 - DNA, 1062 bp, Pseudomonas putida; identical to SEQ ID NO: 1481
  CDS (1)..(1062)

SEQ ID NO: 29630 - protein, 353 aa, Pseudomonas putida; identical to SEQ ID NO: 1482

SEQ ID NO: 29631 - DNA, 1113 bp, Pseudomonas putida; identical to SEQ ID NO: 1483
  CDS (1)..(1113)

SEQ ID NO: 29632 - protein, 370 aa, Pseudomonas putida; identical to SEQ ID NO: 1484

SEQ ID NO: 29633 - DNA, 1086 bp, Bradyrhizobium japonicum; identical to SEQ ID NO: 1485
  CDS (1)..(1086)

SEQ ID NO: 29634 - protein, 361 aa, Bradyrhizobium japonicum; identical to SEQ ID NO: 1486

SEQ ID NO: 29635 - DNA, 1053 bp, Yersinia pestis; identical to SEQ ID NO: 1487
  CDS (1)..(1053)

SEQ ID NO: 29636 - protein, 350 aa, Yersinia pestis; identical to SEQ ID NO: 1488

SEQ ID NO: 29637 - DNA, 1077 bp, Yersinia pestis; identical to SEQ ID NO: 1489
  CDS (1)..(1077)

SEQ ID NO: 29638 - protein, 358 aa, Yersinia pestis; identical to SEQ ID NO: 1490

SEQ ID NO: 29639 - DNA, 1038 bp, Wigglesworthia glossinidia brevipalpis; identical to SEQ ID NO: 1491
  CDS (1)..(1038)

SEQ ID NO: 29640 - protein, 345 aa, Wigglesworthia glossinidia brevipalpis; identical to SEQ ID NO: 1492

SEQ ID NO: 29641 - DNA, 1053 bp, Vibrio vulnificus; identical to SEQ ID NO: 1493
  CDS (1)..(1053)

SEQ ID NO: 29642 - protein, 350 aa, Vibrio vulnificus; identical to SEQ ID NO: 1494

SEQ ID NO: 29643 - DNA, 1053 bp, Vibrio vulnificus; identical to SEQ ID NO: 1495
  CDS (1)..(1053)

SEQ ID NO: 29644 - protein, 350 aa, Vibrio vulnificus; identical to SEQ ID NO: 1496

SEQ ID NO: 29645 - DNA, 1071 bp, Vibrio vulnificus; identical to SEQ ID NO: 1497
  CDS (1)..(1071)

SEQ ID NO: 29646 - protein, 356 aa, Vibrio vulnificus; identical to SEQ ID NO: 1498

SEQ ID NO: 29647 - DNA, 1062 bp, Synechococcus elongatus; identical to SEQ ID NO: 1499
  CDS (1)..(1062)

SEQ ID NO: 29648 - protein, 353 aa, Synechococcus elongatus; identical to SEQ ID NO: 1500

SEQ ID NO: 29649 - DNA, 1032 bp, Streptococcus mutans; identical to SEQ ID NO: 1501
  CDS (1)..(1032)

SEQ ID NO: 29650 - protein, 343 aa, Streptococcus mutans; identical to SEQ ID NO: 1502

SEQ ID NO: 29651 - DNA, 1035 bp, Streptococcus mutans; identical to SEQ ID NO: 1503
  CDS (1)..(1035)

SEQ ID NO: 29652 - protein, 344 aa, Streptococcus mutans; identical to SEQ ID NO: 1504

SEQ ID NO: 29653 - DNA, 1008 bp, Streptococcus agalactiae; identical to SEQ ID NO: 1505
  CDS (1)..(1008)

SEQ ID NO: 29654 - protein, 335 aa, Streptococcus agalactiae; identical to SEQ ID NO: 1506

SEQ ID NO: 29655 - DNA, 1065 bp, Shewanella oneidensis; identical to SEQ ID NO: 1507
  CDS (1)..(1065)

SEQ ID NO: 29656 - protein, 354 aa, Shewanella oneidensis; identical to SEQ ID NO: 1508

SEQ ID NO: 29657 - DNA, 1092 bp, Shewanella oneidensis; identical to SEQ ID NO: 1509
  CDS (1)..(1092)

SEQ ID NO: 29658 - protein, 363 aa, Shewanella oneidensis; identical to SEQ ID NO: 1510

SEQ ID NO: 29659 - DNA, 1059 bp, Shewanella oneidensis; identical to SEQ ID NO: 1511
  CDS (1)..(1059)

SEQ ID NO: 29660 - protein, 352 aa, Shewanella oneidensis; identical to SEQ ID NO: 1512

SEQ ID NO: 29661 - DNA, 1053 bp, Escherichia coli O6; identical to SEQ ID NO: 1513
  CDS (1)..(1053)

SEQ ID NO: 29662 - protein, 350 aa, Escherichia coli O6; identical to SEQ ID NO: 1514

SEQ ID NO: 29663 - DNA, 1170 bp, Corynebacterium efficiens; identical to SEQ ID NO: 1515
  CDS (1)..(1170)

SEQ ID NO: 29664 - protein, 389 aa, Corynebacterium efficiens; identical to SEQ ID NO: 1516

SEQ ID NO: 29665 - DNA, 1134 bp, Bifidobacterium longum; identical to SEQ ID NO: 1517
  CDS (1)..(1134)

SEQ ID NO: 29666 - protein, 377 aa, Bifidobacterium longum; identical to SEQ ID NO: 1518

SEQ ID NO: 29667 - DNA, 1233 bp, Bifidobacterium longum; identical to SEQ ID NO: 1519
  CDS (1)..(1233)

SEQ ID NO: 29668 - protein, 410 aa, Bifidobacterium longum; identical to SEQ ID NO: 1520

SEQ ID NO: 29669 - DNA, 1221 bp, Phytophthora infestans; identical to SEQ ID NO: 1521
  CDS (20)..(1153)

SEQ ID NO: 29670 - protein, 377 aa, Phytophthora infestans; identical to SEQ ID NO: 1522

SEQ ID NO: 29671 - DNA, 1062 bp, Chlorobium tepidum; identical to SEQ ID NO: 1523
  CDS (1)..(1062)

SEQ ID NO: 29672 - protein, 353 aa, Chlorobium tepidum; identical to SEQ ID NO: 1524

SEQ ID NO: 29673 - DNA, 1074 bp, Xanthomonas campestris; identical to SEQ ID NO: 1525
  CDS (1)..(1074)

SEQ ID NO: 29674 - protein, 357 aa, Xanthomonas campestris; identical to SEQ ID NO: 1526

SEQ ID NO: 29675 - DNA, 1074 bp, Xanthomonas axonopodis; identical to SEQ ID NO: 1527
  CDS (1)..(1074)

SEQ ID NO: 29676 - protein, 357 aa, Xanthomonas axonopodis; identical to SEQ ID NO: 1528

SEQ ID NO: 29677 - DNA, 1080 bp, Ralstonia solanacearum; identical to SEQ ID NO: 1529
  CDS (1)..(1080)

SEQ ID NO: 29678 - protein, 359 aa, Ralstonia solanacearum; identical to SEQ ID NO: 1530

SEQ ID NO: 29679 - DNA, 1179 bp, Ralstonia solanacearum; identical to SEQ ID NO: 1531
  CDS (1)..(1179)

SEQ ID NO: 29680 - protein, 392 aa, Ralstonia solanacearum; identical to SEQ ID NO: 1532

SEQ ID NO: 29681 - DNA, 1065 bp, Synechococcus sp; identical to SEQ ID NO: 1533
  CDS (1)..(1065)

SEQ ID NO: 29682 - protein, 354 aa, Synechococcus sp; identical to SEQ ID NO: 1534

SEQ ID NO: 29683 - DNA, 1035 bp, Escherichia coli; identical to SEQ ID NO: 1535
  CDS (1)..(1035)

SEQ ID NO: 29684 - protein, 344 aa, Escherichia coli; identical to SEQ ID NO: 1536

SEQ ID NO: 29685 - DNA, 1200 bp, Stigmatella aurantiaca; identical to SEQ ID NO: 1537
  CDS (62)..(1147)

SEQ ID NO: 29686 - protein, 361 aa, Stigmatella aurantiaca; identical to SEQ ID NO: 1538

SEQ ID NO: 29687 - DNA, 1092 bp, Rhizobium loti; identical to SEQ ID NO: 1539
  CDS (1)..(1092)

SEQ ID NO: 29688 - protein, 363 aa, Rhizobium loti; identical to SEQ ID NO: 1540

SEQ ID NO: 29689 - DNA, 1083 bp, Amycolatopsis mediterranei; identical to SEQ ID NO: 1541
  CDS (1)..(1083)

SEQ ID NO: 29690 - protein, 360 aa, Amycolatopsis mediterranei; identical to SEQ ID NO: 1542

SEQ ID NO: 29691 - DNA, 1053 bp, Pasteurella multocida; identical to SEQ ID NO: 1543
  CDS (1)..(1053)

SEQ ID NO: 29692 - protein, 350 aa, Pasteurella multocida; identical to SEQ ID NO: 1544

SEQ ID NO: 29693 - DNA, 1086 bp, Pasteurella multocida; identical to SEQ ID NO: 1545
  CDS (1)..(1086)

SEQ ID NO: 29694 - protein, 361 aa, Pasteurella multocida; identical to SEQ ID NO: 1546

SEQ ID NO: 29695 - DNA, 1125 bp, Emericella nidulans; identical to SEQ ID NO: 1547
  CDS (1)..(1125)

SEQ ID NO: 29696 - protein, 374 aa, Emericella nidulans; identical to SEQ ID NO: 1548

SEQ ID NO: 29697 - DNA, 1089 bp, Emericella nidulans; identical to SEQ ID NO: 1549
  CDS (1)..(1089)

SEQ ID NO: 29698 - protein, 362 aa, Emericella nidulans; identical to SEQ ID NO: 1550

SEQ ID NO: 29699 - DNA, 1239 bp, Vibrio cholerae; identical to SEQ ID NO: 1551
  CDS (114)..(1175)

SEQ ID NO: 29700 - protein, 353 aa, Vibrio cholerae; identical to SEQ ID NO: 1552

SEQ ID NO: 29701 - DNA, 2184 bp, Candida albicans; identical to SEQ ID NO: 1553
  CDS (461)..(1573)

SEQ ID NO: 29702 - protein, 370 aa, Candida albicans; identical to SEQ ID NO: 1554

SEQ ID NO: 29703 - DNA, 1047 bp, Buchnera aphidicola; identical to SEQ ID NO: 1555
  CDS (1)..(1047)

SEQ ID NO: 29704 - protein, 348 aa, Buchnera aphidicola; identical to SEQ ID NO: 1556

SEQ ID NO: 29705 - DNA, 1047 bp, Buchnera aphidicola; identical to SEQ ID NO: 1557
  CDS (1)..(1047)

SEQ ID NO: 29706 - protein, 348 aa, Buchnera aphidicola; identical to SEQ ID NO: 1558

SEQ ID NO: 29707 - DNA, 1047 bp, Erwinia herbicola; identical to SEQ ID NO: 1559
  CDS (1)..(1047)

SEQ ID NO: 29708 - protein, 348 aa, Erwinia herbicola; identical to SEQ ID NO: 1560

SEQ ID NO: 29709 - DNA, 1047 bp, Salmonella typhimurium; identical to SEQ ID NO: 1561
  CDS (1)..(1047)

SEQ ID NO: 29710 - protein, 348 aa, Salmonella typhimurium; identical to SEQ ID NO: 1562

SEQ ID NO: 29711 - DNA, 23 bp, Artificial sequence
  Primer sequence
atgaacagaactgacgaactccg

SEQ ID NO: 29712 - DNA, 24 bp, Artificial sequence
  Primer sequence
ttagaagcgggtatctaccgcaga

SEQ ID NO: 29713 - protein, 352 aa, Artificial sequence; identical to SEQ ID NO: 19007
  Consensus
  Variant (2)..(3): Xaa in position 2 to 3 is any amino acid
  Variant (5)..(11): Xaa in position 5 to 11 is any amino acid
  Variant (13)..(24): Xaa in position 13 to 24 is any amino acid
  Variant (26)..(30): Xaa in position 26 to 30 is any amino acid
  Variant (32)..(33): Xaa in position 32 to 33 is any amino acid
  Variant (35)..(35): Xaa in position 35 is any amino acid
  Variant (37)..(40): Xaa in position 37 to 40 is any amino acid
  Variant (42)..(43): Xaa in position 42 to 43 is any amino acid
  Variant (45)..(46): Xaa in position 45 to 46 is any amino acid
  Variant (51)..(51): Xaa in position 51 is any amino acid
  Variant (54)..(55): Xaa in position 54 to 55 is any amino acid
  Variant (58)..(59): Xaa in position 58 to 59 is any amino acid
  Variant (62)..(63): Xaa in position 62 to 63 is any amino acid
  Variant (65)..(76): Xaa in position 65 to 76 is any amino acid
  Variant (78)..(80): Xaa in position 78 to 80 is any amino acid
  Variant (83)..(83): Xaa in position 83 is any amino acid
  Variant (85)..(85): Xaa in position 85 is any amino acid
  Variant (91)..(93): Xaa in position 91 to 93 is any amino acid
  Variant (100)..(100): Xaa in position 100 is any amino acid
  Variant (103)..(112): Xaa in position 103 to 112 is any amino acid
  Variant (115)..(117): Xaa in position 115 to 117 is any amino acid
  Variant (119)..(119): Xaa in position 119 is any amino acid
  Variant (121)..(128): Xaa in position 121 to 128 is any amino acid
  Variant (130)..(130): Xaa in position 130 is any amino acid
  Variant (132)..(132): Xaa in position 132 is any amino acid
  Variant (134)..(134): Xaa in position 134 is any amino acid
  Variant (136)..(136): Xaa in position 136 is any amino acid
  Variant (139)..(142): Xaa in position 139 to 142 is any amino acid
  Variant (144)..(146): Xaa in position 144 to 146 is any amino acid
  Variant (148)..(152): Xaa in position 148 to 152 is any amino acid
  Variant (163)..(163): Xaa in position 163 is any amino acid
  Variant (166)..(167): Xaa in position 166 to 167 is any amino acid
  Variant (170)..(170): Xaa in position 170 is any amino acid
  Variant (173)..(173): Xaa in position 173 is any amino acid
  Variant (175)..(175): Xaa in position 175 is any amino acid
  Variant (180)..(180): Xaa in position 180 is any amino acid
  Variant (182)..(182): Xaa in position 182 is any amino acid
  Variant (184)..(187): Xaa in position 184 to 187 is any amino acid
  Variant (189)..(190): Xaa in position 189 to 190 is any amino acid
  Variant (192)..(194): Xaa in position 192 to 194 is any amino acid
  Variant (196)..(198): Xaa in position 196 to 198 is any amino acid
  Variant (200)..(200): Xaa in position 200 is any amino acid
  Variant (202)..(207): Xaa in position 202 to 207 is any amino acid
  Variant (209)..(214): Xaa in position 209 to 214 is any amino acid
  Variant (216)..(216): Xaa in position 216 is any amino acid
  Variant (219)..(221): Xaa in position 219 to 221 is any amino acid
  Variant (223)..(224): Xaa in position 223 to 224 is any amino acid
  Variant (229)..(237): Xaa in position 229 to 237 is any amino acid
  Variant (240)..(268): Xaa in position 240 to 268 is any amino acid
  Variant (270)..(270): Xaa in position 270 is any amino acid
  Variant (273)..(273): Xaa in position 273 is any amino acid
  Variant (276)..(276): Xaa in position 276 is any amino acid
  Variant (278)..(281): Xaa in position 278 to 281 is any amino acid
  Variant (283)..(284): Xaa in position 283 to 284 is any amino acid
  Variant (286)..(291): Xaa in position 286 to 291 is any amino acid
  Variant (293)..(295): Xaa in position 293 to 295 is any amino acid
  Variant (297)..(304): Xaa in position 297 to 304 is any amino acid
  Variant (306)..(306): Xaa in position 306 is any amino acid
  Variant (308)..(308): Xaa in position 308 is any amino acid
  Variant (311)..(314): Xaa in position 311 to 314 is any amino acid
  Variant (316)..(316): Xaa in position 316 is any amino acid
  Variant (318)..(333): Xaa in position 318 to 333 is any amino acid
  Variant (336)..(336): Xaa in position 336 is any amino acid
  Variant (338)..(338): Xaa in position 338 is any amino acid
  Variant (341)..(341): Xaa in position 341 is any amino acid
  Variant (343)..(344): Xaa in position 343 to 344 is any amino acid
  Variant (346)..(347): Xaa in position 346 to 347 is any amino acid
  Variant (349)..(351): Xaa in position 349 to 351 is any amino acid

SEQ ID NO: 29714 - protein, 24 aa, Artificial sequence
  Consensus
  Variant (2)..(2): Xaa in position 2 is any amino acid
  Variant (3)..(3): Xaa in position 3 is Leu, Val, Phe, Ile, Ala or Met
  Variant (4)..(4): Xaa in position 4 is Val, Ile, Leu or Ala
  Variant (5)..(5): Xaa in position 5 is Val or Ile
  Variant (6)..(6): Xaa in position 6 is Val, Ile, Cys or Thr
  Variant (11)..(11): Xaa in position 11 is Ile, Val, Ser or Leu
  Variant (12)..(12): Xaa in position 12 is His or Asp
  Variant (13)..(13): Xaa in position 13 is Asp or Asn
  Variant (14)..(15): Xaa in position 14 to 15 is any amino acid
  Variant (16)..(16): Xaa in position 16 is Ala, Ser, Gln or Thr
  Variant (17)..(17): Xaa in position 17 is Ala, Val or Gly
  Variant (18)..(18): Xaa in position 18 is any amino acid
  Variant (19)..(19): Xaa in position 19 is Glu, Asp, Ala or Gln
  Variant (21)..(21): Xaa in position 21 is Ala, Gly, Cys or Ser
  Variant (22)..(22): Xaa in position 22 is any amino acid
  Variant (23)..(23): Xaa in position 23 is Arg, Lys, Gln, His or Leu
  Variant (24)..(24): Xaa in position 24 is Leu, Ile or Phe
RXXXXXGPCSXXXXXXXXXYXXXX

SEQ ID NO: 29715 - protein, 42 aa, Artificial sequence; identical to SEQ ID NO: 2884
  Consensus
  Variant (1)..(1): Xaa in position 1 is Leu, Ile, Phe or Met
  Variant (2)..(2): Xaa in position 2 is any amino acid
  Variant (3)..(3): Xaa in position 3 is Ile, Val, Leu or Met
  Variant (4)..(4): Xaa in position 4 is Val, Ile or Leu
  Variant (7)..(7): Xaa in position 7 is Val, Ala or Thr
  Variant (9)..(9): Xaa in position 9 is Phe, Leu, Thr or Val
  Variant (10)..(10): Xaa in position 10 is Glu or Ala
  Variant (15)..(16): Xaa in position 15 to 16 is any amino acid
  Variant (17)..(17): Xaa in position 17 is any or no amino acid
  Variant (19)..(19): Xaa in position 19 is Trp or Tyr
  Variant (20)..(20): Xaa in position 20 is Lys or Arg
  Variant (22)..(22): Xaa in position 22 is Leu, Phe, Met or Tyr
  Variant (23)..(23): Xaa in position 23 is Ile, Val, Ala or Leu
  Variant (24)..(24): Xaa in position 24 is any amino acid
  Variant (25)..(25): Xaa in position 25 is Asp, Glu or Gln
  Variant (27)..(27): Xaa in position 27 is any amino acid
  Variant (28)..(28): Xaa in position 28 is Leu, Met, Ile, Val, Ala or Thr
  Variant (29)..(29): Xaa in position 29 is Asp, Asn or Ser
  Variant (30)..(33): Xaa in position 30 to 33 is any amino acid
  Variant (34)..(34): Xaa in position 34 is Ile, Val, Leu or Met
  Variant (35)..(36): Xaa in position 35 to 36 is any amino acid
  Variant (38)..(38): Xaa in position 38 is Leu, Ile, Met or Val
  Variant (39)..(40): Xaa in position 39 to 40 is any amino acid
  Variant (41)..(41): Xaa in position 41 is Ala, Ser, Gly, Val or Thr

SEQ ID NO: 29716 - protein, 65 aa, Artificial sequence; identical to SEQ ID NO: 2885
  Consensus
  Variant (2)..(2): Xaa in position 2 is any amino acid
  Variant (4)..(4): Xaa in position 4 is Asp, Tyr, Gln, Asn or Glu
  Variant (5)..(9): Xaa in position 5 to 9 is any amino acid
  Variant (10)..(10): Xaa in position 10 is Tyr, Phe or Leu
  Variant (11)..(12): Xaa in position 11 to 12 is any amino acid
  Variant (13)..(13): Xaa in position 13 is Asp or Glu
  Variant (14)..(15): Xaa in position 14 to 15 is any amino acid
  Variant (16)..(16): Xaa in position 16 is Ser, Ala, Thr or Cys
  Variant (17)..(17): Xaa in position 17 is Trp, Phe, Tyr, Leu or Val
  Variant (18)..(18): Xaa in position 18 is any amino acid
  Variant (19)..(19): Xaa in position 19 is Ala or Ser
  Variant (20)..(20): Xaa in position 20 is Ile or Val
  Variant (24)..(24): Xaa in position 24 is Thr, Ser or Asn
  Variant (25)..(25): Xaa in position 25 is Thr, Val, Ala, Ser or Ile
  Variant (26)..(26): Xaa in position 26 is Glu or Ala
  Variant (27)..(27): Xaa in position 27 is Ser, Asp or Asn
  Variant (29)..(29): Xaa in position 29 is any amino acid
  Variant (32)..(32): Xaa in position 32 is Glu, Gln, Phe or Met
  Variant (33)..(33): Xaa in position 33 is Leu, Met, Val, Ile or Phe
  Variant (34)..(34): Xaa in position 34 is Ala, Ser, Thr, Cys or Val
  Variant (36)..(36): Xaa in position 36 is Gly, Ala or Asn
  Variant (37)..(39): Xaa in position 37 to 39 is any amino acid
  Variant (40)..(40): Xaa in position 40 is Pro or Ala
  Variant (41)..(41): Xaa in position 41 is Val, Ile, Thr or Leu
  Variant (43)..(43): Xaa in position 43 is Phe, Met, Tyr or Ile
  Variant (46)..(46): Xaa in position 46 is any amino acid
  Variant (47)..(47): Xaa in position 47 is Thr, Ser or Arg
  Variant (48)..(48): Xaa in position 48 is any amino acid
  Variant (50)..(53): Xaa in position 50 to 53 is any amino acid
  Variant (54)..(54): Xaa in position 54 is Ala or Met
  Variant (55)..(55): Xaa in position 55 is any amino acid
  Variant (56)..(56): Xaa in position 56 is Asp, Asn or Glu
  Variant (57)..(57): Xaa in position 57 is Ala or Gly
  Variant (58)..(59): Xaa in position 58 to 59 is any amino acid
  Variant (60)..(60): Xaa in position 60 is Ala or Ser
  Variant (61)..(61): Xaa in position 61 is Ala, Ser, Val or Thr
  Variant (62)..(64): Xaa in position 62 to 64 is any amino acid
  Variant (65)..(65): Xaa in position 65 is His or Gln

SEQ ID NO: 29717 - protein, 71 aa, Artificial sequence; identical to SEQ ID NO: 2886
  Consensus
  Variant (1)..(1): Xaa in position 1 is Thr or Ser
  Variant (2)..(2): Xaa in position 2 is any amino acid
  Variant (5)..(7): Xaa in position 5 to 7 is any amino acid
  Variant (8)..(8): Xaa in position 8 is His or Phe
  Variant (9)..(9): Xaa in position 9 is Val, Ile, Leu or Ala
  Variant (10)..(10): Xaa in position 10 is Ile or Val
  Variant (11)..(11): Xaa in position 11 is Leu or Met
  Variant (14)..(14): Xaa in position 14 is Gly, Ser or Ala
  Variant (15)..(16): Xaa in position 15 to 16 is any amino acid
  Variant (17)..(22): Xaa in position 17 to 22 is any or no amino acid
  Variant (23)..(23): Xaa in position 23 is Pro, Thr or Ser
  Variant (25)..(25): Xaa in position 25 is Tyr, Phe or His
  Variant (26)..(29): Xaa in position 26 to 29 is any amino acid
  Variant (30)..(30): Xaa in position 30 is Val, Ile or Leu
  Variant (31)..(36): Xaa in position 31 to 36 is any amino acid
  Variant (37)..(37): Xaa in position 37 is Leu, Met, Ile, Tyr or His
  Variant (38)..(40): Xaa in position 38 to 40 is any amino acid
  Variant (41)..(51): Xaa in position 41 to 51 is any or no amino acid
  Variant (52)..(52): Xaa in position 52 is Leu, Ile or Val
  Variant (53)..(53): Xaa in position 53 is Met, Val, Ile or Leu
  Variant (54)..(54): Xaa in position 54 is Ile or Val
  Variant (56)..(56): Xaa in position 56 is Cys, Phe, Ala, Thr, Tyr or Val
  Variant (57)..(57): Xaa in position 57 is Ser, Asn or Ala
  Variant (59)..(59): Xaa in position 59 is Gly, Ala or Asp
  Variant (61)..(61): Xaa in position 61 is Ser or Cys
  Variant (62)..(62): Xaa in position 62 is any amino acid
  Variant (64)..(66): Xaa in position 64 to 66 is any amino acid
  Variant (67)..(67): Xaa in position 67 is Arg, Asn, Lys, Leu or Glu
  Variant (69)..(70): Xaa in position 69 to 70 is any amino acid
  Variant (71)..(71): Xaa in position 71 is Val or Ile

SEQ ID NO: 29718 - protein, 41 aa, Artificial sequence; identical to SEQ ID NO: 2887
  Consensus
  Variant (2)..(2): Xaa in position 2 is any amino acid
  Variant (4)..(4): Xaa in position 4 is Ile, Leu, Val, Ala or Met
  Variant (7)..(7): Xaa in position 7 is His, Asn, Phe or Tyr
  Variant (8)..(8): Xaa in position 8 is Leu or Ile
  Variant (9)..(10): Xaa in position 9 to 10 is any amino acid
  Variant (12)..(12): Xaa in position 12 is any amino acid
  Variant (14)..(19): Xaa in position 14 to 19 is any amino acid
  Variant (20)..(30): Xaa in position 20 to 30 is any or no amino acid
  Variant (32)..(32): Xaa in position 32 is any amino acid
  Variant (34)..(34): Xaa in position 34 is Ile or Val
  Variant (37)..(37): Xaa in position 37 is Ala, Pro, Gly, Lys, Ser or Glu
  Variant (39)..(39): Xaa in position 39 is Ile, Leu or Val
  Variant (40)..(40): Xaa in position 40 is any amino acid
  Variant (41)..(41): Xaa in position 41 is Trp, Ile, Leu or Phe

SEQ ID NO: 29719 - DNA, 627 bp, Escherichia coli K12; identical to SEQ ID NO: 20534
  CDS (1)..(627): transl_table=11

SEQ ID NO: 29720 - protein, 208 aa, Escherichia coli K12; identical to SEQ ID NO: 20535

SEQ ID NO: 29721 - DNA, 519 bp, Archaeoglobus fulgidus DSM 4304; identical to SEQ ID NO: 20536
  CDS (1)..(519): transl_table=11

SEQ ID NO: 29722 - protein, 172 aa, Archaeoglobus fulgidus DSM 4304; identical to SEQ ID NO: 20537

SEQ ID NO: 29723 - DNA, 561 bp, Pyrococcus abyssi GE5; identical to SEQ ID NO: 20538
  CDS (1)..(561): transl_table=11

SEQ ID NO: 29724 - protein, 186 aa, Pyrococcus abyssi GE5; identical to SEQ ID NO: 20539

SEQ ID NO: 29725 - DNA, 621 bp, Vibrio cholerae O1 biovar eltor str. N16961; identical to SEQ ID NO: 20540
  CDS (1)..(621): transl_table=11

SEQ ID NO: 29726 - protein, 206 aa, Vibrio cholerae O1 biovar eltor str. N16961; identical to SEQ ID NO: 20541

SEQ ID NO: 29727 - DNA, 588 bp, Methanothermobacter thermautotrophicus str. Delta H; identical to SEQ ID NO: 20542
  CDS (1)..(588): transl_table=11

SEQ ID NO: 29728 - protein, 195 aa, Methanothermobacter thermautotrophicus str. Delta H; identical to SEQ ID NO: 20543

SEQ ID NO: 29729 - DNA, 678 bp, Halobacterium sp. NRC-1; identical to SEQ ID NO: 20544
  CDS (1)..(678): transl_table=11

SEQ ID NO: 29730 - protein, 225 aa, Halobacterium sp. NRC-1; identical to SEQ ID NO: 20545

SEQ ID NO: 29731 - DNA, 612 bp, Sinorhizobium meliloti 1021; identical to SEQ ID NO: 20546
  CDS (1)..(612): transl_table=11

SEQ ID NO: 29732 - protein, 203 aa, Sinorhizobium meliloti 1021; identical to SEQ ID NO: 20547

SEQ ID NO: 29733 - DNA, 588 bp, Clostridium perfringens str. 13; identical to SEQ ID NO: 20548
  CDS (1)..(588): transl_table=11

SEQ ID NO: 29734 - protein, 195 aa, Clostridium perfringens str. 13; identical to SEQ ID NO: 20549

SEQ ID NO: 29735 - DNA, 564 bp, Pyrococcus furiosus DSM 3638; identical to SEQ ID NO: 20550
  CDS (1)..(564): transl_table=11

SEQ ID NO: 29736 - protein, 187 aa, Pyrococcus furiosus DSM 3638; identical to SEQ ID NO: 20551

SEQ ID NO: 29737 - DNA, 585 bp, Methanosarcina acetivorans C2A; identical to SEQ ID NO: 20552
  CDS (1)..(585): transl_table=11

SEQ ID NO: 29738 - protein, 194 aa, Methanosarcina acetivorans C2A; identical to SEQ ID NO: 20553

SEQ ID NO: 29739 - DNA, 618 bp, Streptomyces coelicolor A3(2); identical to SEQ ID NO: 20554
  CDS (1)..(618): transl_table=11

SEQ ID NO: 29740 - protein, 205 aa, Streptomyces coelicolor A3(2); identical to SEQ ID NO: 20555

SEQ ID NO: 29741 - DNA, 612 bp, Vibrio parahaemolyticus RIMD 2210633; identical to SEQ ID NO: 20556
  CDS (1)..(612): transl_table=11

SEQ ID NO: 29742 - protein, 203 aa, Vibrio parahaemolyticus RIMD 2210633; identical to SEQ ID NO: 20557

SEQ ID NO: 29743 - DNA, 678 bp, Vibrio vulnificus YJ016; identical to SEQ ID NO: 20558
  CDS (1)..(678): transl_table=11

SEQ ID NO: 29744 - protein, 225 aa, Vibrio vulnificus YJ016; identical to SEQ ID NO: 20559

SEQ ID NO: 29745 - DNA, 774 bp, Thermus thermophilus HB27; identical to SEQ ID NO: 20560
  CDS (1)..(774): transl_table=11

SEQ ID NO: 29746 - protein, 257 aa, Thermus thermophilus HB27; identical to SEQ ID NO: 20561

SEQ ID NO: 29747 - DNA, 618 bp, Desulfotalea psychrophila LSv54; identical to SEQ ID NO: 20562
  CDS (1)..(618): transl_table=11

SEQ ID NO: 29748 - protein, 205 aa, Desulfotalea psychrophila LSv54; identical to SEQ ID NO: 20563

SEQ ID NO: 29749 - DNA, 597 bp, Legionella pneumophila subsp. pneumophila str. Philadelphia 1; identical to SEQ ID NO: 20564
  CDS (1)..(597): transl_table=11

SEQ ID NO: 29750 - protein, 198 aa, Legionella pneumophila subsp. pneumophila str. Philadelphia 1; identical to SEQ ID NO: 20565

SEQ ID NO: 29751 - DNA, 588 bp, Legionella pneumophila subsp. pneumophila str. Philadelphia 1; identical to SEQ ID NO: 20566
  CDS (1)..(588): transl_table=11

SEQ ID NO: 29752 - protein, 195 aa, Legionella pneumophila subsp. pneumophila str. Philadelphia 1; identical to SEQ ID NO: 20567

SEQ ID NO: 29753 - DNA, 657 bp, Nocardia farcinica IFM 10152; identical to SEQ ID NO: 20568
  CDS (1)..(657): transl_table=11

SEQ ID NO: 29754 - protein, 218 aa, Nocardia farcinica IFM 10152; identical to SEQ ID NO: 20569

SEQ ID NO: 29755 - DNA, 597 bp, Legionella pneumophila str. Paris; identical to SEQ ID NO: 20570
  CDS (1)..(597): transl_table=11

SEQ ID NO: 29756 - protein, 198 aa, Legionella pneumophila str. Paris; identical to SEQ ID NO: 20571

SEQ ID NO: 29757 - DNA, 597 bp, Legionella pneumophila str. Lens; identical to SEQ ID NO: 20572
  CDS (1)..(597): transl_table=11

SEQ ID NO: 29758 - protein, 198 aa, Legionella pneumophila str. Lens; identical to SEQ ID NO: 20573

SEQ ID NO: 29759 - DNA, 630 bp, Photobacterium profundum SS9; identical to SEQ ID NO: 20574
  CDS (1)..(630): transl_table=11

SEQ ID NO: 29760 - protein, 209 aa, Photobacterium profundum SS9; identical to SEQ ID NO: 20575

SEQ ID NO: 29761 - DNA, 774 bp, Thermus thermophilus HB8; identical to SEQ ID NO: 20576
  CDS (1)..(774): transl_table=11

SEQ ID NO: 29762 - protein, 257 aa, Thermus thermophilus HB8; identical to SEQ ID NO: 20577

SEQ ID NO: 29763 - DNA, 639 bp, Idiomarina loihiensis L2TR; identical to SEQ ID NO: 20578
  CDS (1)..(639): transl_table=11

SEQ ID NO: 29764 - protein, 212 aa, Idiomarina loihiensis L2TR; identical to SEQ ID NO: 20579

SEQ ID NO: 29765 - DNA, 600 bp, Francisella tularensis subsp. tularensis SCHU S4; identical to SEQ ID NO: 20580
  CDS (1)..(600): transl_table=11

SEQ ID NO: 29766 - protein, 199 aa, Francisella tularensis subsp. tularensis SCHU S4; identical to SEQ ID NO: 20581

SEQ ID NO: 29767 - DNA, 783 bp, Ehrlichia ruminantium str. Welgevonden; identical to SEQ ID NO: 20582
  CDS (1)..(783): transl_table=11

SEQ ID NO: 29768 - protein, 260 aa, Ehrlichia ruminantium str. Welgevonden; identical to SEQ ID NO: 20583

SEQ ID NO: 29769 - DNA, 570 bp, Thermococcus kodakarensis KOD1; identical to SEQ ID NO: 20584
  CDS (1)..(570): transl_table=11

SEQ ID NO: 29770 - protein, 189 aa, Thermococcus kodakarensis KOD1; identical to SEQ ID NO: 20585

SEQ ID NO: 29771 - DNA, 783 bp, Ehrlichia ruminantium str. Gardel; identical to SEQ ID NO: 20586
  CDS (1)..(783): transl_table=11

SEQ ID NO: 29772 - protein, 260 aa, Ehrlichia ruminantium str. Gardel; identical to SEQ ID NO: 20587

SEQ ID NO: 29773 - DNA, 609 bp, Vibrio fischeri ES114; identical to SEQ ID NO: 20588
  CDS (1)..(609): transl_table=11

SEQ ID NO: 29774 - protein, 202 aa, Vibrio fischeri ES114; identical to SEQ ID NO: 20589

SEQ ID NO: 29775 - DNA, 666 bp, Corynebacterium jeikeium K411; identical to SEQ ID NO: 20590
  CDS (1)..(666): transl_table=11

SEQ ID NO: 29776 - protein, 221 aa, Corynebacterium jeikeium K411; identical to SEQ ID NO: 20591

SEQ ID NO: 29777 - DNA, 678 bp, Thermobifida fusca YX; identical to SEQ ID NO: 20592
  CDS (1)..(678): transl_table=11

SEQ ID NO: 29778 - protein, 225 aa, Thermobifida fusca YX; identical to SEQ ID NO: 20593

SEQ ID NO: 29779 - DNA, 780 bp, Ehrlichia canis str. Jake; identical to SEQ ID NO: 20594
  CDS (1)..(780): transl_table=11

SEQ ID NO: 29780 - protein, 259 aa, Ehrlichia canis str. Jake; identical to SEQ ID NO: 20595

SEQ ID NO: 29781 - DNA, 534 bp, Methanosarcina barkeri str. fusaro; identical to SEQ ID NO: 20596
  CDS (1)..(534): transl_table=11

SEQ ID NO: 29782 - protein, 177 aa, Methanosarcina barkeri str. fusaro; identical to SEQ ID NO: 20597

SEQ ID NO: 29783 - DNA, 582 bp, Dehalococcoides sp. CBDB1; identical to SEQ ID NO: 20598
  CDS (1)..(582): transl_table=11

SEQ ID NO: 29784 - protein, 193 aa, Dehalococcoides sp. CBDB1; identical to SEQ ID NO: 20599

SEQ ID NO: 29785 - DNA, 609 bp, Rhodobacter sphaeroides 2.4.1; identical to SEQ ID NO: 20600
  CDS (1)..(609)

SEQ ID NO: 29786 - protein, 202 aa, Rhodobacter sphaeroides 2.4.1; identical to SEQ ID NO: 20601

SEQ ID NO: 29787 - DNA, 795 bp, Magnetospirillum magnetotacticum MS-1; identical to SEQ ID NO: 20602
  CDS (1)..(795)

SEQ ID NO: 29788 - protein, 264 aa, Magnetospirillum magnetotacticum MS-1; identical to SEQ ID NO: 20603

SEQ ID NO: 29789 - DNA, 795 bp, Deinococcus geothermalis DSM 11300; identical to SEQ ID NO: 20604
  CDS (1)..(795): transl_table=11

SEQ ID NO: 29790 - protein, 264 aa, Deinococcus geothermalis DSM 11300; identical to SEQ ID NO: 20605

SEQ ID NO: 29791 - DNA, 900 bp, Anaeromyxobacter dehalogenans 2CP-C; identical to SEQ ID NO: 20606
  CDS (1)..(900): transl_table=11

SEQ ID NO: 29792 - protein, 299 aa, Anaeromyxobacter dehalogenans 2CP-C; identical to SEQ ID NO: 20607

SEQ ID NO: 29793 - DNA, 645 bp, Chromohalobacter salexigens DSM 3043; identical to SEQ ID NO: 20608
  CDS (1)..(645): transl_table=11

SEQ ID NO: 29794 - protein, 214 aa, Chromohalobacter salexigens DSM 3043; identical to SEQ ID NO: 20609

SEQ ID NO: 29795 - DNA, 663 bp, Solibacter usitatus Ellin6076; identical to SEQ ID NO: 20610
  CDS (1)..(663): transl_table=11

SEQ ID NO: 29796 - protein, 220 aa, Solibacter usitatus Ellin6076; identical to SEQ ID NO: 20611

SEQ ID NO: 29797 - DNA, 582 bp, Exiguobacterium sp. 255-15; identical to SEQ ID NO: 20612
  CDS (1)..(582): transl_table=11

SEQ ID NO: 29798 - protein, 193 aa, Exiguobacterium sp. 255-15; identical to SEQ ID NO: 20613

SEQ ID NO: 29799 - DNA, 777 bp, Ehrlichia chaffeensis str. Sapulpa; identical to SEQ ID NO: 20614
  CDS (1)..(777): transl_table=11

SEQ ID NO: 29800 - protein, 258 aa, Ehrlichia chaffeensis str. Sapulpa; identical to SEQ ID NO: 20615

SEQ ID NO: 29801 - DNA, 612 bp, Jannaschia sp. CCS1; identical to SEQ ID NO: 20616
  CDS (1)..(612): transl_table=11

SEQ ID NO: 29802 - protein, 203 aa, Jannaschia sp. CCS1; identical to SEQ ID NO: 20617

SEQ ID NO: 29803 - DNA, 603 bp, Sphingopyxis alaskensis RB2256; identical to SEQ ID NO: 20618
  CDS (1)..(603): transl_table=11

SEQ ID NO: 29804 - protein, 200 aa, Sphingopyxis alaskensis RB2256; identical to SEQ ID NO: 20619

SEQ ID NO: 29805 - DNA, 561 bp, Mesorhizobium sp. BNC1; identical to SEQ ID NO: 20620
  CDS (1)..(561): transl_table=11

SEQ ID NO: 29806 - protein, 186 aa, Mesorhizobium sp. BNC1; identical to SEQ ID NO: 20621

SEQ ID NO: 29807 - DNA, 609 bp, Silicibacter sp. TM1040; identical to SEQ ID NO: 20622
  CDS (1)..(609): transl_table=11

SEQ ID NO: 29808 - protein, 202 aa, Silicibacter sp. TM1040; identical to SEQ ID NO: 20623

SEQ ID NO: 29809 - DNA, 666 bp, Shewanella frigidimarina NCIMB 400; identical to SEQ ID NO: 20624
  CDS (1)..(666): transl_table=11

SEQ ID NO: 29810 - protein, 221 aa, Shewanella frigidimarina NCIMB 400; identical to SEQ ID NO: 20625

SEQ ID NO: 29811 - DNA, 660 bp, Psychrobacter cryohalolentis K5; identical to SEQ ID NO: 20626
  CDS (1)..(660): transl_table=11

SEQ ID NO: 29812 - protein, 219 aa, Psychrobacter cryohalolentis K5; identical to SEQ ID NO: 20627

SEQ ID NO: 29813 - DNA, 648 bp, Nocardioides sp. JS614; identical to SEQ ID NO: 20628
  CDS (1)..(648): transl_table=11

SEQ ID NO: 29814 - protein, 215 aa, Nocardioides sp. JS614; identical to SEQ ID NO: 20629

SEQ ID NO: 29815 - DNA, 732 bp, uncultured archaeon GZfos19C7; identical to SEQ ID NO: 20630
  CDS (1)..(732)

SEQ ID NO: 29816 - protein, 243 aa, uncultured archaeon GZfos19C7; identical to SEQ ID NO: 20631

SEQ ID NO: 29817 - DNA, 591 bp, Aquifex aeolicus; identical to SEQ ID NO: 20632
  CDS (1)..(591): transl_table=11

SEQ ID NO: 29818 - protein, 196 aa, Aquifex aeolicus; identical to SEQ ID NO: 20633

SEQ ID NO: 29819 - DNA, 567 bp, Pyrococcus horikoshii; identical to SEQ ID NO: 20634
  CDS (1)..(567): transl_table=11

SEQ ID NO: 29820 - protein, 188 aa, Pyrococcus horikoshii; identical to SEQ ID NO: 20635

SEQ ID NO: 29821 - DNA, 22 bp, Artificial sequence
  Primer sequence
atgcctgtgctagaccgccatc

SEQ ID NO: 29822 - DNA, 22 bp, Artificial sequence
  Primer sequence
ttactgacgctggagcgacttc

SEQ ID NO: 29823 - protein, 219 aa, Artificial sequence; identical to SEQ ID NO: 20638
  Consensus
  Variant (2)..(5): Xaa in position 2 to 5 is any amino acid
  Variant (9)..(14): Xaa in position 9 to 14 is any amino acid
  Variant (16)..(16): Xaa in position 16 is any amino acid
  Variant (18)..(27): Xaa in position 18 to 27 is any amino acid
  Variant (28)..(31): Xaa in position 28 to 31 is any or no amino acid
  Variant (33)..(35): Xaa in position 33 to 35 is any amino acid
  Variant (37)..(37): Xaa in position 37 is any amino acid
  Variant (39)..(42): Xaa in position 39 to 42 is any amino acid
  Variant (44)..(44): Xaa in position 44 is any amino acid
  Variant (48)..(48): Xaa in position 48 is any amino acid
  Variant (52)..(55): Xaa in position 52 to 55 is any amino acid
  Variant (56)..(58): Xaa in position 56 to 58 is any or no amino acid
  Variant (60)..(61): Xaa in position 60 to 61 is any amino acid
  Variant (63)..(64): Xaa in position 63 to 64 is any amino acid
  Variant (67)..(69): Xaa in position 67 to 69 is any amino acid
  Variant (71)..(79): Xaa in position 71 to 79 is any amino acid
  Variant (81)..(90): Xaa in position 81 to 90 is any amino acid
  Variant (91)..(102): Xaa in position 91 to 102 is any or no amino acid
  Variant (104)..(127): Xaa in position 104 to 127 is any amino acid
  Variant (128)..(161): Xaa in position 128 to 161 is any or no amino acid
  Variant (163)..(163): Xaa in position 163 is any amino acid
  Variant (165)..(166): Xaa in position 165 to 166 is any amino acid
  Variant (168)..(194): Xaa in position 168 to 194 is any amino acid
  Variant (195)..(214): Xaa in position 195 to 214 is any or no amino acid
  Variant (216)..(218): Xaa in position 216 to 218 is any amino acid

SEQ ID NO: 29824 - protein, 9 aa, Artificial sequence
  Consensus
  Variant (2)..(2): Xaa in position 2 is Ala, Gly, Asn, Ser, Thr or Val
  Variant (3)..(3): Xaa in position 3 is any amino acid
  Variant (6)..(6): Xaa in position 6 is any amino acid
  Variant (7)..(7): Xaa in position 7 is Ile, Leu, Met or Val
DXXDGXXAR

SEQ ID NO: 29825 - protein, 9 aa, Artificial sequence
  Consensus
  Variant (2)..(2): Xaa in position 2 is Ala, Gly or Thr
  Variant (3)..(3): Xaa in position 3 is any amino acid
  Variant (6)..(8): Xaa in position 6 to 8 is any amino acid
GXXLDXXXD

SEQ ID NO: 29826 - DNA, 785 bp, Escherichia coli K12; identical to SEQ ID NO: 3693
  CDS (86)..(781)

SEQ ID NO: 29827 - protein, 231 aa, Escherichia coli K12; identical to SEQ ID NO: 3694

SEQ ID NO: 29828 - DNA, 1005 bp, Nostoc sp. PCC 7120; identical to SEQ ID NO: 3695
  CDS (1)..(1005)

SEQ ID NO: 29829 - protein, 334 aa, Nostoc sp. PCC 7120; identical to SEQ ID NO: 3696

SEQ ID NO: 29830 - DNA, 642 bp, Salmonella enterica subsp. enterica serovar Typhi; identical to SEQ ID NO: 3697
  CDS (1)..(642)

SEQ ID NO: 29831 - protein, 213 aa, Salmonella enterica subsp. enterica serovar Typhi; identical to SEQ ID NO: 3698

SEQ ID NO: 29832 - DNA, 942 bp, Nostoc sp. PCC 7120; identical to SEQ ID NO: 3699
  CDS (1)..(942)

SEQ ID NO: 29833 - protein, 313 aa, Nostoc sp. PCC 7120; identical to SEQ ID NO: 3700

SEQ ID NO: 29834 - DNA, 642 bp, Yersinia pestis; identical to SEQ ID NO: 3701
  CDS (1)..(642)

SEQ ID NO: 29835 - protein, 213 aa, Yersinia pestis; identical to SEQ ID NO: 3702

SEQ ID NO: 29836 - DNA, 1668 bp, Thermotoga maritima; identical to SEQ ID NO: 3703
  CDS (1)..(1668)

SEQ ID NO: 29837 - protein, 555 aa, Thermotoga maritima; identical to SEQ ID NO: 3704

SEQ ID NO: 29838 - DNA, 2056 bp, Arabidopsis thaliana (mouse-ear cress); identical to SEQ ID NO: 3705
  CDS (1)..(2025)

SEQ ID NO: 29839 - protein, 674 aa, Arabidopsis thaliana (mouse-ear cress); identical to SEQ ID NO: 3706

SEQ ID NO: 29840 - DNA, 624 bp, Staphylococcus aureus; identical to SEQ ID NO: 3707
  CDS (1)..(624)

SEQ ID NO: 29841 - protein, 207 aa, Staphylococcus aureus; identical to SEQ ID NO: 3708

SEQ ID NO: 29842 - DNA, 639 bp, Streptococcus pneumoniae; identical to SEQ ID NO: 3709
  CDS (1)..(639)

SEQ ID NO: 29843 - protein, 212 aa, Streptococcus pneumoniae; identical to SEQ ID NO: 3710

SEQ ID NO: 29844 - DNA, 642 bp, Mycoplasma genitalium; identical to SEQ ID NO: 3711
  CDS (1)..(642): transl_table=4

SEQ ID NO: 29845 - protein, 213 aa, Mycoplasma genitalium; identical to SEQ ID NO: 3712

SEQ ID NO: 29846 - DNA, 636 bp, Bacillus halodurans; identical to SEQ ID NO: 3713
  CDS (1)..(636)

SEQ ID NO: 29847 - protein, 211 aa, Bacillus halodurans; identical to SEQ ID NO: 3714

SEQ ID NO: 29848 - DNA, 1668 bp, Treponema pallidum subsp. pallidum (syphilis spirochete); identical to SEQ ID NO: 3715
  CDS (1)..(1668)

SEQ ID NO: 29849 - protein, 555 aa, Treponema pallidum subsp. pallidum (syphilis spirochete); identical to SEQ ID NO: 3716

SEQ ID NO: 29850 - DNA, 669 bp, Chlamydophila pneumoniae, Chlamydia pneumoniae; identical to SEQ ID NO: 3717
  CDS (1)..(669)

SEQ ID NO: 29851 - protein, 222 aa, Chlamydophila pneumoniae, Chlamydia pneumoniae; identical to SEQ ID NO: 3718

SEQ ID NO: 29852 - DNA, 621 bp, Lactococcus lactis subsp. lactis; identical to SEQ ID NO: 3719
  CDS (1)..(621)

SEQ ID NO: 29853 - protein, 206 aa, Lactococcus lactis subsp. lactis; identical to SEQ ID NO: 3720

SEQ ID NO: 29854 - DNA, 633 bp, Deinococcus radiodurans; identical to SEQ ID NO: 3721
  CDS (1)..(633)

SEQ ID NO: 29855 - protein, 210 aa, Deinococcus radiodurans; identical to SEQ ID NO: 3722

SEQ ID NO: 29856 - DNA, 1932 bp, Arabidopsis thaliana (mouse-ear cress); identical to SEQ ID NO: 3723
  CDS (1)..(1932)

SEQ ID NO: 29857 - protein, 643 aa, Arabidopsis thaliana (mouse-ear cress); identical to SEQ ID NO: 3724

SEQ ID NO: 29858 - DNA, 636 bp, Bacillus subtilis; identical to SEQ ID NO: 3725
  CDS (1)..(636)

SEQ ID NO: 29859 - protein, 211 aa, Bacillus subtilis; identical to SEQ ID NO: 3726

SEQ ID NO: 29860 - DNA, 624 bp, Borrelia burgdorferi (Lyme disease spirochete); identical to SEQ ID NO: 3727
  CDS (1)..(624)

SEQ ID NO: 29861 - protein, 207 aa, Borrelia burgdorferi (Lyme disease spirochete); identical to SEQ ID NO: 3728

SEQ ID NO: 29862 - DNA, 624 bp, Ureaplasma urealyticum; identical to SEQ ID NO: 3729
  CDS (1)..(624): transl_table=4

SEQ ID NO: 29863 - protein, 207 aa, Ureaplasma urealyticum; identical to SEQ ID NO: 3730

SEQ ID NO: 29864 - DNA, 642 bp, Haemophilus influenzae; identical to SEQ ID NO: 3731
  CDS (1)..(642)

SEQ ID NO: 29865 - protein, 213 aa, Haemophilus influenzae; identical to SEQ ID NO: 3732

SEQ ID NO: 29866 - DNA, 1470 bp, Spinacia oleracea (spinach); identical to SEQ ID NO: 3733
  CDS (49)..(1257)

SEQ ID NO: 29867 - protein, 402 aa, Spinacia oleracea (spinach); identical to SEQ ID NO: 3734

SEQ ID NO: 29868 - DNA, 1533 bp, Triticum sp. (wheat); identical to SEQ ID NO: 3735
  CDS (65)..(1279)

SEQ ID NO: 29869 - protein, 404 aa, Triticum sp. (wheat); identical to SEQ ID NO: 3736

SEQ ID NO: 29870 - DNA, 1240 bp, Arabidopsis thaliana (mouse-ear cress); identical to SEQ ID NO: 3737
  CDS (1)..(1188)

SEQ ID NO: 29871 - protein, 395 aa, Arabidopsis thaliana (mouse-ear cress); identical to SEQ ID NO: 3738

SEQ ID NO: 29872 - DNA, 2077 bp, Saccharomyces cerevisiae; identical to SEQ ID NO: 3739
  CDS (482)..(1987)

SEQ ID NO: 29873 - protein, 501 aa, Saccharomyces cerevisiae; identical to SEQ ID NO: 3740

SEQ ID NO: 29874 - DNA, 642 bp, Mycoplasma pneumoniae; identical to SEQ ID NO: 3741
  CDS (1)..(642): transl_table=4

SEQ ID NO: 29875 - protein, 213 aa, Mycoplasma pneumoniae; identical to SEQ ID NO: 3742

SEQ ID NO: 29876 - DNA, 1245 bp, Chlamydomonas reinhardtii; identical to SEQ ID NO: 3743
  CDS (28)..(1155)

SEQ ID NO: 29877 - protein, 375 aa, Chlamydomonas reinhardtii; identical to SEQ ID NO: 3744

SEQ ID NO: 29878 - DNA, 1520 bp, Mesembryanthemum crystallinum (common ice plant); identical to SEQ ID NO: 3745
  CDS (127)..(1320)

SEQ ID NO: 29879 - protein, 397 aa, Mesembryanthemum crystallinum (common ice plant); identical to SEQ ID NO: 3746

SEQ ID NO: 29880 - DNA, 690 bp, Caenorhabditis elegans; identical to SEQ ID NO: 3747
  CDS (1)..(690)

SEQ ID NO: 29881 - protein, 229 aa, Caenorhabditis elegans; identical to SEQ ID NO: 3748

SEQ ID NO: 29882 - DNA, 1668 bp, Caenorhabditis elegans; identical to SEQ ID NO: 3749
  CDS (1)..(1668)

SEQ ID NO: 29883 - protein, 555 aa, Caenorhabditis elegans; identical to SEQ ID NO: 3750

SEQ ID NO: 29884 - DNA, 1365 bp, Schizosaccharomyces pombe; identical to SEQ ID NO: 3751
  CDS (1)..(1365)

SEQ ID NO: 29885 - protein, 454 aa, Schizosaccharomyces pombe; identical to SEQ ID NO: 3752

SEQ ID NO: 29886 - DNA, 1647 bp, Homo sapiens; identical to SEQ ID NO: 3753
  CDS (1)..(1647)

SEQ ID NO: 29887 - protein, 548 aa, Homo sapiens; identical to SEQ ID NO: 3754

SEQ ID NO: 29888 - DNA, 738 bp, Debaryomyces hansenii; identical to SEQ ID NO: 3755
  CDS (1)..(738)

SEQ ID NO: 29889 - protein, 245 aa, Debaryomyces hansenii; identical to SEQ ID NO: 3756

SEQ ID NO: 29890 - DNA, 1521 bp, Debaryomyces hansenii; identical to SEQ ID NO: 3757
  CDS (1)..(1521)

SEQ ID NO: 29891 - protein, 506 aa, Debaryomyces hansenii; identical to SEQ ID NO: 3758

SEQ ID NO: 29892 - DNA, 1353 bp, Yarrowia lipolytica; identical to SEQ ID NO: 3759
  CDS (1)..(1353)

SEQ ID NO: 29893 - protein, 450 aa, Yarrowia lipolytica; identical to SEQ ID NO: 3760

SEQ ID NO: 29894 - DNA, 1380 bp, Kluyveromyces lactis; identical to SEQ ID NO: 3761
  CDS (1)..(1380)

SEQ ID NO: 29895 - protein, 459 aa, Kluyveromyces lactis; identical to SEQ ID NO: 3762

SEQ ID NO: 29896 - DNA, 642 bp, Erwinia carotovora subsp; identical to SEQ ID NO: 3763
  CDS (1)..(642)

SEQ ID NO: 29897 - protein, 213 aa, Erwinia carotovora subsp; identical to SEQ ID NO: 3764

SEQ ID NO: 29898 - DNA, 627 bp, Mesoplasma florum L1; identical to SEQ ID NO: 3765
  CDS (1)..(627)

SEQ ID NO: 29899 - protein, 208 aa, Mesoplasma florum L1; identical to SEQ ID NO: 3766

SEQ ID NO: 29900 - DNA, 1431 bp, Candida glabrata; identical to SEQ ID NO: 3767
  CDS (1)..(1431)

SEQ ID NO: 29901 - protein, 476 aa, Candida glabrata; identical to SEQ ID NO: 3768

SEQ ID NO: 29902 - DNA, 639 bp, Bacillus thuringiensis serovar konkukian str; identical to SEQ ID NO: 3769
  CDS (1)..(639)

SEQ ID NO: 29903 - protein, 212 aa, Bacillus thuringiensis serovar konkukian str; identical to SEQ ID NO: 3770

SEQ ID NO: 29904 - DNA, 834 bp, Homo sapiens; identical to SEQ ID NO: 3771
  CDS (1)..(834)

SEQ ID NO: 29905 - protein, 277 aa, Homo sapiens [sequence omitted]

SEQ ID NO: 29906 - DNA, 1965 bp, Oryza sativa; identical to SEQ ID NO: 3773
  CDS (257)..(1726)

SEQ ID NO: 29907 - protein, 489 aa, Oryza sativa; identical to SEQ ID NO: 3774

SEQ ID NO: 29908 - DNA, 747 bp, Photobacterium profundum; identical to SEQ ID NO: 3775
  CDS (1)..(747)

SEQ ID NO: 29909 - protein, 248 aa, Photobacterium profundum; identical to SEQ ID NO: 3776

SEQ ID NO: 29910 - DNA, 621 bp, Bdellovibrio bacteriovorus; identical to SEQ ID NO: 3777
  CDS (1)..(621)

SEQ ID NO: 29911 - protein, 206 aa, Bdellovibrio bacteriovorus; identical to SEQ ID NO: 3778

SEQ ID NO: 29912 - DNA, 624 bp, Bdellovibrio bacteriovorus; identical to SEQ ID NO: 3779
  CDS (1)..(624)

SEQ ID NO: 29913 - protein, 207 aa, Bdellovibrio bacteriovorus; identical to SEQ ID NO: 3780

SEQ ID NO: 29914 - DNA, 618 bp, Mycoplasma mycoides; identical to SEQ ID NO: 3781
  CDS (1)..(618)

SEQ ID NO: 29915 - protein, 205 aa, Mycoplasma mycoides; identical to SEQ ID NO: 3782

SEQ ID NO: 29916 - DNA, 2638 bp, Oryza sativa; identical to SEQ ID NO: 3783
  CDS (248)..(2206)

SEQ ID NO: 29917 - protein, 652 aa, Oryza sativa; identical to SEQ ID NO: 3784

SEQ ID NO: 29918 - DNA, 1494 bp, Oryza sativa; identical to SEQ ID NO: 3785
  CDS (20)..(1231)

SEQ ID NO: 29919 - protein, 403 aa, Oryza sativa; identical to SEQ ID NO: 3786

SEQ ID NO: 29920 - DNA, 1824 bp, Homo sapiens; identical to SEQ ID NO: 3787
  CDS (45)..(1232)

SEQ ID NO: 29921 - protein, 395 aa, Homo sapiens [sequence omitted]

SEQ ID NO: 29922 - DNA, 630 bp, Listeria monocytogenes; identical to SEQ ID NO: 3789
  CDS (1)..(630)

SEQ ID NO: 29923 - protein, 209 aa, Listeria monocytogenes; identical to SEQ ID NO: 3790

SEQ ID NO: 29924 - DNA, 636 bp, Thermus thermophilus; identical to SEQ ID NO: 3791
  CDS (1)..(636)

SEQ ID NO: 29925 - protein, 211 aa, Thermus thermophilus; identical to SEQ ID NO: 3792

SEQ ID NO: 29926 - DNA, 1653 bp, Treponema denticola; identical to SEQ ID NO: 3793
  CDS (1)..(1653)

SEQ ID NO: 29927 - protein, 550 aa, Treponema denticola; identical to SEQ ID NO: 3794

SEQ ID NO: 29928 - DNA, 636 bp, Lactobacillus johnsonii; identical to SEQ ID NO: 3795
  CDS (1)..(636)

SEQ ID NO: 29929 - protein, 211 aa, Lactobacillus johnsonii; identical to SEQ ID NO: 3796

SEQ ID NO: 29930 - DNA, 1497 bp, Ashbya gossypii; identical to SEQ ID NO: 3797
  CDS (1)..(1497)

SEQ ID NO: 29931 - protein, 498 aa, Ashbya gossypii; identical to SEQ ID NO: 3798

SEQ ID NO: 29932 - DNA, 651 bp, Vibrio vulnificus; identical to SEQ ID NO: 3799
  CDS (1)..(651)

SEQ ID NO: 29933 - protein, 216 aa, Vibrio vulnificus; identical to SEQ ID NO: 3800

SEQ ID NO: 29934 - DNA, 630 bp, Porphyromonas gingivalis; identical to SEQ ID NO: 3801
  CDS (1)..(630)

SEQ ID NO: 29935 - protein, 209 aa, Porphyromonas gingivalis; identical to SEQ ID NO: 3802

SEQ ID NO: 29936 - DNA, 642 bp, Photorhabdus luminescens; identical to SEQ ID NO: 3803
  CDS (1)..(642)

SEQ ID NO: 29937 - protein, 213 aa, Photorhabdus luminescens; identical to SEQ ID NO: 3804

SEQ ID NO: 29938 - DNA, 645 bp, Mycoplasma gallisepticum; identical to SEQ ID NO: 3805
  CDS (1)..(645): transl_table=4

SEQ ID NO: 29939 - protein, 214 aa, Mycoplasma gallisepticum; identical to SEQ ID NO: 3806

SEQ ID NO: 29940 - DNA, 930 bp, Gloeobacter violaceus; identical to SEQ ID NO: 3807
  CDS (1)..(930)

SEQ ID NO: 29941 - protein, 309 aa, Gloeobacter violaceus; identical to SEQ ID NO: 3808

SEQ ID NO: 29942 - DNA, 996 bp, Gloeobacter violaceus; identical to SEQ ID NO: 3809
  CDS (1)..(996)

SEQ ID NO: 29943 - protein, 331 aa, Gloeobacter violaceus; identical to SEQ ID NO: 3810

SEQ ID NO: 29944 - DNA, 1038 bp, Gloeobacter violaceus; identical to SEQ ID NO: 3811
  CDS (1)..(1038)

SEQ ID NO: 29945 - protein, 345 aa, Gloeobacter violaceus; identical to SEQ ID NO: 3812

SEQ ID NO: 29946 - DNA, 615 bp, Chromobacterium violaceum; identical to SEQ ID NO: 3813
  CDS (1)..(615)

SEQ ID NO: 29947 - protein, 204 aa, Chromobacterium violaceum; identical to SEQ ID NO: 3814

SEQ ID NO: 29948 - DNA, 2049 bp, Giardia lamblia ATCC 50803; identical to SEQ ID NO: 3815
  CDS (1)..(2049)

SEQ ID NO: 29949 - protein, 682 aa, Giardia lamblia ATCC 50803; identical to SEQ ID NO: 3816

SEQ ID NO: 29950 - DNA, 1425 bp, Neurospora crassa; identical to SEQ ID NO: 3817
  CDS (1)..(1425)

SEQ ID NO: 29951 - protein, 474 aa, Neurospora crassa; identical to SEQ ID NO: 3818

SEQ ID NO: 29952 - DNA, 612 bp, Synechococcus sp; identical to SEQ ID NO: 3819
  CDS (1)..(612)

SEQ ID NO: 29953 - protein, 203 aa, Synechococcus sp; identical to SEQ ID NO: 3820

SEQ ID NO: 29954 - DNA, 654 bp, Haemophilus ducreyi; identical to SEQ ID NO: 3821
  CDS (1)..(654)

SEQ ID NO: 29955 - protein, 217 aa, Haemophilus ducreyi; identical to SEQ ID NO: 3822

SEQ ID NO: 29956 - DNA, 1609 bp, Chlorarachnion sp; identical to SEQ ID NO: 3823
  CDS (10)..(1464)

SEQ ID NO: 29957 - protein, 484 aa, Chlorarachnion sp; identical to SEQ ID NO: 3824

SEQ ID NO: 29958 - DNA, 630 bp, Enterococcus faecalis; identical to SEQ ID NO: 3825
  CDS (1)..(630)

SEQ ID NO: 29959 - protein, 209 aa, Enterococcus faecalis; identical to SEQ ID NO: 3826

SEQ ID NO: 29960 - DNA, 648 bp, Coxiella burnetii; identical to SEQ ID NO: 3827
  CDS (1)..(648)

SEQ ID NO: 29961 - protein, 215 aa, Coxiella burnetii; identical to SEQ ID NO: 3828

SEQ ID NO: 29962 - DNA, 1659 bp, Clostridium tetani; identical to SEQ ID NO: 3829
  CDS (1)..(1659)

SEQ ID NO: 29963 - protein, 552 aa, Clostridium tetani; identical to SEQ ID NO: 3830

SEQ ID NO: 29964 - DNA, 1674 bp, Bacteroides thetaiotaomicron; identical to SEQ ID NO: 3831
  CDS (1)..(1674)

SEQ ID NO: 29965 - protein, 557 aa, Bacteroides thetaiotaomicron; identical to SEQ ID NO: 3832

SEQ ID NO: 29966 - DNA, 618 bp, Bacteroides thetaiotaomicron; identical to SEQ ID NO: 3833
  CDS (1)..(618)

SEQ ID NO: 29967 - protein, 205 aa, Bacteroides thetaiotaomicron; identical to SEQ ID NO: 3834

SEQ ID NO: 29968 - DNA, 630 bp, Streptococcus agalactiae; identical to SEQ ID NO: 3835
  CDS (1)..(630)

SEQ ID NO: 29969 - protein, 209 aa, Streptococcus agalactiae; identical to SEQ ID NO: 3836

SEQ ID NO: 29970 - DNA, 1524 bp, Galdieria sulphuraria; identical to SEQ ID NO: 3837
  CDS (77)..(1423)

SEQ ID NO: 29971 - protein, 448 aa, Galdieria sulphuraria; identical to SEQ ID NO: 3838

SEQ ID NO: 29972 - DNA, 1005 bp, Synechococcus vulcanus; identical to SEQ ID NO: 3839
  CDS (1)..(1005)

SEQ ID NO: 29973 - protein, 334 aa, Synechococcus vulcanus; identical to SEQ ID NO: 3840

SEQ ID NO: 29974 - DNA, 1831 bp, Arabidopsis thaliana; identical to SEQ ID NO: 3841
  CDS (116)..(1525)

SEQ ID NO: 29975 - protein, 469 aa, Arabidopsis thaliana; identical to SEQ ID NO: 3842

SEQ ID NO: 29976 - DNA, 1875 bp, Homo sapiens; identical to SEQ ID NO: 3843
  CDS (14)..(1273)

SEQ ID NO: 29977 - protein, 419 aa, Homo sapiens; identical to SEQ ID NO: 3844

SEQ ID NO: 29978 - DNA, 1644 bp, Thermoanaerobacter tengcongensis; identical to SEQ ID NO: 3845
  CDS (1)..(1644)

SEQ ID NO: 29979 - protein, 547 aa, Thermoanaerobacter tengcongensis; identical to SEQ ID NO: 3846

SEQ ID NO: 29980 - DNA, 1665 bp, Clostridium perfringens; identical to SEQ ID NO: 3847
  CDS (1)..(1665)

SEQ ID NO: 29981 - protein, 554 aa, Clostridium perfringens; identical to SEQ ID NO: 3848

SEQ ID NO: 29982 - DNA, 1258 bp, Odontella sinensis; identical to SEQ ID NO: 3849
  CDS (23)..(1213)

SEQ ID NO: 29983 - protein, 396 aa, Odontella sinensis; identical to SEQ ID NO: 3850

SEQ ID NO: 29984 - DNA, 606 bp, Homo sapiens; identical to SEQ ID NO: 3851
  CDS (1)..(606)

SEQ ID NO: 29985 - protein, 201 aa, Homo sapiens [sequence omitted]

SEQ ID NO: 29986 - DNA, 1299 bp, Vaucheria litorea; identical to SEQ ID NO: 3853
  CDS (8)..(1225)

SEQ ID NO: 29987 - protein, 405 aa, Vaucheria litorea; identical to SEQ ID NO: 3854

SEQ ID NO: 29988 - DNA, 1711 bp, Cryptosporidium parvum; identical to SEQ ID NO: 3855
  CDS (290)..(1549)

SEQ ID NO: 29989 - protein, 419 aa, Cryptosporidium parvum; identical to SEQ ID NO: 3856

SEQ ID NO: 29990 - DNA, 1492 bp, Arabidopsis thaliana; identical to SEQ ID NO: 3857
  CDS (1)..(1461)

SEQ ID NO: 29991 - protein, 486 aa, Arabidopsis thaliana; identical to SEQ ID NO: 3858

SEQ ID NO: 29992 - DNA, 1480 bp, Dictyostelium discoideum; identical to SEQ ID NO: 3859
  CDS (1)..(1479)

SEQ ID NO: 29993 - protein, 492 aa, Dictyostelium discoideum; identical to SEQ ID NO: 3860

SEQ ID NO: 29994 - DNA, 1545 bp, Synechococcus sp; identical to SEQ ID NO: 3861
  CDS (267)..(1268)

SEQ ID NO: 29995 - protein, 333 aa, Synechococcus sp; identical to SEQ ID NO: 3862

SEQ ID NO: 29996 - DNA, 1452 bp, Arabidopsis thaliana; identical to SEQ ID NO: 3863
  CDS (1)..(1452)

SEQ ID NO: 29997 - protein, 483 aa, Arabidopsis thaliana; identical to SEQ ID NO: 3864

SEQ ID NO: 29998 - DNA, 1398 bp, Arabidopsis thaliana; identical to SEQ ID NO: 3865
  CDS (1)..(1398)

SEQ ID NO: 29999 - protein, 465 aa, Arabidopsis thaliana; identical to SEQ ID NO: 3866

SEQ ID NO: 30000 - DNA, 1856 bp, Drosophila melanogaster; identical to SEQ ID NO: 3867
  CDS (77)..(1762)

SEQ ID NO: 30001 - protein, 561 aa, Drosophila melanogaster; identical to SEQ ID NO: 3868

SEQ ID NO: 30002 - DNA, 1869 bp, Synechocystis sp; identical to SEQ ID NO: 3869
  CDS (233)..(1231)

SEQ ID NO: 30003 - protein, 332 aa, Synechocystis sp; identical to SEQ ID NO: 3870

SEQ ID NO: 30004 - DNA, 834 bp, Mus musculus; identical to SEQ ID NO: 3871
  CDS (1)..(834)

SEQ ID NO: 30005 - protein, 277 aa, Mus musculus; identical to SEQ ID NO: 3872

SEQ ID NO: 30006 - DNA, 1200 bp, Homo sapiens; identical to SEQ ID NO: 3873
  CDS (180)..(965)

SEQ ID NO: 30007 - protein, 261 aa, Homo sapiens; identical to SEQ ID NO: 3874

SEQ ID NO: 30008 - DNA, 822 bp, Drosophila melanogaster; identical to SEQ ID NO: 3875
  CDS (40)..(822)

SEQ ID NO: 30009 - protein, 260 aa, Drosophila melanogaster; identical to SEQ ID NO: 3876

SEQ ID NO: 30010 - DNA, 1823 bp, Mus musculus; identical to SEQ ID NO: 3877
  CDS (6)..(1652)

SEQ ID NO: 30011 - protein, 548 aa, Mus musculus; identical to SEQ ID NO: 3878

SEQ ID NO: 30012 - DNA, 627 bp, Clostridium perfringens; identical to SEQ ID NO: 3879
  CDS (1)..(627)

SEQ ID NO: 30013 - protein, 208 aa, Clostridium perfringens; identical to SEQ ID NO: 3880

SEQ ID NO: 30014 - DNA, 630 bp, Clostridium tetani; identical to SEQ ID NO: 3881
  CDS (1)..(630)

SEQ ID NO: 30015 - protein, 209 aa, Clostridium tetani; identical to SEQ ID NO: 3882

SEQ ID NO: 30016 - DNA, 678 bp, Halobacterium sp; identical to SEQ ID NO: 3883
  CDS (1)..(678)

SEQ ID NO: 30017 - protein, 225 aa, Halobacterium sp; identical to SEQ ID NO: 3884

SEQ ID NO: 30018 - DNA, 630 bp, Lactobacillus plantarum; identical to SEQ ID NO: 3885
  CDS (1)..(630)

SEQ ID NO: 30019 - protein, 209 aa, Lactobacillus plantarum; identical to SEQ ID NO: 3886

SEQ ID NO: 30020 - DNA, 633 bp, Oceanobacillus iheyensis; identical to SEQ ID NO: 3887
  CDS (1)..(633)

SEQ ID NO: 30021 - protein, 210 aa, Oceanobacillus iheyensis; identical to SEQ ID NO: 3888

SEQ ID NO: 30022 - DNA, 651 bp, Pasteurella multocida; identical to SEQ ID NO: 3889
  CDS (1)..(651)

SEQ ID NO: 30023 - protein, 216 aa, Pasteurella multocida; identical to SEQ ID NO: 3890

SEQ ID NO: 30024 - DNA, 639 bp, Shewanella oneidensis; identical to SEQ ID NO: 3891
  CDS (1)..(639)

SEQ ID NO: 30025 - protein, 212 aa, Shewanella oneidensis; identical to SEQ ID NO: 3892

SEQ ID NO: 30026 - DNA, 624 bp, Staphylococcus epidermidis; identical to SEQ ID NO: 3893
  CDS (1)..(624)

SEQ ID NO: 30027 - protein, 207 aa, Staphylococcus epidermidis; identical to SEQ ID NO: 3894

SEQ ID NO: 30028 - DNA, 627 bp, Streptococcus pyogenes; identical to SEQ ID NO: 3895
  CDS (1)..(627)

SEQ ID NO: 30029 - protein, 208 aa, Streptococcus pyogenes; identical to SEQ ID NO: 3896

SEQ ID NO: 30030 - DNA, 642 bp, Vibrio cholerae; identical to SEQ ID NO: 3897
  CDS (1)..(642)

SEQ ID NO: 30031 - protein, 213 aa, Vibrio cholerae; identical to SEQ ID NO: 3898

SEQ ID NO: 30032 - DNA, 642 bp, Vibrio parahaemolyticus; identical to SEQ ID NO: 3899
  CDS (1)..(642)

SEQ ID NO: 30033 - protein, 213 aa, Vibrio parahaemolyticus; identical to SEQ ID NO: 3900

SEQ ID NO: 30034 - DNA, 816 bp, Xenopus laevis; identical to SEQ ID NO: 3901
  CDS (1)..(816)

SEQ ID NO: 30035 - protein, 271 aa, Xenopus laevis; identical to SEQ ID NO: 3902

SEQ ID NO: 30036 - DNA, 21 bp, Artificial sequence
  Primer sequence
atggcgcttcgtcgccccctt

SEQ ID NO: 30037 - DNA, 27 bp, Artificial sequence
  Primer sequence
ttattcaaagaactgacttattttcgc

SEQ ID NO: 30038 - protein, 242 aa, Artificial sequence; identical to SEQ ID NO: 20857
  Consensus
  Variant (5)..(5): Xaa in position 5 is any amino acid
  Variant (7)..(7): Xaa in position 7 is any amino acid
  Variant (15)..(18): Xaa in position 15 to 18 is any amino acid
  Variant (20)..(26): Xaa in position 20 to 26 is any amino acid
  Variant (27)..(51): Xaa in position 27 to 51 is any or no amino acid
  Variant (54)..(55): Xaa in position 54 to 55 is any amino acid
  Variant (57)..(57): Xaa in position 57 is any amino acid
  Variant (60)..(68): Xaa in position 60 to 68 is any amino acid
  Variant (69)..(76): Xaa in position 69 to 76 is any or no amino acid
  Variant (79)..(79): Xaa in position 79 is any amino acid
  Variant (81)..(81): Xaa in position 81 is any amino acid
  Variant (83)..(83): Xaa in position 83 is any amino acid
  Variant (85)..(86): Xaa in position 85 to 86 is any amino acid
  Variant (89)..(91): Xaa in position 89 to 91 is any amino acid
  Variant (93)..(94): Xaa in position 93 to 94 is any amino acid
  Variant (96)..(97): Xaa in position 96 to 97 is any amino acid
  Variant (99)..(100): Xaa in position 99 to 100 is any amino acid
  Variant (102)..(103): Xaa in position 102 to 103 is any amino acid
  Variant (105)..(105): Xaa in position 105 is any amino acid
  Variant (107)..(114): Xaa in position 107 to 114 is any amino acid
  Variant (115)..(121): Xaa in position 115 to 121 is any or no amino acid
  Variant (123)..(123): Xaa in position 123 is any amino acid
  Variant (124)..(126): Xaa in position 124 to 126 is any or no amino acid
  Variant (134)..(140): Xaa in position 134 to 140 is any amino acid
  Variant (141)..(143): Xaa in position 141 to 143 is any or no amino acid
  Variant (145)..(151): Xaa in position 145 to 151 is any amino acid
  Variant (155)..(167): Xaa in position 155 to 167 is any or no amino acid
  Variant (169)..(171): Xaa in position 169 to 171 is any amino acid
  Variant (173)..(176): Xaa in position 173 to 176 is any amino acid
  Variant (180)..(180): Xaa in position 180 is any amino acid
  Variant (183)..(192): Xaa in position 183 to 192 is any amino acid
  Variant (193)..(195): Xaa in position 193 to 195 is any or no amino acid
  Variant (197)..(202): Xaa in position 197 to 202 is any amino acid
  Variant (206)..(209): Xaa in position 206 to 209 is any amino acid
  Variant (212)..(212): Xaa in position 212 is any amino acid
  Variant (214)..(217): Xaa in position 214 to 217 is any amino acid
  Variant (223)..(226): Xaa in position 223 to 226 is any amino acid
  Variant (227)..(232): Xaa in position 227 to 232 is any or no amino acid
  Variant (234)..(241): Xaa in position 234 to 241 is any amino acid

SEQ ID NO: 30039 - protein, 58 aa, Artificial sequence; identical to SEQ ID NO: 6166
  Consensus
  Variant (1)..(1): Xaa in position 1 is Ile, Val, Leu or Ala
  Variant (2)..(2): Xaa in position 2 is Ile, Val or Leu
  Variant (3)..(3): Xaa in position 3 is any amino acid
  Variant (4)..(4): Xaa in position 4 is Ile, Val or Leu
  Variant (5)..(5): Xaa in position 5 is any amino acid
  Variant (6)..(6): Xaa in position 6 is Gly or Ala
  Variant (7)..(7): Xaa in position 7 is any amino acid
  Variant (8)..(8): Xaa in position 8 is Ser, Thr or Ala
  Variant (9)..(9): Xaa in position 9 is Gly, Ala or Ser
  Variant (10)..(10): Xaa in position 10 is Ser, Cys, Ala or Gly
  Variant (13)..(13): Xaa in position 13 is Thr or Ser
  Variant (14)..(18): Xaa in position 14 to 18 is any amino acid
  Variant (19)..(19): Xaa in position 19 is Ile, Leu, Val or Met
  Variant (20)..(27): Xaa in position 20 to 27 is any amino acid
  Variant (28)..(52): Xaa in position 28 to 52 is any or no amino acid
  Variant (53)..(53): Xaa in position 53 is Ile, Leu or Val
  Variant (54)..(55): Xaa in position 54 to 55 is any amino acid
  Variant (57)..(57): Xaa in position 57 is any amino acid
  Variant (58)..(58): Xaa in position 58 is Tyr or Phe

SEQ ID NO: 30040 - protein, 74 aa, Artificial sequence; identical to SEQ ID NO: 6167
  Consensus
  Variant (1)..(1): Xaa in position 1 is Ala, Ser, Val, Glu or Cys
  Variant (2)..(10): Xaa in position 2 to 10 is any amino acid
  Variant (11)..(11): Xaa in position 11 is Leu, Ile, Val or Met
  Variant (12)..(13): Xaa in position 12 to 13 is any amino acid
  Variant (14)..(14): Xaa in position 14 is Leu or Ile
  Variant (15)..(19): Xaa in position 15 to 19 is any amino acid
  Variant (20)..(20): Xaa in position 20 is Val, Ile, Leu, Thr or Tyr
  Variant (21)..(22): Xaa in position 21 to 22 is any amino acid
  Variant (24)..(24): Xaa in position 24 is any amino acid
  Variant (26)..(34): Xaa in position 26 to 34 is any amino acid
  Variant (35)..(46): Xaa in position 35 to 46 is any or no amino acid
  Variant (47)..(47): Xaa in position 47 is Val, Ile or Phe
  Variant (48)..(48): Xaa in position 48 is Ile, Val, Leu or Phe
  Variant (49)..(49): Xaa in position 49 is Ile, Val or Leu
  Variant (50)..(50): Xaa in position 50 is any amino acid
  Variant (51)..(51): Xaa in position 51 is Glu or Asp
  Variant (53)..(53): Xaa in position 53 is Ile or Leu
  Variant (54)..(54): Xaa in position 54 is Leu, His, Tyr, Phe or Met
  Variant (55)..(59): Xaa in position 55 to 59 is any amino acid
  Variant (60)..(63): Xaa in position 60 to 63 is any or no amino acid
  Variant (64)..(64): Xaa in position 64 is Leu, Ile, Val or Met
  Variant (65)..(71): Xaa in position 65 to 71 is any amino acid
  Variant (72)..(72): Xaa in position 72 is Ile, Val or Leu
  Variant (73)..(73): Xaa in position 73 is Phe, Tyr or Ser
  Variant (74)..(74): Xaa in position 74 is Val, Met, Leu, Ile or Phe

SEQ ID NO: 30041 - protein, 44 aa, Artificial sequence; identical to SEQ ID NO: 6168
  Consensus
  Variant (1)..(1): Xaa in position 1 is Arg or Lys
  Variant (2)..(2): Xaa in position 2 is Ile, Val, Leu or Met
  Variant (3)..(3): Xaa in position 3 is any amino acid
  Variant (6)..(29): Xaa in position 6 to 29 is any amino acid
  Variant (30)..(32): Xaa in position 30 to 32 is any or no amino acid
  Variant (33)..(33): Xaa in position 33 is Phe, Tyr, Trp or Asn
  Variant (34)..(34): Xaa in position 34 is Ile, Val or Cys
  Variant (35)..(35): Xaa in position 35 is any amino acid
  Variant (36)..(36): Xaa in position 36 is Pro or Lys
  Variant (37)..(40): Xaa in position 37 to 40 is any amino acid
  Variant (42)..(43): Xaa in position 42 to 43 is any amino acid
  Variant (44)..(44): Xaa in position 44 is Ile, Val, Leu, Met or Lys

SEQ ID NO: 30042 - DNA, 1323 bp, Escherichia coli K12; identical to SEQ ID NO: 20861
  CDS (1)..(1323): transl_table=11

SEQ ID NO: 30043 - protein, 440 aa, Escherichia coli K12; identical to SEQ ID NO: 20862

SEQ ID NO: 30044 - DNA, 1461 bp, Archaeoglobus fulgidus DSM 4304; identical to SEQ ID NO: 20863
  CDS (1)..(1461): transl_table=11

SEQ ID NO: 30045 - protein, 486 aa, Archaeoglobus fulgidus DSM 4304; identical to SEQ ID NO: 20864

SEQ ID NO: 30046 - DNA, 1455 bp, Aeropyrum pernix K1; identical to SEQ ID NO: 20865
  CDS (1)..(1455): transl_table=11

SEQ ID NO: 30047 - protein, 484 aa, Aeropyrum pernix K1; identical to SEQ ID NO: 20866

SEQ ID NO: 30048 - DNA, 1365 bp, Helicobacter pylori J99; identical to SEQ ID NO: 20867
  CDS (1)..(1365): transl_table=11

SEQ ID NO: 30049 - protein, 454 aa, Helicobacter pylori J99; identical to SEQ ID NO: 20868

SEQ ID NO: 30050 - DNA, 1326 bp, Bacillus halodurans C-125; identical to SEQ ID NO: 20869
  CDS (1)..(1326): transl_table=11

SEQ ID NO: 30051 - protein, 441 aa, Bacillus halodurans C-125; identical to SEQ ID NO: 20870

SEQ ID NO: 30052 - DNA, 1425 bp, Pseudomonas aeruginosa PAO1; identical to SEQ ID NO: 20871
  CDS (1)..(1425): transl_table=11

SEQ ID NO: 30053 - protein, 474 aa, Pseudomonas aeruginosa PAO1; identical to SEQ ID NO: 20872

SEQ ID NO: 30054 - DNA, 1377 bp, Fusobacterium nucleatum subsp. nucleatum ATCC 25586; identical to SEQ ID NO: 20873
  CDS (1)..(1377): transl_table=11

SEQ ID NO: 30055 - protein, 458 aa, Fusobacterium nucleatum subsp. nucleatum ATCC 25586; identical to SEQ ID NO: 20874

SEQ ID NO: 30056 - DNA, 1407 bp, Streptococcus pyogenes MGAS8232; identical to SEQ ID NO: 20875
  CDS (1)..(1407): transl_table=11

SEQ ID NO: 30057 - protein, 468 aa, Streptococcus pyogenes MGAS8232; identical to SEQ ID NO: 20876

SEQ ID NO: 30058 - DNA, 1326 bp, Oceanobacillus iheyensis HTE831; identical to SEQ ID NO: 20877
  CDS (1)..(1326): transl_table=11

SEQ ID NO: 30059 - protein, 441 aa, Oceanobacillus iheyensis HTE831; identical to SEQ ID NO: 20878

SEQ ID NO: 30060 - DNA, 1332 bp, Shewanella oneidensis MR-1; identical to SEQ ID NO: 20879
  CDS (1)..(1332): transl_table=11

SEQ ID NO: 30061 - protein, 443 aa, Shewanella oneidensis MR-1; identical to SEQ ID NO: 20880

SEQ ID NO: 30062 - DNA, 1419 bp, Pseudomonas putida KT2440; identical to SEQ ID NO: 20881
  CDS (1)..(1419): transl_table=11

SEQ ID NO: 30063 - protein, 472 aa, Pseudomonas putida KT2440; identical to SEQ ID NO: 20882

SEQ ID NO: 30064 - DNA, 1419 bp, Pseudomonas syringae pv. tomato str. DC3000; identical to SEQ ID NO: 20883
  CDS (1)..(1419): transl_table=11

SEQ ID NO: 30065 - protein, 472 aa, Pseudomonas syringae pv. tomato str. DC3000; identical to SEQ ID NO: 20884

SEQ ID NO: 30066 - DNA, 1407 bp, Streptococcus pyogenes SSI-1; identical to SEQ ID NO: 20885
  CDS (1)..(1407): transl_table=11

SEQ ID NO: 30067 - protein, 468 aa, Streptococcus pyogenes SSI-1; identical to SEQ ID NO: 20886

SEQ ID NO: 30068 - DNA, 1350 bp, Bordetella pertussis Tohama I; identical to SEQ ID NO: 20887
  CDS (1)..(1350): transl_table=11

SEQ ID NO: 30069 - protein, 449 aa, Bordetella pertussis Tohama I; identical to SEQ ID NO: 20888

SEQ ID NO: 30070 - DNA, 1464 bp, Bordetella pertussis Tohama I; identical to SEQ ID NO: 20889
  CDS (1)..(1464): transl_table=11

SEQ ID NO: 30071 - protein, 487 aa, Bordetella pertussis Tohama I; identical to SEQ ID NO: 20890

SEQ ID NO: 30072 - DNA, 1434 bp, Bordetella parapertussis 12822; identical to SEQ ID NO: 20891
  CDS (1)..(1434): transl_table=11

SEQ ID NO: 30073 - protein, 477 aa, Bordetella parapertussis 12822; identical to SEQ ID NO: 20892

SEQ ID NO: 30074 - DNA, 1464 bp, Bordetella parapertussis 12822; identical to SEQ ID NO: 20893
  CDS (1)..(1464): transl_table=11

SEQ ID NO: 30075 - protein, 487 aa, Bordetella parapertussis 12822; identical to SEQ ID NO: 20894

SEQ ID NO: 30076 - DNA, 1446 bp, Bordetella parapertussis 12822; identical to SEQ ID NO: 20895
  CDS (1)..(1446): transl_table=11

SEQ ID NO: 30077 - protein, 481 aa, Bordetella parapertussis 12822; identical to SEQ ID NO: 20896

SEQ ID NO: 30078 - DNA, 1464 bp, Bordetella bronchiseptica RB50; identical to SEQ ID NO: 20897
  CDS (1)..(1464): transl_table=11

SEQ ID NO: 30079 - protein, 487 aa, Bordetella bronchiseptica RB50; identical to SEQ ID NO: 20898

SEQ ID NO: 30080 - DNA, 1314 bp, Bordetella bronchiseptica RB50; identical to SEQ ID NO: 20899
  CDS (1)..(1314): transl_table=11

SEQ ID NO: 30081 - protein, 437 aa, Bordetella bronchiseptica RB50; identical to SEQ ID NO: 20900

SEQ ID NO: 30082 - DNA, 1365 bp, Bdellovibrio bacteriovorus HD100; identical to SEQ ID NO: 20901
  CDS (1)..(1365): transl_table=11

SEQ ID NO: 30083 - protein, 454 aa, Bdellovibrio bacteriovorus HD100; identical to SEQ ID NO: 20902

SEQ ID NO: 30084 - DNA, 1347 bp, Bacillus cereus ATCC 10987; identical to SEQ ID NO: 20903
  CDS (1)..(1347): transl_table=11

SEQ ID NO: 30085 - protein, 448 aa, Bacillus cereus ATCC 10987; identical to SEQ ID NO: 20904

SEQ ID NO: 30086 - DNA, 1347 bp, Bacillus anthracis str. Sterne; identical to SEQ ID NO: 20905
  CDS (1)..(1347): transl_table=11

SEQ ID NO: 30087 - protein, 448 aa, Bacillus anthracis str. Sterne; identical to SEQ ID NO: 20906

SEQ ID NO: 30088 - DNA, 1347 bp, Bacillus thuringiensis serovar konkukian str. 97-27; identical to SEQ ID NO: 20907
  CDS (1)..(1347): transl_table=11

SEQ ID NO: 30089 - protein, 448 aa, Bacillus thuringiensis serovar konkukian str. 97-27; identical to SEQ ID NO: 20908

SEQ ID NO: 30090 - DNA, 1410 bp, Acinetobacter sp. ADP1; identical to SEQ ID NO: 20909
  CDS (1)..(1410): transl_table=11

SEQ ID NO: 30091 - protein, 469 aa, Acinetobacter sp. ADP1; identical to SEQ ID NO: 20910

SEQ ID NO: 30092 - DNA, 1347 bp, Bacillus cereus E33L; identical to SEQ ID NO: 20911
  CDS (1)..(1347): transl_table=11

SEQ ID NO: 30093 - protein, 448 aa, Bacillus cereus E33L; identical to SEQ ID NO: 20912

SEQ ID NO: 30094 - DNA, 1404 bp, Haloarcula marismortui ATCC 43049; identical to SEQ ID NO: 20913
  CDS (1)..(1404): transl_table=11

SEQ ID NO: 30095 - protein, 467 aa, Haloarcula marismortui ATCC 43049; identical to SEQ ID NO: 20914

SEQ ID NO: 30096 - DNA, 1320 bp, Bacillus clausii KSM-K16; identical to SEQ ID NO: 20915
  CDS (1)..(1320): transl_table=11

SEQ ID NO: 30097 - protein, 439 aa, Bacillus clausii KSM-K16; identical to SEQ ID NO: 20916

SEQ ID NO: 30098 - DNA, 1419 bp, Pseudomonas syringae pv. syringae B728a; identical to SEQ ID NO: 20917
  CDS (1)..(1419): transl_table=11

SEQ ID NO: 30099 - protein, 472 aa, Pseudomonas syringae pv. syringae B728a; identical to SEQ ID NO: 20918

SEQ ID NO: 30100 - DNA, 1344 bp, Haemophilus influenzae 86-028NP; identical to SEQ ID NO: 20919
  CDS (1)..(1344): transl_table=11

SEQ ID NO: 30101 - protein, 447 aa, Haemophilus influenzae 86-028NP; identical to SEQ ID NO: 20920

SEQ ID NO: 30102 - DNA, 1419 bp, Pseudomonas fluorescens Pf-5; identical to SEQ ID NO: 20921
  CDS (1)..(1419): transl_table=11

SEQ ID NO: 30103 - protein, 472 aa, Pseudomonas fluorescens Pf-5; identical to SEQ ID NO: 20922

SEQ ID NO: 30104 - DNA, 1425 bp, Pseudomonas syringae pv. phaseolicola 1448A; identical to SEQ ID NO: 20923
  CDS (1)..(1425): transl_table=11

SEQ ID NO: 30105 - protein, 474 aa, Pseudomonas syringae pv. phaseolicola 1448A; identical to SEQ ID NO: 20924

SEQ ID NO: 30106 - DNA, 1407 bp, Streptococcus pyogenes MGAS5005; identical to SEQ ID NO: 20925
  CDS (1)..(1407): transl_table=11

SEQ ID NO: 30107 - protein, 468 aa, Streptococcus pyogenes MGAS5005; identical to SEQ ID NO: 20926

SEQ ID NO: 30108 - DNA, 1449 bp, Ralstonia eutropha JMP134; identical to SEQ ID NO: 20927
  CDS (1)..(1449): transl_table=11

SEQ ID NO: 30109 - protein, 482 aa, Ralstonia eutropha JMP134; identical to SEQ ID NO: 20928

SEQ ID NO: 30110 - DNA, 1344 bp, Haemophilus somnus 2336; identical to SEQ ID NO: 20929
  CDS (1)..(1344)

SEQ ID NO: 30111 - protein, 447 aa, Haemophilus somnus 2336; identical to SEQ ID NO: 20930

SEQ ID NO: 30112 - DNA, 1326 bp, Fusobacterium nucleatum subsp. vincentii ATCC 49256; identical to SEQ ID NO: 20931
  CDS (1)..(1326): transl_table=11

SEQ ID NO: 30113 - protein, 441 aa, Fusobacterium nucleatum subsp. vincentii ATCC 49256; identical to SEQ ID NO: 20932

SEQ ID NO: 30114 - DNA, 1344 bp, Haemophilus influenzae R2866; identical to SEQ ID NO: 20933
  CDS (1)..(1344)

SEQ ID NO: 30115 - protein, 447 aa, Haemophilus influenzae R2866; identical to SEQ ID NO: 20934

SEQ ID NO: 30116 - DNA, 1452 bp, Burkholderia cepacia R18194; identical to SEQ ID NO: 20935
  CDS (1)..(1452)

SEQ ID NO: 30117 - protein, 483 aa, Burkholderia cepacia R18194; identical to SEQ ID NO: 20936

SEQ ID NO: 30118 - DNA, 1290 bp, Burkholderia cepacia R18194; identical to SEQ ID NO: 20937
  CDS (1)..(1290)

SEQ ID NO: 30119 - protein, 429 aa, Burkholderia cepacia R18194; identical to SEQ ID NO: 20938

SEQ ID NO: 30120 - DNA, 1347 bp, Bacillus cereus G9241; identical to SEQ ID NO: 20939
  CDS (1)..(1347): transl_table=11

SEQ ID NO: 30121 - protein, 448 aa, Bacillus cereus G9241; identical to SEQ ID NO: 20940

SEQ ID NO: 30122 - DNA, 1332 bp, Pseudomonas fluorescens PfO-1; identical to SEQ ID NO: 20941
  CDS (1)..(1332)

SEQ ID NO: 30123 - protein, 443 aa, Pseudomonas fluorescens PfO-1; identical to SEQ ID NO: 20942

SEQ ID NO: 30124 - DNA, 1434 bp, Rhodospirillum rubrum; identical to SEQ ID NO: 20943
  CDS (1)..(1434)

SEQ ID NO: 30125 - protein, 477 aa, Rhodospirillum rubrum; identical to SEQ ID NO: 20944

SEQ ID NO: 30126 - DNA, 1035 bp, Haemophilus influenzae 86-028NP; identical to SEQ ID NO: 20945
  CDS (1)..(1035)

SEQ ID NO: 30127 - protein, 344 aa, Haemophilus influenzae 86-028NP; identical to SEQ ID NO: 20946

SEQ ID NO: 30128 - DNA, 1431 bp, Ralstonia eutropha JMP134; identical to SEQ ID NO: 20947
  CDS (1)..(1431)

SEQ ID NO: 30129 - protein, 476 aa, Ralstonia eutropha JMP134; identical to SEQ ID NO: 20948

SEQ ID NO: 30130 - DNA, 1380 bp, Brevibacterium linens BL2; identical to SEQ ID NO: 20949
  CDS (1)..(1380)

SEQ ID NO: 30131 - protein, 459 aa, Brevibacterium linens BL2; identical to SEQ ID NO: 20950

SEQ ID NO: 30132 - DNA, 1242 bp, Bacillus anthracis str. A2012; identical to SEQ ID NO: 20951
  CDS (1)..(1242): Xaa of translated CDS can stand for any naturally occuring amino acid which can be translated from respective CDS-codon

SEQ ID NO: 30133 - protein, 413 aa, Bacillus anthracis str. A2012; identical to SEQ ID NO: 20952
  misc_feature (43)..(43): Xaa can be any naturally occuring amino acid
  misc_feature (129)..(129): Xaa can be any naturally occuring amino acid

SEQ ID NO: 30134 - DNA, 1440 bp, Azotobacter vinelandii AvOP; identical to SEQ ID NO: 20953
  CDS (1)..(1440): transl_table=11

SEQ ID NO: 30135 - protein, 479 aa, Azotobacter vinelandii AvOP; identical to SEQ ID NO: 20954

SEQ ID NO: 30136 - DNA, 1311 bp, Chromohalobacter salexigens DSM 3043; identical to SEQ ID NO: 20955
  CDS (1)..(1311): transl_table=11

SEQ ID NO: 30137 - protein, 436 aa, Chromohalobacter salexigens DSM 3043; identical to SEQ ID NO: 20956

SEQ ID NO: 30138 - DNA, 1356 bp, Shewanella baltica OS155; identical to SEQ ID NO: 20957
  CDS (1)..(1356): transl_table=11

SEQ ID NO: 30139 - protein, 451 aa, Shewanella baltica OS155; identical to SEQ ID NO: 20958

SEQ ID NO: 30140 - DNA, 1338 bp, Ralstonia metallidurans CH34; identical to SEQ ID NO: 20959
  CDS (1)..(1338): transl_table=11

SEQ ID NO: 30141 - protein, 445 aa, Ralstonia metallidurans CH34; identical to SEQ ID NO: 20960

SEQ ID NO: 30142 - DNA, 1395 bp, Rubrobacter xylanophilus DSM 9941; identical to SEQ ID NO: 20961
  CDS (1)..(1395): transl_table=11

SEQ ID NO: 30143 - protein, 464 aa, Rubrobacter xylanophilus DSM 9941; identical to SEQ ID NO: 20962

SEQ ID NO: 30144 - DNA, 1320 bp, Psychrobacter cryohalolentis K5; identical to SEQ ID NO: 20963
  CDS (1)..(1320): transl_table=11

SEQ ID NO: 30145 - protein, 439 aa, Psychrobacter cryohalolentis K5; identical to SEQ ID NO: 20964

SEQ ID NO: 30146 - DNA, 1353 bp, Burkholderia ambifaria AMMD; identical to SEQ ID NO: 20965
  CDS (1)..(1353): transl_table=11

SEQ ID NO: 30147 - protein, 450 aa, Burkholderia ambifaria AMMD; identical to SEQ ID NO: 20966

SEQ ID NO: 30148 - DNA, 1344 bp, Bacillus cereus; identical to SEQ ID NO: 20967
  CDS (1)..(1344): transl_table=11

SEQ ID NO: 30149 - protein, 447 aa, Bacillus cereus; identical to SEQ ID NO: 20968

SEQ ID NO: 30150 - DNA, 1341 bp, Alcaligenes eutrophus; identical to SEQ ID NO: 20969
  CDS (1)..(1341): transl_table=11

SEQ ID NO: 30151 - protein, 446 aa, Alcaligenes eutrophus; identical to SEQ ID NO: 20970

SEQ ID NO: 30152 - DNA, 1239 bp, Aeropyrum pernix; identical to SEQ ID NO: 20971
  CDS (1)..(1239): transl_table=11

SEQ ID NO: 30153 - protein, 412 aa, Aeropyrum pernix; identical to SEQ ID NO: 20972

SEQ ID NO: 30154 - DNA, 1344 bp, Haemophilus influenzae; identical to SEQ ID NO: 20973
  CDS (1)..(1344): transl_table=11

SEQ ID NO: 30155 - protein, 447 aa, Haemophilus influenzae; identical to SEQ ID NO: 20974

SEQ ID NO: 30156 - DNA, 24 bp, Artificial sequence
  Primer sequence
atgattggtcgcatatcgcgtttt

SEQ ID NO: 30157 - DNA, 26 bp, Artificial sequence
  Primer sequence
ttagaacagcgttaaaccaatgacga

SEQ ID NO: 30158 - protein, 465 aa, Artificial sequence; identical to SEQ ID NO: 20977
  Consensus
  Variant (3)..(3): Xaa in position 3 is any amino acid
  Variant (6)..(7): Xaa in position 6 to 7 is any amino acid
  Variant (9)..(11): Xaa in position 9 to 11 is any amino acid
  Variant (13)..(15): Xaa in position 13 to 15 is any amino acid
  Variant (17)..(34): Xaa in position 17 to 34 is any amino acid
  Variant (35)..(44): Xaa in position 35 to 44 is any or no amino acid
  Variant (47)..(47): Xaa in position 47 is any amino acid
  Variant (51)..(51): Xaa in position 51 is any amino acid
  Variant (54)..(54): Xaa in position 54 is any amino acid
  Variant (56)..(56): Xaa in position 56 is any amino acid
  Variant (60)..(60): Xaa in position 60 is any amino acid
  Variant (65)..(65): Xaa in position 65 is any amino acid
  Variant (67)..(68): Xaa in position 67 to 68 is any amino acid
  Variant (71)..(71): Xaa in position 71 is any amino acid
  Variant (74)..(76): Xaa in position 74 to 76 is any amino acid
  Variant (78)..(78): Xaa in position 78 is any amino acid
  Variant (80)..(81): Xaa in position 80 to 81 is any amino acid
  Variant (84)..(91): Xaa in position 84 to 91 is any amino acid
  Variant (94)..(95): Xaa in position 94 to 95 is any amino acid
  Variant (97)..(98): Xaa in position 97 to 98 is any amino acid
  Variant (100)..(101): Xaa in position 100 to 101 is any amino acid
  Variant (103)..(105): Xaa in position 103 to 105 is any amino acid
  Variant (110)..(111): Xaa in position 110 to 111 is any amino acid
  Variant (114)..(115): Xaa in position 114 to 115 is any amino acid
  Variant (118)..(119): Xaa in position 118 to 119 is any amino acid
  Variant (121)..(121): Xaa in position 121 is any amino acid
  Variant (125)..(127): Xaa in position 125 to 127 is any amino acid
  Variant (128)..(132): Xaa in position 128 to 132 is any or no amino acid
  Variant (134)..(134): Xaa in position 134 is any amino acid
  Variant (136)..(139): Xaa in position 136 to 139 is any amino acid
  Variant (144)..(144): Xaa in position 144 is any amino acid
  Variant (146)..(148): Xaa in position 146 to 148 is any amino acid
  Variant (149)..(149): Xaa in position 149 is any or no amino acid
  Variant (151)..(152): Xaa in position 151 to 152 is any amino acid
  Variant (156)..(156): Xaa in position 156 is any amino acid
  Variant (158)..(162): Xaa in position 158 to 162 is any amino acid
  Variant (164)..(175): Xaa in position 164 to 175 is any amino acid
  Variant (176)..(183): Xaa in position 176 to 183 is any or no amino acid
  Variant (186)..(188): Xaa in position 186 to 188 is any amino acid
  Variant (192)..(195): Xaa in position 192 to 195 is any amino acid
  Variant (197)..(203): Xaa in position 197 to 203 is any amino acid
  Variant (205)..(208): Xaa in position 205 to 208 is any amino acid
  Variant (210)..(214): Xaa in position 210 to 214 is any amino acid
  Variant (216)..(241): Xaa in position 216 to 241 is any amino acid
  Variant (242)..(256): Xaa in position 242 to 256 is any or no amino acid
  Variant (259)..(259): Xaa in position 259 is any amino acid
  Variant (262)..(262): Xaa in position 262 is any amino acid
  Variant (264)..(265): Xaa in position 264 to 265 is any amino acid
  Variant (267)..(269): Xaa in position 267 to 269 is any amino acid
  Variant (271)..(273): Xaa in position 271 to 273 is any amino acid
  Variant (275)..(276): Xaa in position 275 to 276 is any amino acid
  Variant (279)..(281): Xaa in position 279 to 281 is any amino acid
  Variant (283)..(289): Xaa in position 283 to 289 is any amino acid
  Variant (290)..(293): Xaa in position 290 to 293 is any or no amino acid
  Variant (295)..(297): Xaa in position 295 to 297 is any amino acid
  Variant (299)..(299): Xaa in position 299 is any amino acid
  Variant (303)..(304): Xaa in position 303 to 304 is any amino acid
  Variant (310)..(311): Xaa in position 310 to 311 is any amino acid
  Variant (312)..(313): Xaa in position 312 to 313 is any or no amino acid
  Variant (315)..(316): Xaa in position 315 to 316 is any amino acid
  Variant (319)..(319): Xaa in position 319 is any amino acid
  Variant (321)..(323): Xaa in position 321 to 323 is any amino acid
  Variant (325)..(329): Xaa in position 325 to 329 is any amino acid
  Variant (337)..(337): Xaa in position 337 is any amino acid
  Variant (342)..(343): Xaa in position 342 to 343 is any amino acid
  Variant (346)..(349): Xaa in position 346 to 349 is any amino acid
  Variant (350)..(356): Xaa in position 350 to 356 is any or no amino acid
  Variant (358)..(360): Xaa in position 358 to 360 is any amino acid
  Variant (363)..(364): Xaa in position 363 to 364 is any amino acid
  Variant (367)..(367): Xaa in position 367 is any amino acid
  Variant (370)..(372): Xaa in position 370 to 372 is any amino acid
  Variant (373)..(373): Xaa in position 373 is any or no amino acid
  Variant (375)..(380): Xaa in position 375 to 380 is any amino acid
  Variant (382)..(382): Xaa in position 382 is any amino acid
  Variant (387)..(389): Xaa in position 387 to 389 is any amino acid
  Variant (396)..(396): Xaa in position 396 is any amino acid
  Variant (398)..(398): Xaa in position 398 is any amino acid
  Variant (400)..(400): Xaa in position 400 is any amino acid
  Variant (403)..(403): Xaa in position 403 is any amino acid
  Variant (406)..(406): Xaa in position 406 is any amino acid
  Variant (409)..(410): Xaa in position 409 to 410 is any amino acid
  Variant (412)..(415): Xaa in position 412 to 415 is any amino acid
  Variant (417)..(424): Xaa in position 417 to 424 is any amino acid
  Variant (427)..(429): Xaa in position 427 to 429 is any amino acid
  Variant (437)..(437): Xaa in position 437 is any amino acid
  Variant (440)..(440): Xaa in position 440 is any amino acid
  Variant (444)..(445): Xaa in position 444 to 445 is any amino acid
  Variant (447)..(448): Xaa in position 447 to 448 is any amino acid
  Variant (455)..(458): Xaa in position 455 to 458 is any amino acid
  Variant (461)..(464): Xaa in position 461 to 464 is any amino acid

SEQ ID NO: 30159 - protein, 36 aa, Artificial sequence; identical to SEQ ID NO: 20978
  Consensus
  Variant (2)..(2): Xaa in position 2 is any amino acid
  Variant (3)..(3): Xaa in position 3 is any or no amino acid
  Variant (5)..(5): Xaa in position 5 is any amino acid
  Variant (7)..(7): Xaa in position 7 is Ile or Leu
  Variant (8)..(8): Xaa in position 8 is any amino acid
  Variant (10)..(10): Xaa in position 10 is Ala, Gly, Ser or Thr
  Variant (14)..(14): Xaa in position 14 is any amino acid
  Variant (15)..(15): Xaa in position 15 is Phe, Ile, Leu, Met or Val
  Variant (16)..(16): Xaa in position 16 is Ile, Leu or Val
  Variant (17)..(17): Xaa in position 17 is Ala, Ile, Leu or Val
  Variant (18)..(18): Xaa in position 18 is Ala, Ile or Val
  Variant (19)..(19): Xaa in position 19 is any amino acid
  Variant (21)..(22): Xaa in position 21 to 22 is any amino acid
  Variant (23)..(23): Xaa in position 23 is Ile, Leu or Val
  Variant (25)..(32): Xaa in position 25 to 32 is any amino acid
  Variant (33)..(35): Xaa in position 33 to 35 is any or no amino acid

SEQ ID NO: 30160 - protein, 29 aa, Artificial sequence
  Consensus
  Variant (2)..(2): Xaa in position 2 is any amino acid
  Variant (3)..(3): Xaa in position 3 is Ala, Leu or Val
  Variant (4)..(4): Xaa in position 4 is Ala, Ile, Leu or Val
  Variant (5)..(5): Xaa in position 5 is any amino acid
  Variant (6)..(6): Xaa in position 6 is Ala or Val
  Variant (7)..(7): Xaa in position 7 is Ala, Cys or Ser
  Variant (8)..(8): Xaa in position 8 is Ala, Gly or Ser
  Variant (10)..(10): Xaa in position 10 is any amino acid
  Variant (12)..(15): Xaa in position 12 to 15 is any amino acid
  Variant (16)..(18): Xaa in position 16 to 18 is any or no amino acid
  Variant (20)..(20): Xaa in position 20 is Phe, Leu or Met
  Variant (21)..(21): Xaa in position 21 is Ala, Gly, Ser or Thr
  Variant (22)..(22): Xaa in position 22 is Ala, Gly or Ser
  Variant (24)..(24): Xaa in position 24 is any amino acid
  Variant (25)..(25): Xaa in position 25 is Ala, Pro or Ser
  Variant (26)..(28): Xaa in position 26 to 28 is any amino acid
  Variant (29)..(29): Xaa in position 29 is Ala, Asn, Ser or Thr
YXXXXXXXYXGXXXXXXXGXXXSXXXXXX

SEQ ID NO: 30161 - protein, 48 aa, Artificial sequence; identical to SEQ ID NO: 20980
  Consensus
  Variant (2)..(2): Xaa in position 2 is Phe or Leu
  Variant (3)..(3): Xaa in position 3 is any amino acid
  Variant (4)..(4): Xaa in position 4 is Phe, Ile or Leu
  Variant (5)..(7): Xaa in position 5 to 7 is any amino acid
  Variant (8)..(8): Xaa in position 8 is Ala, Gly or Ile
  Variant (9)..(10): Xaa in position 9 to 10 is any amino acid
  Variant (12)..(14): Xaa in position 12 to 14 is any amino acid
  Variant (15)..(21): Xaa in position 15 to 21 is any or no amino acid
  Variant (23)..(28): Xaa in position 23 to 28 is any amino acid
  Variant (29)..(29): Xaa in position 29 is Phe, Ile, Leu or Val
  Variant (30)..(31): Xaa in position 30 to 31 is any amino acid
  Variant (32)..(32): Xaa in position 32 is Ala, Gly or Ser
  Variant (33)..(34): Xaa in position 33 to 34 is any amino acid
  Variant (35)..(35): Xaa in position 35 is Ala, Gly, Ser or Thr
  Variant (36)..(37): Xaa in position 36 to 37 is any amino acid
  Variant (39)..(39): Xaa in position 39 is Ile, Leu or Val
  Variant (40)..(40): Xaa in position 40 is Ile, Leu, Met or Val
  Variant (41)..(41): Xaa in position 41 is Ile, Leu or Val
  Variant (43)..(43): Xaa in position 43 is Phe or Tyr
  Variant (45)..(45): Xaa in position 45 is Phe or Leu
  Variant (47)..(47): Xaa in position 47 is Ala or Gly
  Variant (48)..(48): Xaa in position 48 is Gly or Ser

SEQ ID NO: 30162 - protein, 52 aa, Artificial sequence; identical to SEQ ID NO: 20981
  Consensus
  Variant (5)..(5): Xaa in position 5 is Gly or Ser
  Variant (6)..(6): Xaa in position 6 is any amino acid
  Variant (7)..(7): Xaa in position 7 is Phe or Trp
  Variant (8)..(8): Xaa in position 8 is Ala, Ile or Val
  Variant (9)..(9): Xaa in position 9 is Ile or Val
  Variant (10)..(10): Xaa in position 10 is any amino acid
  Variant (11)..(11): Xaa in position 11 is Ala, Gly or Ser
  Variant (13)..(16): Xaa in position 13 to 16 is any amino acid
  Variant (17)..(17): Xaa in position 17 is any or no amino acid
  Variant (19)..(39): Xaa in position 19 to 39 is any amino acid
  Variant (40)..(40): Xaa in position 40 is any or no amino acid
  Variant (42)..(42): Xaa in position 42 is Leu or Met
  Variant (43)..(43): Xaa in position 43 is Ala, Ile, Leu or Val
  Variant (44)..(44): Xaa in position 44 is any amino acid
  Variant (47)..(47): Xaa in position 47 is Phe, Trp or Tyr
  Variant (48)..(48): Xaa in position 48 is any amino acid
  Variant (50)..(50): Xaa in position 50 is Pro or Ser
  Variant (51)..(51): Xaa in position 51 is any amino acid

SEQ ID NO: 30163 - DNA, 1518 bp, Escherichia coli
  CDS (1)..(1518)
atgtgcggtattgtcggtatcgccggtgttatgccggttaaccagtcgatttatgatgccttaacggtgcttcagcatcgcggtcaggatgccgccggcatcatcaccatagatgccaataactgcttccgtttgcgtaaagcgaacgggctggtgagcgatgtatttgaagctcgccatatgcagcgtttgcagggcaatatgggcattggtcatgtgcgttaccctacggctggcagctccagcgcctctgaagcgcagccgttttacgttaactccccgtatggcattacgcttgcccacaacggcaatctgaccaacgctcacgagttgcgtaaaaaactgtttgaagaaaaacgccgccacatcaacaccacttccgactcggaaattctgcttaatatcttcgctagcgagctggacaacttccgccactacccgctggaagccgacaatattttcgctgccattgctgccacaaaccgcttaatccgcggcgcatatgcctgtgtggcgatgattatcggccacggtatggttgctttccgcgatccaaacgggattcgtccgctggtactgggaaaacgtgatattgacgagaaccgtacagaatatatggtcgcttccgaaagcgtagcgctcgatacgctgggctttgatttcctgcgtgacgtcgcgccgggcgaagcgatttacatcactgaagaagggcagttgtttacccgtcaatgtgctgacaatccggtcagcaatccgtgcctgtttgagtatgtatactttgctcgcccggactcgttcatcgacaaaatttccgtttacagcgcgcgtgtgaatatgggcacgaaactgggcgagaaaattgcccgcgaatgggaagatctggatatcgacgtggtgatcccgatcccagaaacctcgtgtgatatcgcgctggaaattgctcgtattctgggcaaaccgtaccgccagggcttcgttaaaaaccgctatgttggccgcacctttatcatgccgggccagcagctgcgtcgtaagtccgtgcgccgtaaactgaatgccaaccgcgccgagttccgcgataaaaacgtcctgctggtcgacgactccatcgtccgtggcaccacttctgagcagattatcgagatggcacgcgaagccggagcgaagaaagtgtacctcgcttctgcggcaccggaaattcgcttcccgaacgtttatggtattgatatgccgagcgccacggaactgatcgctcacggtcgcgaagttgatgaaattcgccagatcatcggtgctgacgggttgattttccaggatctgaacgatctgatcgacgccgttcgcgctgaaaatccggatatccagcagtttgaatgctcggtgttcaacggcgtctacgtcaccaaagatgttgatcagggctacctcgatttcctcgatacgttacgtaatgatgacgccaaagcagtgcaacgtcagaacgaagtggaaaatctcgaaatgcataacgaaggatga

SEQ ID NO: 30164 - protein, 505 aa, Escherichia coli
MCGIVGIAGVMPVNQSIYDALTVLQHRGQDAAGIITIDANNCFRLRKANGLVSDVFEARHMQRLQGNMGIGHVRYPTAGSSSASEAQPFYVNSPYGITLAHNGNLTNAHELRKKLFEEKRRHINTTSDSEILLNIFASELDNFRHYPLEADNIFAAIAATNRLIRGAYACVAMIIGHGMVAFRDPNGIRPLVLGKRDIDENRTEYMVASESVALDTLGFDFLRDVAPGEAIYITEEGQLFTRQCADNPVSNPCLFEYVYFARPDSFIDKISVYSARVNMGTKLGEKIAREWEDLDIDVVIPIPETSCDIALEIARILGKPYRQGFVKNRYVGRTFIMPGQQLRRKSVRRKLNANRAEFRDKNVLLVDDSIVRGTTSEQIIEMAREAGAKKVYLASAAPEIRFPNVYGIDMPSATELIAHGREVDEIRQIIGADGLIFQDLNDLIDAVRAENPDIQQFECSVFNGVYVTKDVDQGYLDFLDTLRNDDAKAVQRQNEVENLEMHNEG

SEQ ID NO: 30165 - DNA, 1374 bp, Archaeoglobus fulgidus DSM 4304
  CDS (1)..(1374): transl_table=11
atgtgtggggttgtaggtatataccatcctgacggggagcttgctccccgactcgcctactattctctcttctcccttcagcatcgcggtcaggagtcggcaggtatcgcgtcctttgacaaccacataaggcagaagaggggcatgggcctcgtcaccgaggttttcaacgacgaggactttgagctgcttgcaggcaaatcggtaatcggccacgtcagatactcaacgaccggtaggtcgagacttgagaacgctcagcctttcgtcgtcaaatcaaaggcgggatacatagctgtagcacataacggaaacctcgttaactactctcagctgagaaacgagctggaaaacgagggaagggttttcacaaccgattcagataccgaggtaatttcccagctgctctcaaagtttctgatcgaggaaggggacatcataaatgctcttgaaaggctgaacgaatcacttgtgggcagctacaccatgaccatgctcgttgacgatgcggtgataggctaccgcgaccctctcggcttcaagccgctgtgcgttggaaggattgatgatggttatgtgatatgcagcgaaagctgcgcaatcgatgctctcggtggagagtttataagagacgtacagcctgggaaagcggcgattataaaagatggtgagcttgagttcgtaaaaatcgccaaatcggagaggagagctgtttgcattttcgagtacatatacttcgcccgcccggactcaataattgacggaataagcgtttacaaagcgagaagcgagatgggaaaggttctggcgagggagtctcctgtcgaagctgacttcgtttcagctgtacccgacagcggaataaccgcggcaataggctacgctcaggaatcagggctgccttactttgagggcttgataaagaacagatacgtgggcaggactttcataatgccggttcagagtctaagggagacgtcagtgaggctgaaggtaaacgtcgtcagggagaacgtgagggggaggagggttgtgctggttgacgacagcatagtgagagggaccacctcaaggagaatcgtgcagatgataaaagacgcgggagcaaaggaggtgcacatgagaatcggcagccccccaatcatagccccgtgctacttcggaatagacatgaaatcgagggaggagctgatagccgccagccataccgttgaggagatagggagaattttcggaacggatagcctcgcctacctgagcctggaaggtcttctcgaagcggttaggagggcgggtggaaagaggggatactgccttgcctgtctgacctccaaataccccgtttcagtgcctggagaggagtgtgagtgttaa

SEQ ID NO: 30166 - protein, 457 aa, Archaeoglobus fulgidus DSM 4304
MCGVVGIYHPDGELAPRLAYYSLFSLQHRGQESAGIASFDNHIRQKRGMGLVTEVFNDEDFELLAGKSVIGHVRYSTTGRSRLENAQPFVVKSKAGYIAVAHNGNLVNYSQLRNELENEGRVFTTDSDTEVISQLLSKFLIEEGDIINALERLNESLVGSYTMTMLVDDAVIGYRDPLGFKPLCVGRIDDGYVICSESCAIDALGGEFIRDVQPGKAAIIKDGELEFVKIAKSERRAVCIFEYIYFARPDSIIDGISVYKARSEMGKVLARESPVEADFVSAVPDSGITAAIGYAQESGLPYFEGLIKNRYVGRTFIMPVQSLRETSVRLKVNVVRENVRGRRVVLVDDSIVRGTTSRRIVQMIKDAGAKEVHMRIGSPPIIAPCYFGIDMKSREELIAASHTVEEIGRIFGTDSLAYLSLEGLLEAVRRAGGKRGYCLACLTSKYPVSVPGEECEC

SEQ ID NO: 30167 - DNA, 1452 bp, Mesorhizobium loti MAFF303099
  CDS (1)..(1452): transl_table=11
gtgctttccgccgaggccgacgaccatttccacgacgaatgcggcgttttcggcattttcggccggcaggacgcagcggccatcgtcacactcggcctgcatgcgctgcagcatcgcggccaggaagcggccggcatcgtttcctatgacggcagccagttccatgtcgaacgccatgtcggcctgatcggcgacactttcaccaagcagcgcgttatcgacagcctgcaaggcaaccgcgccatcggccatacgcgctacgccacgacgggcggcgccggcatgcgcaacatccagcccttcttcgccgagctcgccgatggcggctttgccgtcgcccataatggcaatctgaccaacgccatgacggtgcagcgcgcgctgcagaagcagggcgcgatcttctcctcgacctccgacaccgagacgctcctgcatctggttgcgaccagcaaggaacgcgacctcaactcacgcttcatcgacgccgtgcggcaggtcgaaggtgccttctcgctggtggcgatgacggccaagaagatgatcggctgccgcgatccgctcggcatccggccgctggtgctcggcgacctcgacggcgcttggattctcgcttccgagacctgcgcgctcgacattatcggcgcgcgtttcgtgcgcgacctgaaacccggcgagatggtcgtcgtcacctccaagggcattgaaagcctgttcccgttcgaaccgcagaagacccgcttctgcatctttgaatatgtctatttcgcccggccggattcttcggtcgaaggccgcaacgtctacgaggtgcgcaagcgcatcggcgccgaattggcacaggaaaacccggtcgaggccgacatcgtcgtgccggtgccggattcgggcaccccggcggcgatcggcttcagccaggcggccggcattcccttcgagctcggcatcatccgcaaccactatgtcggccgtaccttcatccagcccggcgattcgatccgccacatgggcgtcaagctgaagcacaacgccaaccgccgcatgatcgagggcaagcgcgtcgtgctggtcgacgattcgatcgtgcgcggcaccaccagccagaagatcgtgcagatggtgcgcgatgccggcgcccgggaggtgcatatgcgcatcgcttcgccgccgaccagcgcctcctgcttctacggcgttgacacgccggagaaatcgaaactgctggcgtcgcgcatgtcggtggaagagatggccgagttcatccgtgtcgattcgctcggcttcctttccatcaacggcctctaccgcgccgtcggcgaggccggccgcaacgatgagcaaccgcaattctgcgacgcctgcttcaccggccagtatccgacccgcctgctcgacttcgaaggccacgacaatgtgcgcacgctgtcgctgctggcgaacagtggggcgtaa

SEQ ID NO: 30168 - protein, 483 aa, Mesorhizobium loti MAFF303099
MLSAEADDHFHDECGVFGIFGRQDAAAIVTLGLHALQHRGQEAAGIVSYDGSQFHVERHVGLIGDTFTKQRVIDSLQGNRAIGHTRYATTGGAGMRNIQPFFAELADGGFAVAHNGNLTNAMTVQRALQKQGAIFSSTSDTETLLHLVATSKERDLNSRFIDAVRQVEGAFSLVAMTAKKMIGCRDPLGIRPLVLGDLDGAWILASETCALDIIGARFVRDLKPGEMVVVTSKGIESLFPFEPQKTRFCIFEYVYFARPDSSVEGRNVYEVRKRIGAELAQENPVEADIVVPVPDSGTPAAIGFSQAAGIPFELGIIRNHYVGRTFIQPGDSIRHMGVKLKHNANRRMIEGKRVVLVDDSIVRGTTSQKIVQMVRDAGAREVHMRIASPPTSASCFYGVDTPEKSKLLASRMSVEEMAEFIRVDSLGFLSINGLYRAVGEAGRNDEQPQFCDACFTGQYPTRLLDFEGHDNVRTLSLLANSGA

SEQ ID NO: 30169 - DNA, 1425 bp, Thermoplasma volcanium GSS1
  CDS (1)..(1425): transl_table=11
gtggattcccggccccaaggatcagatcctataaatgggcaaaagccaagtgaagattgcgcagttgtggggttcaaggggaagataaacgcctataaccccataataactgcacttcgaacattgcaacatagaggccaggaatcggctggtatggctgtttttgacggcaagaaggtaacgttgaaaaaaggaagtggcctagtaacagatgtttttaatcctgcaaccgacgatattaaaggttacgtgggagtaggccatacacgttattcaactgctggatcaaaaaatgtggttaatgctgggccatttgtaatgaactcttctttcggttacataaccatatcccacaacggtgagatagtaaacgctgatgaattgcgtgattccatgaaaaaagaagggatcacgttccagagcgattcagatacagaggttatgctggcagagctttcgagaaatatctcaaagtatggcctaaaaagaggattcgaacagtccatggagagcctaaggggagcttatgcatgcgcaataagcataaatgatcgcctctacgccgtaagggacccaaatgggataaggcctctggttatagggaagaataacgacggatacatagtagcttcagaaagctgcgcaatagatgctctcgaaggcacgttaataaaaaacatcgaaccaggggaagtagttgagatatctgacgaaggcataagaacaattgtaagcaaatctgcaaatcgaatagcccactgcatgtttgagtatgtatatttctcaaggccggatagcgttatagacggcataaacgtttatgccgccagggtaaacatgggcagaatacttgctaaggagagcccagttgaagctgacatagtcgtccctgttccagattcagggcgttctcaagcaataggttattccatggaatctggaatgccttacacagaggggctgattaagaataggtattcggagaggaccttcataatgcctactcagagcgataggaaggccgcgatacatttgaagctaaatcctatacgcgaagtgatagggggaaagaaggtagtgcttgtagatgatagcatagtccgtggaaacactatgaggttcatcgtcggcctaatgaggaaatatggcgcaaaggagatacatgtcagaattggatcgccgcatataatcgcaccatgctattttggtgtcgacatgaagacgaaggatcaattcatagcgcgcggtaaaaccgatgaggagataaacagagaaatcggggccgattcactcgcgtttctttcagttgacggcctcaaacaggcgatatctatgaaaaacaataacctgtgccttgggtgcctcacaggagaatatcctatagatatatcaaagaaactcgcagaaaatattacttcttactag

SEQ ID NO: 30170 - protein, 474 aa, Thermoplasma volcanium GSS1
MDSRPQGSDPINGQKPSEDCAVVGFKGKINAYNPIITALRTLQHRGQESAGMAVFDGKKVTLKKGSGLVTDVFNPATDDIKGYVGVGHTRYSTAGSKNVVNAGPFVMNSSFGYITISHNGEIVNADELRDSMKKEGITFQSDSDTEVMLAELSRNISKYGLKRGFEQSMESLRGAYACAISINDRLYAVRDPNGIRPLVIGKNNDGYIVASESCAIDALEGTLIKNIEPGEVVEISDEGIRTIVSKSANRIAHCMFEYVYFSRPDSVIDGINVYAARVNMGRILAKESPVEADIVVPVPDSGRSQAIGYSMESGMPYTEGLIKNRYSERTFIMPTQSDRKAAIHLKLNPIREVIGGKKVVLVDDSIVRGNTMRFIVGLMRKYGAKEIHVRIGSPHIIAPCYFGVDMKTKDQFIARGKTDEEINREIGADSLAFLSVDGLKQAISMKNNNLCLGCLTGEYPIDISKKLAENITSY

SEQ ID NO: 30171 - DNA, 1701 bp, Arabidopsis thaliana
  CDS (1)..(1701)
atggcggccacaacaagcttctcctcttccctctctttaatcactaaaccaaacaattcttcttacaccaatcaacctctccctctcttccccaaacccttccttaaacctccccatctctctctccttccttctcccctctcctctcctcctccttcactcatccatggagtctcctcctacttctcctctccttcaccatccgaagacaattctcataccccttttgattaccacaacgacgaagacgacgaaaagcctcgagaagagtgcggtgtcgttggaatctatggagatccagaagcttcacggctctgttacttagctctccacgcacttcaacatcgtggtcaagaaggtgcaggtattgtaacagttagtcccgagaaagttcttcaaaccattacaggtgttggtttagtctctgaggttttcaacgaatcaaaacttgatcaattacctggtgaatttgctattggtcatgttcgttactcaacagctggagcttctatgctcaagaacgttcagcctttcgtcgccggttatcgattcggttctatcggtgttgcccacaatggtaatttagtaaattacaaaactttgagagctatgcttgaagagaacggttctatcttcaatactagctctgatactgaggttgtgcttcatttgattgctatttctaaagctagacctttttttatgaggattattgatgcttgtgagaaacttcaaggtgcttattcaatggtgtttgttactgaggataagcttgttgctgttcgtgatccttatgggtttagaccgttagttatgggtaggagaagtaatggagctgttgttttcgcttcggagacttgtgctcttgatttgattgaagctacttatgagagagaggtttatcctggtgaggttttggttgtggataaggatggtgtcaagtctcagtgtttgatgcccaagtttgagcctaagcaatgtattttcgaacatatctacttctcgttgcctaactcgattgtgtttggtcggtccgtgtatgaatctaggcatgtttttggtgagattttggctaccgagtcgcctgttgagtgcgatgttgtcatcgctgtgcctgactctggtgttgtggctgctctcgggtacgctgcgaaatccggtgtgccgtttcaacaggggttgattaggtctcattacgtagggaggacgttcattgagccgtcacagaagattagagactttggtgtgaagcttaagttgtctcctgttcgtggtgttttagaagggaagagagttgttgtggtggatgattcgattgttagaggcacaacttcgtctaagattgtgcgtttattgagagaagctggtgcaaaagaggttcatatgaggattgctagtcctcctatagtagcttcttgttactatggtgttgatacgcctagctcagaggagttgatatccaatagattgagtgttgaggagattaacgagttcatcgggagtgactctcttgcgtttctatcgttcgatacgttgaagaaacacttggggaaagactctaagagcttctgctatgcgtgcttcacgggtgactatcccgtgaagccaacagaagttaaggtgaaacgaggaggaggggatttcattgatgacggtctcgttggtagcttcgaaaacatcgaagcaggttgggttcgataa

SEQ ID NO: 30172 - protein, 566 aa, Arabidopsis thaliana
MAATTSFSSSLSLITKPNNSSYTNQPLPLFPKPFLKPPHLSLLPSPLSSPPPSLIHGVSSYFSSPSPSEDNSHTPFDYHNDEDDEKPREECGVVGIYGDPEASRLCYLALHALQHRGQEGAGIVTVSPEKVLQTITGVGLVSEVFNESKLDQLPGEFAIGHVRYSTAGASMLKNVQPFVAGYRFGSIGVAHNGNLVNYKTLRAMLEENGSIFNTSSDTEVVLHLIAISKARPFFMRIIDACEKLQGAYSMVFVTEDKLVAVRDPYGFRPLVMGRRSNGAVVFASETCALDLIEATYEREVYPGEVLVVDKDGVKSQCLMPKFEPKQCIFEHIYFSLPNSIVFGRSVYESRHVFGEILATESPVECDVVIAVPDSGVVAALGYAAKSGVPFQQGLIRSHYVGRTFIEPSQKIRDFGVKLKLSPVRGVLEGKRVVVVDDSIVRGTTSSKIVRLLREAGAKEVHMRIASPPIVASCYYGVDTPSSEELISNRLSVEEINEFIGSDSLAFLSFDTLKKHLGKDSKSFCYACFTGDYPVKPTEVKVKRGGGDFIDDGLVGSFENIEAGWVR

SEQ ID NO: 30173 - DNA, 1686 bp, Arabidopsis thaliana
  CDS (1)..(1686)
atggcggccacctctagcatctcttcttctctatctctcaatgctaaacccaacaagctctctaacaacaacaacaacaataagcctcaccgtttcctccgtaatcccttccttaacccctcctcctcctctttctctcctcttccggcttctatctcctcttcttcttcttctccttcgtttccgctcagagtttcaaaccctcttaccctgttggcggcagacaacgatgattatgacgagaagcctcgggaagagtgtggagttgtcggaatctacggtgactcagaagcttcacgactctgttacttagctctccatgcgcttcagcatcgaggtcaagaaggtgcaggtattgttaccgttagtaaagataaggttcttcagaccattacaggtgttggtttggtctctgaggttttcagtgaatccaaactcgatcaattaccaggagacatagccattggtcatgtcaggtactcgactgctggttcttctatgctcaagaacgttcagccgtttgttgctggttatcgatttggctctgttggtgttgctcacaatggcaatttagtgaattacacgaaattgagagctgatttagaggaaaatggttcgattttcaatactagctctgatactgaggttgtgcttcatttgattgccatttctaaagctagaccctttttcatgagaattgttgatgcttgtgagaagcttcaaggtgcttattcgatggtgtttgtgactgaggataagcttgttgctgttcgtgacccacatgggtttaggcctttagttatgggtaggagaagtaatggagctgttgtgtttgcttctgagacttgtgctcttgatttgattgaagctacttatgagagagaggtttatcctggtgaggttttagttgtggataaagatggtgtcaaatgtcagtgtttgatgcctcatcctgagccaaagcaatgcattttcgaacatatttacttctcgttgcctaattcgattgtctttggtcggtctgtgtatgagtctaggcatgtctttggtgagattttagctactgagtcacctgttgattgtgatgtggtgatcgctgtgcctgactcgggtgttgtggctgctcttggttacgcggctaaagctggtgtagcgtttcagcaaggtttgattaggtctcattatgttggaaggactttcattgagccgtctcagaaaatcagagattttggagtgaagctgaagctatcgccagtccgaggagttttagaagggaaaagagttgttgttgttgatgattcgattgttagaggaacaacttcgtccaagattgtgcgtttattgagagaagcgggtgcgaaagaggttcacatgaggatcgcgagtcctcctattattgcatcttgttactacggagtggacacgcctagctcaaatgagttgatatcgaataggatgagtgttgatgaaatcagggattacatcggatgtgattcccttgcgtttttgtcgtttgagacgttaaagaaacatttgggggaagattctagaagcttctgctatgcatgcttcacgggggactatccggtgaagcctacagaggataaggtgaagcgaggaggagattttatcgatgatggtctcgttggaggaatccacaacattgaaggaggttgggtacggtag

SEQ ID NO: 30174 - protein, 561 aa, Arabidopsis thaliana
MAATSSISSSLSLNAKPNKLSNNNNNNKPHRFLRNPFLNPSSSSFSPLPASISSSSSSPSFPLRVSNPLTLLAADNDDYDEKPREECGVVGIYGDSEASRLCYLALHALQHRGQEGAGIVTVSKDKVLQTITGVGLVSEVFSESKLDQLPGDIAIGHVRYSTAGSSMLKNVQPFVAGYRFGSVGVAHNGNLVNYTKLRADLEENGSIFNTSSDTEVVLHLIAISKARPFFMRIVDACEKLQGAYSMVFVTEDKLVAVRDPHGFRPLVMGRRSNGAVVFASETCALDLIEATYEREVYPGEVLVVDKDGVKCQCLMPHPEPKQCIFEHIYFSLPNSIVFGRSVYESRHVFGEILATESPVDCDVVIAVPDSGVVAALGYAAKAGVAFQQGLIRSHYVGRTFIEPSQKIRDFGVKLKLSPVRGVLEGKRVVVVDDSIVRGTTSSKIVRLLREAGAKEVHMRIASPPIIASCYYGVDTPSSNELISNRMSVDEIRDYIGCDSLAFLSFETLKKHLGEDSRSFCYACFTGDYPVKPTEDKVKRGGDFIDDGLVGGIHNIEGGWVR

SEQ ID NO: 30175 - DNA, 1599 bp, Arabidopsis thaliana
  CDS (1)..(1599)
atggccttctctgtagaagaaatctcgtctattctccctaacagtttatccgcaaaccctaggaatgtttctcaaaatactatttccccttcctttttcaagccctcccttaaaccgtacgcttccaaaaccctaatctcattgtcatgtagacgctcactttcccctgttttctcggcgggaacatatgtcactaacgttgacgaagatgacaagcttcacgaagaatgcggagttgtcggaatccatggagaccctgaagcttcccgtctctcttacttggctctacacgcactgcaacaccgtggccaagaaggagcaggaattgtagccgctaatcaaaacggtctcgaatcaatcacaggggtcggattagtctcagatgtgttcaccgagtcaaaactaaacaatcttcctggcgacatagcgatagggcatgtccggtactcaacttccggagcctctatgctcaagaatgttcagcctttcatcgctagctgcaagctaggatcactcgcagtagctcacaatggtaatttcgtgaattacaagcaactgaagacaaagctcgaggagatgggttcaatcttcatcacaagttctgataccgagctcgttcttcacctgatcgccaaatctaaggctaagacgtttcttttgagggtcattgatgcttgtgagaagcttagaggtgcttactcgatggttttcgtctttgaagacaagcttattgctgttcgtgacccttttgggtttagaccacttgtgatgggcagaagaagcaacggagcagttgtttttgcctccgagacttgtgctctggacctgattgatgcgacttatgaacgtgaagtgtgtcccggtgagattgtggtcgtggatagaaaccatggagacagttcaatgttcatgatctctcaccctgaacagaaacagtgcgtttttgagcatggttacttctcacagcccaactcaattgtctttggccgttctgtgtatgaaacacgccgcatgtacggcgagatcctagccaccgtggcacctgtcgattgtgatgttgtcattgcagtgccagactcggggacagtggctgctcttggatatgcagccaaagctggagtgccgttccagattggtcttctgagatcacactatgctaaacgtacgtttatagagccgactcaggaaatccgtgattttgcagtgaaggtgaagctatctcctgttcgagcagtccttgaagggaagcgggtggtagtagtggacgactctattgtccgcggtaccacgagtttgaagatagttcggatgcttagagatgccggagcaaaggaggttcatatgagaatcgcattgccgccgatgattgcatcgtgttactatggagtggacaccccgaggagccaagagttgatctctagtaagatgagcgttgaggcgatccagaagcatattaattgtgattctttggcgtttctaccattagatagcttgaaaggagtctatggaccagtcgagtcacacaggtattgctatgcctgctttactgggaagtaccctgtgaccaaaacagagtctgaggaggccgacgcttcatga

SEQ ID NO: 30176 - protein, 532 aa, Arabidopsis thaliana
MAFSVEEISSILPNSLSANPRNVSQNTISPSFFKPSLKPYASKTLISLSCRRSLSPVFSAGTYVTNVDEDDKLHEECGVVGIHGDPEASRLSYLALHALQHRGQEGAGIVAANQNGLESITGVGLVSDVFTESKLNNLPGDIAIGHVRYSTSGASMLKNVQPFIASCKLGSLAVAHNGNFVNYKQLKTKLEEMGSIFITSSDTELVLHLIAKSKAKTFLLRVIDACEKLRGAYSMVFVFEDKLIAVRDPFGFRPLVMGRRSNGAVVFASETCALDLIDATYEREVCPGEIVVVDRNHGDSSMFMISHPEQKQCVFEHGYFSQPNSIVFGRSVYETRRMYGEILATVAPVDCDVVIAVPDSGTVAALGYAAKAGVPFQIGLLRSHYAKRTFIEPTQEIRDFAVKVKLSPVRAVLEGKRVVVVDDSIVRGTTSLKIVRMLRDAGAKEVHMRIALPPMIASCYYGVDTPRSQELISSKMSVEAIQKHINCDSLAFLPLDSLKGVYGPVESHRYCYACFTGKYPVTKTESEEADAS

SEQ ID NO: 30177 - DNA, 1398 bp, Aquifex aeolicus VF5
  CDS (1)..(1398): transl_table=11
atgtgcggagttgcaggagtctttaattccccttacgcagcggaatatgcccttttaatgatttactcactccagcacaggggacaggaaagtgtagggataagttcctctgatgaaaaggaaatttacaccgttaaaaaacccggaagggttttagaagcgataaaaaaagaagaccttgaaaaattaaaaggaagtatagcgatagcacacgtcaggtactcaacagcgggaaacgcaggaggctttaacgcccagcctcttgtgagggaaacacctctcggaaaagttgcggtagtacacaacggaaacctcgtaaacttcctaactttgagaaaggagcttgaagataaaggtataaagttcaattacaactctgacagcgaactctttttagcacttcttgaggaaggaaggacctatatacctgaaggtgtaacgcttcatccggaggacaaggatttccttccctacatcttttacgccctttctagagttaaaggtgcctacagtttgatatacctctttagggacaagctcgtagttgcgagggatccatacggtttcagacccttagccttgggaaggaagaaaaacaccattctggtagcttcggagagctgtgcctttgacatacttgaagctgaattctggagagaagtaaaaccgggtgaagttctcgtaatagacaaaaaaggaaagaggagctacaggatattcagttcacccagaaaagctatgtgcatatttgagtttgtgtacttctcaagaccggacagctacatattcggcgactgggtatacaacgtgagaaaagaaatgggaagacagcttgcgagagaagataacatagaagcggacgttgtcattcccgttcccgattctggagtcgttccggcactcggatacgcggaggaaaagggactgccttttgagtacgggcttataagaaaccactacgtgggaaggagctttatagaaccaacacccgaactcagaaacttaagagttttaatgaagctctctcccaacagagccgttctgcaagggaagagagttatagttatagatgactccctcgtgagaggaactacctcaaagaggatagtcagcatgctcaggagggcaggtgctaaggaaatacacatgaggatagcctctccgcccgtcgtgggaccctgttactacggcatagacacgcccacaaaagaggagttaatagcaaacaaaatgccgatagaggatatagccaagttcataggtgtagattccctgaagtacctttctttagaaggcttgagaaagtgtgttgataagcctgaagatttctgcgacgcatgctttagcctgaattatcccgtagaagttgaagataatgtcccctcaaagatacgctaa

SEQ ID NO: 30178 - protein, 465 aa, Aquifex aeolicus VF5
MCGVAGVFNSPYAAEYALLMIYSLQHRGQESVGISSSDEKEIYTVKKPGRVLEAIKKEDLEKLKGSIAIAHVRYSTAGNAGGFNAQPLVRETPLGKVAVVHNGNLVNFLTLRKELEDKGIKFNYNSDSELFLALLEEGRTYIPEGVTLHPEDKDFLPYIFYALSRVKGAYSLIYLFRDKLVVARDPYGFRPLALGRKKNTILVASESCAFDILEAEFWREVKPGEVLVIDKKGKRSYRIFSSPRKAMCIFEFVYFSRPDSYIFGDWVYNVRKEMGRQLAREDNIEADVVIPVPDSGVVPALGYAEEKGLPFEYGLIRNHYVGRSFIEPTPELRNLRVLMKLSPNRAVLQGKRVIVIDDSLVRGTTSKRIVSMLRRAGAKEIHMRIASPPVVGPCYYGIDTPTKEELIANKMPIEDIAKFIGVDSLKYLSLEGLRKCVDKPEDFCDACFSLNYPVEVEDNVPSKIR

SEQ ID NO: 30179 - DNA, 1296 bp, Thermotoga maritima MSB8
  CDS (1)..(1296): transl_table=11
atgtgcggaatcgcaggagtctggaatgtgaaagatgccttttctgtccttcacgacgtgcttctcggtcttcagcatagaggacaggaaagtgtgggtgttgtggtagacgggttcaaaacgataaaaggaaaaggactcgtagacaccgttctcaccgaagacaggtgggaagacgctgaaaagggtattggacacgtaaggtactccacggcaggatcgctcgaggacattcagccaatcgtggcgttcacgagaaagggaaggctcgcgatcgctcacaacggaaacatacccaacggcgaaaagtggatagagatgctcaaagaaaaaggagcggttttccagagctcgctcgactcggaggtcttccttcatctcatctcgatgtctgaaggtgacctgaaagagtccatagtgaaagcgctgaagaaagtccctcttgcctactcacttctcattctacacgaagaattcctcgctgcggcgagagacccatacggcgtccgtcccctgttctatggaaaatacggtgatggaatcgttgtggcatcggaagacgcagcgctgaaagcgataggtgtggaagacatagaagaagttccctctggaacggtcgtgttcttctcgaacaaaggcacagaaacggtgaggttctccaaaaaagaaaagcggttctgctccttcgaattcatctatttcgcgaggccggacagtcactttctcgatcagagtgtacacatagcccgttacagaatgggtgaagaactctacagagaaaacccgatagaagcggacgtggtcgttccggtgctggactccggactttccggagcgatgggattttcttcggcttcgggtatacctctcgacatcggtctcatgaggaacagatatgtgggaagaagtttcatcatgccggtggacagggaaaagatcgtcaagaaaaaactcgtccccatagaagacgttgtgagtggaaagagggttgttgtaatcgatgattcgatcgtcagaggaacaaccatgggcatcatcgtgaagatattgagagaggcgggtgcgaaggaagtacacgttggcatacactctccacctgtacgttttccctgtttctacggaatagataccgccagaaagaaagagctcgtcgcgggagaacgtgccgtggaagaagtgaaaaaaatagtcaacgcagactctctcttttacctttcactcgaagggttgaaaagagccatcgggaggagtgaactgtgtgtagcgtgcttcagcggagagtacctccacgaatag

SEQ ID NO: 30180 - protein, 431 aa, Thermotoga maritima MSB8
MCGIAGVWNVKDAFSVLHDVLLGLQHRGQESVGVVVDGFKTIKGKGLVDTVLTEDRWEDAEKGIGHVRYSTAGSLEDIQPIVAFTRKGRLAIAHNGNIPNGEKWIEMLKEKGAVFQSSLDSEVFLHLISMSEGDLKESIVKALKKVPLAYSLLILHEEFLAAARDPYGVRPLFYGKYGDGIVVASEDAALKAIGVEDIEEVPSGTVVFFSNKGTETVRFSKKEKRFCSFEFIYFARPDSHFLDQSVHIARYRMGEELYRENPIEADVVVPVLDSGLSGAMGFSSASGIPLDIGLMRNRYVGRSFIMPVDREKIVKKKLVPIEDVVSGKRVVVIDDSIVRGTTMGIIVKILREAGAKEVHVGIHSPPVRFPCFYGIDTARKKELVAGERAVEEVKKIVNADSLFYLSLEGLKRAIGRSELCVACFSGEYLHE

SEQ ID NO: 30181 - DNA, 1422 bp, Bacillus halodurans C-125
  CDS (1)..(1422): transl_table=11
atgtttgctgaaatcaaaggcttaaacgaagaatgtggtgtgtttgcgatttggggtcatgaagatgcggcacaagtagcttattacggcttgcacagcctccaacatcgcgggcaagaaggcgctggaatcgttgtgacagatggccatcaactgtcggttcacaaaggactcggtttagttaatgatgtctttaatcctgatatttttgattcgttaaaaggaaaggcagctgtcggtcacgttcgctatgcgacggcaggaggtgggggctatgctaacgttcagccccttgtcttccgttcacagattggtagccttgcgatcgcccataacggaaatctcgtcaatgcgaaccatttaaaaaatcaattggagaatcagggaagtatttttcaatcaacgtccgatacagaagtgctcgcccatctcattaagcgaagcggatatcaccatattcgggagcagttgaaaagctcgctctccatgcttaaaggagcctatgcctttgcggtgatgacggaacgtgagctcatggtcgcacttgatccgaatggtttgcgccccctttccatcggtcgattgggagaagcctacgtcgttgcctctgaaacatgtgcctttgacgtcatcggtgctgaatatgtgcgtgaagtggagcctggggagctcgtgacgattaacgacgacggtcttacgtcagagcggtttgtaggcgaagcggcccgtgccatttgtagcatggagtacgtttacttcgcacgtcctgatagcaacgtggatacgatcaatgttcatacagctcggaaaaatttagggaagcaactcgcgattgaagctccagtagaagcagatgtcgtgactggggtacctgattccagtatctctgcggcgattggttatgctgagcagtcagggattccgtatgagttaggcttaatcaaaaatcgttatgtaggacgaacgtttattcagccgtcccaagccttgcgcgaacaaggggtcaaaatgaagctttccgctgtacgtggagttgtggaaggcaagcgtgtcgtcatgattgatgattccatcgtgcgtgggacgacgagccgacgaattgtcaacatgctccgtgaagcgggagcgaaagaggtgcatgtccgcattagtgcaccgccgattaagcatccgtgcttttatgggattgatacatcaacaaaagaagagttaattgcagccactcattcgattgaagagatgcgcaagcaaatgggtgcagactcgttatccttcttaagcttagaaggtcttgttaaaggggttggccgttcgaatgaagtgtcttcatgcggacaatgtttagcgtgctttaccggacaatacccgacagaaatttatcctgatacacttcatccacacgacaagcttttaccggtatag

SEQ ID NO: 30182 - protein, 473 aa, Bacillus halodurans C-125
MFAEIKGLNEECGVFAIWGHEDAAQVAYYGLHSLQHRGQEGAGIVVTDGHQLSVHKGLGLVNDVFNPDIFDSLKGKAAVGHVRYATAGGGGYANVQPLVFRSQIGSLAIAHNGNLVNANHLKNQLENQGSIFQSTSDTEVLAHLIKRSGYHHIREQLKSSLSMLKGAYAFAVMTERELMVALDPNGLRPLSIGRLGEAYVVASETCAFDVIGAEYVREVEPGELVTINDDGLTSERFVGEAARAICSMEYVYFARPDSNVDTINVHTARKNLGKQLAIEAPVEADVVTGVPDSSISAAIGYAEQSGIPYELGLIKNRYVGRTFIQPSQALREQGVKMKLSAVRGVVEGKRVVMIDDSIVRGTTSRRIVNMLREAGAKEVHVRISAPPIKHPCFYGIDTSTKEELIAATHSIEEMRKQMGADSLSFLSLEGLVKGVGRSNEVSSCGQCLACFTGQYPTEIYPDTLHPHDKLLPV

SEQ ID NO: 30183 - DNA, 1515 bp, Pasteurella multocida subsp. multocida str. Pm70
  CDS (1)..(1515): transl_table=11
atgtgtggtattgttggtattgttagccaaagcccagttaaccaatcaatttatgatgcgttaaccttattgcaacaccgcgggcaagacgccgccgggattgtaaccgtagatgatgaaaaccgattccgcttgcgtaaagcgaacgggttagtcagcgatgtatttgaacaagttcatatgttacgtttacaaggcaatgctggcattggacatgttcgttatcctactgctgggagctcaagtgtctctgaagcgcaacctttttatgtaaattcgccttatggcttaaccttagtgcataatggtaacttgaccaattcaagtgaattaaaagaaaagttatttcgtcgcgcgcgtcgccatgtaaataccaattcagattctgaattattactcaatatcttagccaatcaccttgatcacttcgaaaaataccaattagatccgcaagatgtatttagtgctgtcaaacaaacgcatcaggatattcgtggtgcttatgcttgtatcgccatgattattggtcatggtatggtcgcgtttcgcgatccgaacggtatccgtccattagtgttagggaaacgcgaggaaaatggcaaaacagagtatatgtttgcctccgaaagtatcgcattagatacagtgggttttgaatttgtacgagatgtacaacccggcgaagcgatttatgtcacgtttgaaggggaaatgtatgcccagcaatgtgctgacaaaccaacattaacaccttgtatttttgaatatgtctattttgcacgtccagactcctgcatcgatggggtttctgtttatgctgcccgtgttcatatgggacagcgtttaggtgaaaaaattgcacgggaatgggcggatgtggatgatattgatgtggtcattcctgtgcctgaaacctctaacgatattgctttacgtattgcgcgcgtgttaaataaaccgtatcgtcaaggttttgtgaaaaatcgctatgtggggcgtacgtttattatgccgggtcaggcattgcgagtcagttctgttagacgtaaactcaataccattgcttcagaatttaaagataagaatgtgttattagttgacgactcgattgtacgtggtaccacgtctgaacaaattgtcgaaatggcgagagcggcaggtgcgaagaaaatttattttgcctctgctgcaccggaaattcgttatccaaatgtgtatggtattgatatgccgaccaaaaatgaattgatcgcttatggtcgtgatgtagatgaaattgctaaattaattggtgtggataaattgattttccaagatttggatgcgttaaccggttctgtgcaacaagaaaatccaagtattcaagactttgattgttcggtgtttacaggggtttatgtgacgggtgatattacacctgaatatctggataatattgcagaacagcgtaatgatatcgccaagaaaaagcgtgaaaaagatgctaccaatcttgaaatgcacaatgaaaaataa

SEQ ID NO: 30184 - protein, 504 aa, Pasteurella multocida subsp. multocida str. Pm70
MCGIVGIVSQSPVNQSIYDALTLLQHRGQDAAGIVTVDDENRFRLRKANGLVSDVFEQVHMLRLQGNAGIGHVRYPTAGSSSVSEAQPFYVNSPYGLTLVHNGNLTNSSELKEKLFRRARRHVNTNSDSELLLNILANHLDHFEKYQLDPQDVFSAVKQTHQDIRGAYACIAMIIGHGMVAFRDPNGIRPLVLGKREENGKTEYMFASESIALDTVGFEFVRDVQPGEAIYVTFEGEMYAQQCADKPTLTPCIFEYVYFARPDSCIDGVSVYAARVHMGQRLGEKIAREWADVDDIDVVIPVPETSNDIALRIARVLNKPYRQGFVKNRYVGRTFIMPGQALRVSSVRRKLNTIASEFKDKNVLLVDDSIVRGTTSEQIVEMARAAGAKKIYFASAAPEIRYPNVYGIDMPTKNELIAYGRDVDEIAKLIGVDKLIFQDLDALTGSVQQENPSIQDFDCSVFTGVYVTGDITPEYLDNIAEQRNDIAKKKREKDATNLEMHNEK

SEQ ID NO: 30185 - DNA, 1416 bp, Methanocaldococcus jannaschii DSM 2661
  CDS (1)..(1416): transl_table=11
atgtgtgggatatttggaatctactcttatgaaaggttaaatgtagctaaaaaaatttattatgggttgtttgctttacagcatagagggcaggaaggggctggaattgctacaagtgatgggaaaaatatacactactataaaaatattggattagttacagatgtttttaaaaatgagacattacaaaacttatttggctatattggaattggacatgtaagatattcaacaacgggaggaaaggctgttgaaaactgtcagccgtttgtagttaaaagttcatttggtaatatagctatagcccataatggagatttagtaaattcagacgaattaagaagagaattagagatgaaggggcatatattcacttcttcaactgactctgaagttatagctcaacttttggttagagaattgttaaaaacatctgataagattgaggcaataaaaaatacattaaaaaagctcgttggagcttattcacttttaataatgtttaatgattccttaattgcagtaagagacccttggggctttaaaccattgtgtattggaagagatgagagcaatatctatatatcatctgaggattgtgcattaacaaccttagatgctgaatttgttaaagatattgagccaggagaaattatagaaattaaagacggggaaataatatctcataaattagattatggtgtttctgaatacaaccctgtgaatgtcgatgtgccatgtatatacagaggagcggcaacttgtatgtttgagtatgtgtattttgcaagacctgactcaacaattgatggtattagcgtctataaggttagaaagaggattggaaaaattttggctaaagaacatccagtagatgctgatgttgtttctccaatccccgattcaggagtcacatttgccttaggattttctgaagagtcagggattccatactatgaaggtttaataaagaacagatatgttggaagaacttttattcttccatcccaaaatgagagagaattggcagtaaggttaaaattaagtccagtaaaaagtgtattggaagggaagagggttgttttggttgatgatagtattgttagaggaacaacatcaagaagaattgtaaatatggttagaaaagctggagctaaggaggtgcatttaagaattggctgtcctaagattatatccccttgctattatggtatagatatggctactaaaaaggaacttattgcctcaaacaaaacagaagaagagatagggaaagctattggagttgattctattggatatttatcattagagggattagttaaagctataggtagaaaagatttatgtttagcttgtgtaactggaaaatatccaactgaagttaattttgaaaagatattggggagagaataa

SEQ ID NO: 30186 - protein, 471 aa, Methanocaldococcus jannaschii DSM 2661
MCGIFGIYSYERLNVAKKIYYGLFALQHRGQEGAGIATSDGKNIHYYKNIGLVTDVFKNETLQNLFGYIGIGHVRYSTTGGKAVENCQPFVVKSSFGNIAIAHNGDLVNSDELRRELEMKGHIFTSSTDSEVIAQLLVRELLKTSDKIEAIKNTLKKLVGAYSLLIMFNDSLIAVRDPWGFKPLCIGRDESNIYISSEDCALTTLDAEFVKDIEPGEIIEIKDGEIISHKLDYGVSEYNPVNVDVPCIYRGAATCMFEYVYFARPDSTIDGISVYKVRKRIGKILAKEHPVDADVVSPIPDSGVTFALGFSEESGIPYYEGLIKNRYVGRTFILPSQNERELAVRLKLSPVKSVLEGKRVVLVDDSIVRGTTSRRIVNMVRKAGAKEVHLRIGCPKIISPCYYGIDMATKKELIASNKTEEEIGKAIGVDSIGYLSLEGLVKAIGRKDLCLACVTGKYPTEVNFEKILGRE

SEQ ID NO: 30187 - DNA, 1506 bp, Pseudomonas aeruginosa PAO1
  CDS (1)..(1506): transl_table=11
atgtgtggcatcgtcggtatcgtgggcaagtcgaacgtcaatcaggcgctgtatgacgcgctcaccgtcctccaacatcgcggccaggacgctgccggtatcgtcacctgccatgacgataagctgtacctgcgcaaggacaacggcctggtccgcgacgtcttccagcagcgccacatgcagcgcctgatcggcagcgtcggcatcggccatgtgcgttacccgaccgccggcagctccagctcggcggaagcgcagccgttctacgtcaactcgccctacggcatcaccctggcgcacaacggcaacctgaccaatgtcgagcagttggccaaggaaatctacgaatccgacctgcgccacgtgaacaccaactccgattcggaagtgctgctcaacgtgttcgcccacgagctggcggtgcgcaacaagctgcagcccaccgaggaggacatcttcgccgcggtttcctgcgtgcacgaccgttgcgtcggcggctacgcggtggtggcgatgatcaccggccatggcatcgtcggtttccgcgaccccaatgcgatccgtccgatcgtcttcggccagcggcataccgagaacggcgtcgaatacatgatcgcctccgagagcgtggccctggacgtactcggcttcaccctgatccgcgacctggcgccgggcgaggcggtgtacatcaccgaggaaggcaagctctatacccgccagtgcgccaaggcaccgaagtacgcgccgtgcatcttcgagcacgtctacctggcgcgtccggattcgatcatggacggcatctcggtgtacaaggcgcgcctgcgcatgggcgagaagcttgccgacaagatcctccgcgagcgtcccgaccacgacatcgacgtggtcatcccgatcccggacaccagccgcaccgcggcgctggaactggccaaccggctcggcgtgaagttccgcgagggcttcgtcaagaaccgctacatcggccgcaccttcatcatgcccggccaggcggcgcggaagaaatccgtgcggcagaagctcaacgccatcgagctggagttccgcggcaagaacgtgatgctggtggatgactccatcgtccgcggcaccacctgcaagcagatcatccagatggcccgcgaggccggggcgaagaacgtctacttctgctccgccgcgccggccgtgcgctaccccaacgtctacggcatcgacatgccgagtgcgcacgagctgatcgcgcacaatcgcagcaccgaggacgtcagcaagctgatcggcgccgactggctggtctaccaggacctgcccgacctgatcgacgcggtcggcggcggcaagatcaagatcgatcacttcgactgcgccgtgttcgacggcgagtacgtgaccggcgacgtcaacgaggcctacctgaaccggatcgaacaggcgcgcaacgatgcgaccaaggccaagagccaggcggtcagcgcgatcatcgatctgtacaacgactga

SEQ ID NO: 30188 - protein, 501 aa, Pseudomonas aeruginosa PAO1
MCGIVGIVGKSNVNQALYDALTVLQHRGQDAAGIVTCHDDKLYLRKDNGLVRDVFQQRHMQRLIGSVGIGHVRYPTAGSSSSAEAQPFYVNSPYGITLAHNGNLTNVEQLAKEIYESDLRHVNTNSDSEVLLNVFAHELAVRNKLQPTEEDIFAAVSCVHDRCVGGYAVVAMITGHGIVGFRDPNAIRPIVFGQRHTENGVEYMIASESVALDVLGFTLIRDLAPGEAVYITEEGKLYTRQCAKAPKYAPCIFEHVYLARPDSIMDGISVYKARLRMGEKLADKILRERPDHDIDVVIPIPDTSRTAALELANRLGVKFREGFVKNRYIGRTFIMPGQAARKKSVRQKLNAIELEFRGKNVMLVDDSIVRGTTCKQIIQMAREAGAKNVYFCSAAPAVRYPNVYGIDMPSAHELIAHNRSTEDVSKLIGADWLVYQDLPDLIDAVGGGKIKIDHFDCAVFDGEYVTGDVNEAYLNRIEQARNDATKAKSQAVSAIIDLYND

SEQ ID NO: 30189 - DNA, 1500 bp, Lactococcus lactis subsp. lactis Il1403
  CDS (1)..(1500): transl_table=11
atgtttggcaaagaacagacgcttgatttaagagtgctggggaagaattcgtccaatgaaaatagttggtggcaacaacatccagatgacgaacgatctcatttaaatgaagaatgtggacttttcggtgttttgggacatcctgatgctgctcgcctgacctattttggacttcatgctctccaacatcgcgggcaagaaggcgcagggattttggtcaataataatggcaaactcaatcgtcatcgtggtctgggtctggtcacagaagttttccgtgacgaaaaagatttggaagagctgacaggctcgtcagccattggacacgtccgttatgccacggctggttcagcaaatatcaataatattcagcctttccagtttgaatttcatgacggagcacttggacttgcccacaatggaaatttaaccaacgcccaatcattgcgctgtgaacttgaaaaatctggggcaatcttttctagtaattcagacacggaaattctcatgcacttgattcgccgtagtcatcatccagaatttatgggcagagtcaaagaagcgctcaatacggtcaaaggtggctttgcctatctcattatgactgaaaactcaattgtcgcagcccttgatcctaatggatttcgaccactctcaatcggaaaaatgagcaatggtgcgctcgttgtggcctcagaaacctgtgcttttgatgtcgttggtgccacttggattcaagatgttcaacccggtgaaatcattgaaattaatgacgacggcattcatgtggaccaatttactgacagcaccaacatgaccatttgttcaatggaatacatctattttgcccgtcctgacagtaatattgctggagttaatgttcatactgccagaaaacgttcaggaaaaattttagcccaagaagcccaaattgatgctgatattgtcatcggtgtgcctaattcatcactcagtgccgcttcaggctacgctgaagaatctggcttgccttacgaaatgggcctgattaaaaatcagtatgtggcaagaaccttcattcaaccgactcaagaacttcgtgaacaaggcgttcgcatgaaattgagtgctgttcgaggtgttgtagaaggcaaacgtgtcattatggtggatgatagtattgtgcgtgggacaaccagccgtcgcattgtcaaactcctcaaagacgcaggcgccgctgaagttcatgtggcaatcgccagtcccgctctcaaatatccttgcttttatggcattgatattcaagatcgtgacgaactcatcgcagctacacacacgactgatgaaatcagagaagctatcggagcagatagtctgacctatctcagccagacaggacttgtcgaggcgattggtcatgataaactttgcttgtcatattttgatggcgaatatccaacgccgctttatgattatgaagctgactatttggaatcgttagcgaaaaatagcgtgaaatga

SEQ ID NO: 30190 - protein, 499 aa, Lactococcus lactis subsp. lactis Il1403
MFGKEQTLDLRVLGKNSSNENSWWQQHPDDERSHLNEECGLFGVLGHPDAARLTYFGLHALQHRGQEGAGILVNNNGKLNRHRGLGLVTEVFRDEKDLEELTGSSAIGHVRYATAGSANINNIQPFQFEFHDGALGLAHNGNLTNAQSLRCELEKSGAIFSSNSDTEILMHLIRRSHHPEFMGRVKEALNTVKGGFAYLIMTENSIVAALDPNGFRPLSIGKMSNGALVVASETCAFDVVGATWIQDVQPGEIIEINDDGIHVDQFTDSTNMTICSMEYIYFARPDSNIAGVNVHTARKRSGKILAQEAQIDADIVIGVPNSSLSAASGYAEESGLPYEMGLIKNQYVARTFIQPTQELREQGVRMKLSAVRGVVEGKRVIMVDDSIVRGTTSRRIVKLLKDAGAAEVHVAIASPALKYPCFYGIDIQDRDELIAATHTTDEIREAIGADSLTYLSQTGLVEAIGHDKLCLSYFDGEYPTPLYDYEADYLESLAKNSVK

SEQ ID NO: 30191 - DNA, 1545 bp, Neisseria meningitidis MC58
  CDS (1)..(1545): transl_table=11
atgtgcggcgtattaggtttggtcagtcatgaacccgtgaaccagcttctgtacgacggcttgcagatgttgcagcacagggggcaggatgcggcgggcattgcaacggcggaaggcggtaccttccatatgcacaaaggcaaaggcatggtgcgcgaagtgttccgcacacgcaatatgcgcgatttgaccggcaacgccggcatcgcccacgtccgttatcctactgcgggcaacgcaggcagcagcgcggaggcgcagcctttctacgtcagctcgccgttcggcatcgttttggcgcacaacggcaacctcaccaacactgccgaactgtatgaaaacgtgtgtaacaaacacctgcgccacgtcaacaccagctccgattccgaagtcttgctcaacgtattcgcgcacgaattacgccgcgaagtctctaaaaacgccgacccgcaccggctcaatgccgacaatattttcaacgccgttgcccaagtccaccgcctggtgcgcggcgcatacggtgtgattgccatgattgcgggctacggtatgctcgccttccgcgacccttacggcatccgcccgctggtattgggttcgcaaaccgacagcgaaggcagaaaatcctatgccgtcgcctccgaatccgtcgccttcaacgcgcttacctacgatttggaacgcgacatccggccgggcgaagcggtatttgtcggctttgacggcacaatgattgcccgccaatgcagcgaccgtgccaaactcagcccctgcctttttgaatatgtttattttgcccgccccgactctgtgattgacggcgtatccgtttaccaatcgcgcttggatatgggcgtgtcgctggcggaaaaaatcaaacgcgagctgcccgtggacggcatcgatgtcgtgatgcccattcccgacaccagccgccccagcgcgatggagcttgccgtccatctcgacaaaccctaccgcgagggtttgattaaaaaccgctatatcggccgcacctttattatgcccggacaggcgacgcgcaaaaaatccgtgcgccaaaaactcagcccgatggaaaccgaatttgcaggcaaaagcgtgttgctggtggacgactccatcgtgcgcgggacgaccagccgcgaaatcgtcgaaatggtacgcgcggcgggcgcgcgcaaagtctatatcgcctccgccgcgcccgaagtgcgctatcccaatgtgtacggcattgatatgcccacgcgcgaagagttgattgccaacgggcgcagcgcggcggaaatcgccgccgaaatcggcgcggacggcatcgtatttcaagacttgggcgatttggaagccgtcgtcaaagcactcaatccgaaaatcgaatccttcgattcgtcctgtttcaacggcatttatcagaccggcgacatcgatgatgcctacctcgaccgcctgtctgccgagaaatccggctgcggcggtctgaaaatccacccgagcaggatggaacacagcatcagcatcagcgatgcgggcgacgaagaataa

SEQ ID NO: 30192 - protein, 514 aa, Neisseria meningitidis MC58
MCGVLGLVSHEPVNQLLYDGLQMLQHRGQDAAGIATAEGGTFHMHKGKGMVREVFRTRNMRDLTGNAGIAHVRYPTAGNAGSSAEAQPFYVSSPFGIVLAHNGNLTNTAELYENVCNKHLRHVNTSSDSEVLLNVFAHELRREVSKNADPHRLNADNIFNAVAQVHRLVRGAYGVIAMIAGYGMLAFRDPYGIRPLVLGSQTDSEGRKSYAVASESVAFNALTYDLERDIRPGEAVFVGFDGTMIARQCSDRAKLSPCLFEYVYFARPDSVIDGVSVYQSRLDMGVSLAEKIKRELPVDGIDVVMPIPDTSRPSAMELAVHLDKPYREGLIKNRYIGRTFIMPGQATRKKSVRQKLSPMETEFAGKSVLLVDDSIVRGTTSREIVEMVRAAGARKVYIASAAPEVRYPNVYGIDMPTREELIANGRSAAEIAAEIGADGIVFQDLGDLEAVVKALNPKIESFDSSCFNGIYQTGDIDDAYLDRLSAEKSGCGGLKIHPSRMEHSISISDAGDEE

SEQ ID NO: 30193 - DNA, 1473 bp, Halobacterium sp. NRC-1
  CDS (1)..(1473): transl_table=11
atgtcaggcggccccgcggacggacccatgagtgaccatccaaccgagaaatgtggggtcgtcggtgcctcactgtcggcccgtgacgccgcgcttccgacgtactacgcgctgtacgccctccagcaccgcggccaggagtcggcgggcatcgtcgcccacgacggcttccagcaacaccaacacgtcggcatggggctggtgggtgacgccttcgacgaagccgacatcgacgcgctgcacggttcggccgccatcggccacgttcgctatccgaccgcggggagcgtcgacaagtcctgcgcgcagccgttctcggtgtcgttcaagggcggtgcgctcggcctgagccacaacggcaacctcgtcaacgccgacgagttgcgcgcggacctcgcggcaagcgggcacgcgttcaccagcgacggcgacaccgaggtcatcgcccacgacctcgcgcgcaacctcctcgacgccgacctcgtggacgccgtcgagcggaccatggagcgcatccacgggtcgtactcgctgaccatcatgcacgacgacaccgtgttgggcgtccgggacccacgggggaaccgcccgctggtgctggggaccgtcgaggacggctacgtcatcgccagcgagtccgccgcgatcgacaccatcggcggcgatgtcgtccgtgacgtccgtcccggcgaggcgatcgtcctcgacgacgacggcacggggttttccgcccaccagctcgtcgaccgcgacaccactgcccactgctttttcgagtacgtgtatttcgcgcgcccggattcggtcatcgacgacgaactcgtctacgaggtccggcgcaacctcggccgccaactgtggcacgagaccggcgtcgaaagcgatgtcgtggtgcccgtccccgactccgggcgggcgttcgcgtccggctacgccgacgccgccaccgaagacgggagcgacgtggagttcgccgaggggttgatgaaaaaccggtacgtcggccgcacgttcatcatgcccacccaggaggcccgcgagcgcgccgtccggctcaagctcaaccccatcaagtccaccgtcgaggggcagtcggtcacgatcatcgacgactccatcgtacggggcacgaccagcagccagctcgttgatctggtccgggacgcgggcgcaaccgaggtccacgtgcgcatcggcgccccccagatacaggccccgtgttacttcggcatcgacatggcgacccgcgaggaactcatcgccgccgaccggacggccgacgagatcgcggcggagatcggcgcggactcgctgtcgtatctcccgctgtccgcggtcacggcggccatcgggaagagcgaagccgacatgtgcgcggggtgtgtgaccggcgcgtacccatacgacgtcgacggcgaggcgaccgaccgggacgccgagcgcccgacagtcacgccgtccagcgacgactga

SEQ ID NO: 30194 - protein, 490 aa, Halobacterium sp. NRC-1
MSGGPADGPMSDHPTEKCGVVGASLSARDAALPTYYALYALQHRGQESAGIVAHDGFQQHQHVGMGLVGDAFDEADIDALHGSAAIGHVRYPTAGSVDKSCAQPFSVSFKGGALGLSHNGNLVNADELRADLAASGHAFTSDGDTEVIAHDLARNLLDADLVDAVERTMERIHGSYSLTIMHDDTVLGVRDPRGNRPLVLGTVEDGYVIASESAAIDTIGGDVVRDVRPGEAIVLDDDGTGFSAHQLVDRDTTAHCFFEYVYFARPDSVIDDELVYEVRRNLGRQLWHETGVESDVVVPVPDSGRAFASGYADAATEDGSDVEFAEGLMKNRYVGRTFIMPTQEARERAVRLKLNPIKSTVEGQSVTIIDDSIVRGTTSSQLVDLVRDAGATEVHVRIGAPQIQAPCYFGIDMATREELIAADRTADEIAAEIGADSLSYLPLSAVTAAIGKSEADMCAGCVTGAYPYDVDGEATDRDAERPTVTPSSDD

SEQ ID NO: 30195 - DNA, 1338 bp, Campylobacter jejuni subsp. jejuni NCTC 11168
  CDS (1)..(1338): transl_table=11
atgtgtgcagttgtaggagttatcaattcaaaaaatgctagcacttatgcgtattatgcgctttttgctatgcaacaccgtgggcaagaagcaagtggcattagtgtgagtaatggtaaaaatattaagactattaaagctaaaggtgaagtgagtcaaatttttaatcctgataatctaaaaactttagaaggtgaaatcgctataggccataatcgctattctacagcaggaaattcaagtttaaatgacgctcagcccatagcagctacttcggttttaggtgatattgctttagcgcataatggaaatttagtcaataaagaagaggtaagatcaagacttattcaagatggagctatttttcaaaccaatatggatacagaaaatgttgtccatcttatcgcaagaagtaagcaagaaagtctaaaagatagatttattgagagtttaaaagaatgtataggagcttattgttttgttttagcaagcaaagataaactttatgttgtaagagatcctcatggggtgcgtcctttgtctttagggcgtttaaaagatggaggctatatagttgctagtgaaacttgtgcttttgatcttatagaggctgaatttattcgtgatgttaaaccaggggaaatgcttatttttactcagggaaatgataaatttgaaagcatagaacttttttctcaaactcctagaatttgcgcttttgaatacatttattttgctagacctgatagtatagtagaaggcaaaagcgtgtatgaagtgcgtaaaaaaatgggcgaagctttagctaaaaaatttgcttataaagcagactttgtcgtgcctgtgccagatagtggagtaagtgcagctataggttttgcgcaatatttacaaatccctcttgaaatggcaatagtaagaaatcattatgtaggaagaacttttatagagccaactcaagagcttagaaatttaaaagtaaaattaaaacttaatcctatgcgtaaagttttagaaggcaaagaaatcgtagtcattgatgatagcttggtgcgtggcactacttctaaaaaaataatttctttgcttcgtgctgcaggagcgagcaaaatccatcttgccatagcttgtcctgagatcaaatttcctgatacttatggcatagatactccaacttttgaagaacttatcagtgcaaataaaaatgctgaagaagtgcgtgaatatgtagaagctgatacgctaagttttttaagcatagaagagctaactcaaagcataggcgatgaaaggaaatattctttaatcagttttgatggagattattttattaaataa

SEQ ID NO: 30196 - protein, 445 aa, Campylobacter jejuni subsp. jejuni NCTC 11168
MCAVVGVINSKNASTYAYYALFAMQHRGQEASGISVSNGKNIKTIKAKGEVSQIFNPDNLKTLEGEIAIGHNRYSTAGNSSLNDAQPIAATSVLGDIALAHNGNLVNKEEVRSRLIQDGAIFQTNMDTENVVHLIARSKQESLKDRFIESLKECIGAYCFVLASKDKLYVVRDPHGVRPLSLGRLKDGGYIVASETCAFDLIEAEFIRDVKPGEMLIFTQGNDKFESIELFSQTPRICAFEYIYFARPDSIVEGKSVYEVRKKMGEALAKKFAYKADFVVPVPDSGVSAAIGFAQYLQIPLEMAIVRNHYVGRTFIEPTQELRNLKVKLKLNPMRKVLEGKEIVVIDDSLVRGTTSKKIISLLRAAGASKIHLAIACPEIKFPDTYGIDTPTFEELISANKNAEEVREYVEADTLSFLSIEELTQSIGDERKYSLISFDGDYFIK

SEQ ID NO: 30197 - DNA, 1545 bp, Neisseria meningitidis Z2491
  CDS (1)..(1545): transl_table=11
atgtgcggcgtattaggtttggtcagtcatgaacccgtgaaccagcttctgtacgacggtttgcagatgttgcagcacagggggcaggatgcggcgggcattgcaacggcggaaggcggtaccttccatatgcacaaaggcaaaggcatggtgcgcgaagtgttccgcacacgcaatatgcgcgatttggtcggcaacgccggcatcgcccacgtccgttatcctactgcgggcaacgcgggcagcagcgcggaggcgcagcctttctacgtcagctcgccgttcggcatcgttttggcgcacaacggcaacctcaccaacacggccgaactttatgaaaacgtgtgcaacaaacacctgcgccacgtcaacaccagctccgattccgaagtcttgctcaacgtattcgcgcacgaattgcgccgcgaagtctctaaaaacgccgacccgcaccggctcaatgccgacaatattttcaacgccgttgccgaagtccaccgcctggtgcacggcgcatacggtgtggttgccatgattgcgggctacggtatgcttgccttccgcgacccttacggcatccgcccgctggtattgggttcgcaaaccgacagcgaaggcaggaaatcctatgccgtcgcctccgaatccgtcgccttcaacgcgcttgcctacgatttggaacgcgatatccggccgggcgaagcggtatttgtcggctttgacggcacaatcatcgcccgacaatgcagcgataaggccaaactcagcccctgcctttttgaatacgtctattttgcccgtcccgactccgtgattgacggcgtgtccgtttaccagtcgcgcttggatatgggcgtgtccttggcggaaaaaatcaaacgcgagctgcccgtggacggcatcgatgtcgtgatgcccatccccgacaccagccgccccagcgcgatggagcttgctgtccacctcaaaaagccttaccgcgaaggtttgattaaaaaccgctatatcggccgcacctttattatgcccggccaggcgacgcgcaaaaaatccgtgcgccaaaaactcagcccgatggaaaccgaatttgcaggcaaaagcgtgttgctggtggacgactccatcgtgcgcggtacgaccagccgtgaaatcgtcgaaatggtacgcgcggctggcgcgcgcaaagtctatatcgcctccgccgcgcccgaagtgcgctatcccaacgtatacggcatcgatatgcccacgcgcgaagagttgattgccaatgggcgcagcgcggcggaaatcgccgccgaaatcggcgcggacggcatcgtgtttcaagacttgggcgatttggaagccgtcgtcaaagcactcaacccgaaaatcgaatccttcgattcgtcctgtttcaacggcatttatcagaccggcgacatcgatgatgcctacctcgaccgcctgtctgccgagaaatccggctgcggcggtctgaaaatccacccgagcaggatggaacacagcatcagcatcagcgatgcgggcgacgaagaataa

SEQ ID NO: 30198 - protein, 514 aa, Neisseria meningitidis Z2491
MCGVLGLVSHEPVNQLLYDGLQMLQHRGQDAAGIATAEGGTFHMHKGKGMVREVFRTRNMRDLVGNAGIAHVRYPTAGNAGSSAEAQPFYVSSPFGIVLAHNGNLTNTAELYENVCNKHLRHVNTSSDSEVLLNVFAHELRREVSKNADPHRLNADNIFNAVAEVHRLVHGAYGVVAMIAGYGMLAFRDPYGIRPLVLGSQTDSEGRKSYAVASESVAFNALAYDLERDIRPGEAVFVGFDGTIIARQCSDKAKLSPCLFEYVYFARPDSVIDGVSVYQSRLDMGVSLAEKIKRELPVDGIDVVMPIPDTSRPSAMELAVHLKKPYREGLIKNRYIGRTFIMPGQATRKKSVRQKLSPMETEFAGKSVLLVDDSIVRGTTSREIVEMVRAAGARKVYIASAAPEVRYPNVYGIDMPTREELIANGRSAAEIAAEIGADGIVFQDLGDLEAVVKALNPKIESFDSSCFNGIYQTGDIDDAYLDRLSAEKSGCGGLKIHPSRMEHSISISDAGDEE

SEQ ID NO: 30199 - DNA, 1434 bp, Deinococcus radiodurans R1
  CDS (1)..(1434): transl_table=11
atgtctgaacacttccacgaacacgacctgaatttcgacaagccccgcgaggaatgcggcgttttcggcatctactctgcgcagcccaacgacctcgcgtggctgacctacctgggcctgttcgccctacaacaccgggggcaggaagcggcgggcatgtgcgtcagcgacggcgaccgctttcacgtcgagaaagacctggggctggtcacgcaggtgttcgacgagcggcggctcgacagcgtgcggctggcaggcgcgcaggtcagcatcgggcacgtgcgctactcgaccaccggctccaacctgcgcttcaacgcccagccgctgaccacccgcaccaacaagggcattctgggcatggcgcacaacggcaacttcgtcaacgcgctggaagtgcggcgcgagatgctggaagaaggcgccttgttcgccaccaccaacgacagcgaagtgatgctgaacctgattgcccgcgagagccgcatggacctcgtggaagcgacggcggcggccatgcagcgcctgcgcggcggctatgcctgcgtgctgatgagccgcagccagcttctcggctttcgcgacccgcacggtgttcggcccctggttatcgggcagcgggaggacggcgcgtgggtgctggcttccgaaccctgcgccctgtacgccatcggggcgcggctgattcgggatgtggcgcccggcgaactcgtctggattgaccgcgaagggctgcactccttgatggtcgaggcccgccagcccaccccctgctcgttcgagtggatttattttgcccgctccgacagccagctcgacggcatcgacacccacgagagccgcattcgcatgggccagcagctcgcccgcgaaaagccggtggaggccgacatcgtggtgcccgtgcccgactccggcatcggcgccgccatcgggtacgcccgcgagagcggcatcccgttcgactacggcctctacaaaaacccctacgcgggccgcacctttatcgcccccacgcaggaagcccgcgagctgaaggtcaagatgaagctctcccccacctccgccgtgcgcggcaagcgggtggtgctggtggacgactccatcgtgcgcggcaccaccagccgccagatcgtcaacctgctgcgcgacgcgggcgccaccgaagtgcacttccgcgtgtccagcccgcccatcactcacccgtgcttttacggcatcgacaccgccgcccgcaaggaactggtcgcctcgacgcacagcgtggacgaaatccgtgacctcatcggcgccgacaccctggccttcatcagcgaacaggggctgcgcaaggccatcggcggccctggcctctgctcggcgtgctttacgggggattacccggcaggcacaccgctgttgaatgatgtggataagttggcgctggaagtctag

SEQ ID NO: 30200 - protein, 477 aa, Deinococcus radiodurans R1
MSEHFHEHDLNFDKPREECGVFGIYSAQPNDLAWLTYLGLFALQHRGQEAAGMCVSDGDRFHVEKDLGLVTQVFDERRLDSVRLAGAQVSIGHVRYSTTGSNLRFNAQPLTTRTNKGILGMAHNGNFVNALEVRREMLEEGALFATTNDSEVMLNLIARESRMDLVEATAAAMQRLRGGYACVLMSRSQLLGFRDPHGVRPLVIGQREDGAWVLASEPCALYAIGARLIRDVAPGELVWIDREGLHSLMVEARQPTPCSFEWIYFARSDSQLDGIDTHESRIRMGQQLAREKPVEADIVVPVPDSGIGAAIGYARESGIPFDYGLYKNPYAGRTFIAPTQEARELKVKMKLSPTSAVRGKRVVLVDDSIVRGTTSRQIVNLLRDAGATEVHFRVSSPPITHPCFYGIDTAARKELVASTHSVDEIRDLIGADTLAFISEQGLRKAIGGPGLCSACFTGDYPAGTPLLNDVDKLALEV

SEQ ID NO: 30201 - DNA, 1458 bp, Xylella fastidiosa 9a5c
  CDS (1)..(1458): transl_table=11
atgtgtggtatcctcggtatcgttggcaatcaaaacgttgctggccaactctatgacggtttgactgttctgcagcatcgtggacaagatgctgcaggcattgccacggccagtggcactcgcttgcgcgttcaaaaggccaatggtttggtacgagacgtattcgacgagcagcgtatggcggtccttgatggctgtattgggattgctcattgccgttatccaactgctggttctgaggggatggatgaggcacaacctttttacgtcaactcaccgtatggcattgctctagcacataatggaaaccttatcaacacagaggcgctacaccaacaggtgttcgaagcggatcgacgtaacatcaacaccgactctgacagcgaggtattacttaacgtattcgcatatgagttagatgcgcagcgtatgctcactccagaagcggcaattcgtgctgtagcaggagtacatcgccgctgtaagggcggctatgccgtagtcagcatgatattagggctgggacttgttgcattccgcgatccacacggtatccgtccgttggtgctgggaaagcgtgtacataccgaaggtgatgaatatatggtcgcttccgaatcagctgcactcgatatcctagggtttatacgtatacgcgatgtacgtccaggtgaggctgtggtgattactgcacgtggcgaactgttttcagaggtctgtgctacacctaccaaccatgctccatgcattttcgagtacgtttacttcgcacgtccggattcgatgatcgataatatttcagtacataaggcgcgcatgcgtatgggtgtgaagttaggtgaaaagatcctgcgcttgcgcccgaatcacgatatcgacaccattattccgataccggatacctcgcgggatgcagcgctggaaatatctaacgtgctcggcgtaaagtatcgcgaaggtttcgttaaaaatcgctacgttggccgtacttttatcatgccgggacagggagagcgagttaagtcagtacgtcgtaaacttaacccaatccatctggagttccgaaaccgcgtggtgctgttgattgatgattcaattgttcgcggtaccaccagccgccagattgtccagatggtaagagatgctggtgcacgcaaggtgtacttagcaagtgctgcgcctcctgtgcgttatccaaatgtgtatggcattgatatgccagctgcagatgaattaatcgcacatgatcggactgagcaggaaatacaatcccttcttggctgcgactggttgatttaccaagatttagaggatctagaaaacgctgtgcgcgagggaaaccaagaaatcaagcaatttgattcctcgtgcttcaatggtcattacatcactggaattgaacggggctatttagatcgcatccgtcaactacgctccgatgaggtaaagcgaaaataa

SEQ ID NO: 30202 - protein, 485 aa, Xylella fastidiosa 9a5c
MCGILGIVGNQNVAGQLYDGLTVLQHRGQDAAGIATASGTRLRVQKANGLVRDVFDEQRMAVLDGCIGIAHCRYPTAGSEGMDEAQPFYVNSPYGIALAHNGNLINTEALHQQVFEADRRNINTDSDSEVLLNVFAYELDAQRMLTPEAAIRAVAGVHRRCKGGYAVVSMILGLGLVAFRDPHGIRPLVLGKRVHTEGDEYMVASESAALDILGFIRIRDVRPGEAVVITARGELFSEVCATPTNHAPCIFEYVYFARPDSMIDNISVHKARMRMGVKLGEKILRLRPNHDIDTIIPIPDTSRDAALEISNVLGVKYREGFVKNRYVGRTFIMPGQGERVKSVRRKLNPIHLEFRNRVVLLIDDSIVRGTTSRQIVQMVRDAGARKVYLASAAPPVRYPNVYGIDMPAADELIAHDRTEQEIQSLLGCDWLIYQDLEDLENAVREGNQEIKQFDSSCFNGHYITGIERGYLDRIRQLRSDEVKRK

SEQ ID NO: 30203 - DNA, 1353 bp, Sulfolobus solfataricus P2
  CDS (1)..(1353): transl_table=11
atggatagcatacgtgataaatgtggagtctttgctgtatctagccctaaagaagtaaatattcaactggtagtagagggaattagactacttcagcataggggtcaagaatctgcaggaatcgcatatgctgagaatggggaaatattgacgattaagggatctggacttgtagacgaagtatttaaggaaaatcttaataaatttataaaaaatggaataggtcatgtaagatattcaacaagtggaaaaagctcaattgaagaagcacagcctttaggcgactcaaaaatagtcgtggcgttcaatgggacaataagcaactattaccagtttggatcatttagggtagatactgaatttatatataagttctttaagcaaaaattggcctttcgctctatccctgatactgtaaaggaatttatgaaagttgtcgatggtggatactctgtagctattcttttgaatgatgaagagattgtagtatttagagatcctaaaggatttcatccagttgtattaggatttttagaaggatcattaatagtttcctcggaggattccgttattagacaactaggtgggagcgttttgaaacatattctaccaagcgaaatgataattatgaaaaatggcaaaatattatatgacaaagtaatctatgaggagaaaaattacgctacttgttccttcgaatatatatactttgcaagaccagattccaatatagatgggcattcagtttacttagctaggataaggttaggtgaattattagcagaaaaacacccagctaacggagatattgtagttccagtgccggactcatcaaggccaatagcgctgggcttttctagaaaaagtcacatacctttagaggaacctctagttagaacaatttcctctgtaaggtccttcataatgccaactcaagataagagaaatgaggtattagaagagaaatttggagtggttgcagatgcagtaagggggaaaagaatagttttaatagacgactcaatagttaggggaaatactatgaagagaataataactatgttacgtaaagccggcgccaaagaaattcatgtacgtataggatcacctatgataaaatacccttgttatatgggaatagactttcctaaaagagaagagttgattgcgcataataaatctgaaaaagaaataggaaatgagctgaacgctgattctattgaatttctaagtgtcgaagagatgttacaaggaataggtagaagagacttatgcaatgcatgcttttctgggatttatcctctcaaatttaactataattctacagagttagaaagaatatttgggaagtga

SEQ ID NO: 30204 - protein, 450 aa, Sulfolobus solfataricus P2
MDSIRDKCGVFAVSSPKEVNIQLVVEGIRLLQHRGQESAGIAYAENGEILTIKGSGLVDEVFKENLNKFIKNGIGHVRYSTSGKSSIEEAQPLGDSKIVVAFNGTISNYYQFGSFRVDTEFIYKFFKQKLAFRSIPDTVKEFMKVVDGGYSVAILLNDEEIVVFRDPKGFHPVVLGFLEGSLIVSSEDSVIRQLGGSVLKHILPSEMIIMKNGKILYDKVIYEEKNYATCSFEYIYFARPDSNIDGHSVYLARIRLGELLAEKHPANGDIVVPVPDSSRPIALGFSRKSHIPLEEPLVRTISSVRSFIMPTQDKRNEVLEEKFGVVADAVRGKRIVLIDDSIVRGNTMKRIITMLRKAGAKEIHVRIGSPMIKYPCYMGIDFPKREELIAHNKSEKEIGNELNADSIEFLSVEEMLQGIGRRDLCNACFSGIYPLKFNYNSTELERIFGK

SEQ ID NO: 30205 - DNA, 1215 bp, Sulfolobus solfataricus P2
  CDS (1)..(1215): transl_table=11
gtgatattaatggctggaatactaggtatattagcgttcgatgatgtatggaatgtatctagatttttatattatggtctaataggcttgcaacatagaggatattctaaaagtggaatagcaatattgaacaagcagaggaatatatttactaaactagagaacgtagcgcctgaggatttagaaattaaagacttgaatggatgggctggaataggttatgctggaatcagaaatagttatcccataacaatagataatggtgctatagtcgttgatgggatgatagatgataacaatgttcttaaccatgtcataagagagccagaaaatgcaatagatgatattaaaaagccgatctcgttcatagccattagtaaagacggccagttaatagcctatagagacgaactaggacttaagccgttaagcataggtggatttggattcgatttagcagttatttcctccgaaccaacgtcaatgtttgtaataggggctgagttcaaaagggaaattaatccgggagagttagtgatcgttgacaaatatcatattgaatccaaacaggtgagaatacctagaaaatcgtattgtactatagagtacgtataccaagctagaatagacagtatgatcaacgaaagagaaatctatgacctaagagtgaaaataggggaagaattagccttagaatatccaataaatgctgattcagtaataggagttccagaaaccgcattacctttcgcaataggctattccaagaaattaaatataccattagacttaggctttacgaggacagggagcccaataaggacaatgttatcttctgatgctttcctaaaaatagttggggtccaacttaagctaaacccaataaaaagtgcagtaaaaggaaagagaataattctaatagatgattctatggtcaccggaactacccttaaaaacactatatttaacttgagaaaattgggcgcaaaggaaatccacgtgctgataggaagccctaaattagtctcacaatgtccgtacggagttgaagtccccgacgaaaaagaattgatctcagctaatcttaacgacgaaactatagcgagggttttaggtgcagactctatacactggttaagcatagaaggattgttcaaagccattgggcatagggatctctgcttaggatgtatgactaaaaaatatccatggtga

SEQ ID NO: 30206 - protein, 404 aa, Sulfolobus solfataricus P2
MILMAGILGILAFDDVWNVSRFLYYGLIGLQHRGYSKSGIAILNKQRNIFTKLENVAPEDLEIKDLNGWAGIGYAGIRNSYPITIDNGAIVVDGMIDDNNVLNHVIREPENAIDDIKKPISFIAISKDGQLIAYRDELGLKPLSIGGFGFDLAVISSEPTSMFVIGAEFKREINPGELVIVDKYHIESKQVRIPRKSYCTIEYVYQARIDSMINEREIYDLRVKIGEELALEYPINADSVIGVPETALPFAIGYSKKLNIPLDLGFTRTGSPIRTMLSSDAFLKIVGVQLKLNPIKSAVKGKRIILIDDSMVTGTTLKNTIFNLRKLGAKEIHVLIGSPKLVSQCPYGVEVPDEKELISANLNDETIARVLGADSIHWLSIEGLFKAIGHRDLCLGCMTKKYPW

SEQ ID NO: 30207 - DNA, 1428 bp, Clostridium acetobutylicum ATCC 824
  CDS (1)..(1428): transl_table=11
atgataaaagaacagtgcgcagctgaaaatgaagatatggataagttcaaagaagaatgcggtgtatttggaattttttcaaataaagatatagatgcttctagactaacttactacggtttatatgctcttcaacacaggggacaggagagtgcaggcattgctgtatccaatggaaaagaactttgtgtttataaaaatatggggcttgtagcagatgtgttcaatcctgaaattatagattcattggttggaagctctgccataggtcatgttagatactcgacaacaggtggaagtaatgcaaacaatgctcagcctataatgagtaattttaaattagggtctattgctattgctcataatggtaacctagttaatgctgatgttataagagaacttctacaggatggcggcactatgttccaaacttccattgatactgaagttatcttgaatcttatagctagagctgctaaaaagggaatagagaaagcagttgtggatgcaattcaagcaatcaaaggttcatacgctattgtaattctcacaaaggataaattaataggagttagagatccaaatggtataagaccactttgtattgggaaaattgatgatagctatataatttgttctgaaagttgtgcactggatactgtaggtgctgagtttgttagagatgtaaatcctggagaaatagtaatagttgataaggacggacttagaagtataaattttgcagaaaaaacaaagtgcgaaacctgtgcttttgaatatatttattttgctagacctgacagtgtaatagatggaatagatgtaaataaatcaagagaacttgctggagaacaattatttaaggattctcctgtagaggcagacatagtaattggagtacctgattcaggaataccagcggcaattggttacgctagagcttctgggataccgtatactttggggctgataaaaaataaatacataggtagaacctttatagctccaacacaggaacttagggaaaaagctgtatctgttaagctgaatcctgtgaagtcaataatagagggaaaaagagttgttttaatagatgactccatagttagaggaactacaagcaagagacttgtggatattatacgtaaagctggagcaaaagaagtacattttagggtgtcttcacctatagtaaaatttccatgctactttggaatagatactccttatagaaaagacctcattggtgcacataaaacagttgaagaaataagagattttataggagcagatagtttgggatatttaagtatagacgctcttttaaaaacccttggaaaagataaaaaattttgtcttggatgctttaatggtgtatatccagtgtcagcaccagttgaggctgataaggatagacttgaaacttaa

SEQ ID NO: 30208 - protein, 475 aa, Clostridium acetobutylicum ATCC 824
MIKEQCAAENEDMDKFKEECGVFGIFSNKDIDASRLTYYGLYALQHRGQESAGIAVSNGKELCVYKNMGLVADVFNPEIIDSLVGSSAIGHVRYSTTGGSNANNAQPIMSNFKLGSIAIAHNGNLVNADVIRELLQDGGTMFQTSIDTEVILNLIARAAKKGIEKAVVDAIQAIKGSYAIVILTKDKLIGVRDPNGIRPLCIGKIDDSYIICSESCALDTVGAEFVRDVNPGEIVIVDKDGLRSINFAEKTKCETCAFEYIYFARPDSVIDGIDVNKSRELAGEQLFKDSPVEADIVIGVPDSGIPAAIGYARASGIPYTLGLIKNKYIGRTFIAPTQELREKAVSVKLNPVKSIIEGKRVVLIDDSIVRGTTSKRLVDIIRKAGAKEVHFRVSSPIVKFPCYFGIDTPYRKDLIGAHKTVEEIRDFIGADSLGYLSIDALLKTLGKDKKFCLGCFNGVYPVSAPVEADKDRLET

SEQ ID NO: 30209 - DNA, 1443 bp, Streptococcus pneumoniae R6
  CDS (1)..(1443): transl_table=11
atgacatacgaagtaaaatctcttaatgaagaatgtggtgttttcggtatttggggacatccagatgctgctaagttgacctattttggactccacagtcttcaacaccgtggtcaggagggggcaggaatcctctccaatgatcaaggacaactgaagcggcatcgcgatatgggtcttctatcagaagtcttcagaaatcctgctaacttagataaattgacgggaactggtgcgattgggcatgtgcgttacgcgactgctggcgaagcttctgtagataatatccagcccttcctcttccgttttcacgatatgcagtttggcttggctcataatggaaatctgaccaatgcagcctctctcaagaaagaactggaacaaagaggagcaattttcagcgcgacttcggactctgaaatcttggctcacctcattcgtcgcagtcataatcctagcctgatgggcaaaatcaaggaagcgctcagccttgtcaaaggtggttttgcctatatcttgctgtttgaggacaagttgattgcggctcttgacccaaatggattccgaccgctttcgattggtaaaatggctaatggagcagttgttgtatcttctgaaacctgtgcttttgaggtcattggtgccgagtggattcgtgatttgaagccaggtgagattgtgatcattgatgacgagggcattcagtatgacagctatacagatgatacccagttggcggtttgttctatggagtatatctactttgctcgccctgattctaatatccacggtgtcaatgtccatacggcacgtaagagaatgggagcgcaattggcgcgagaatttaagcatgaggcagatattgtagttggtgtgcccaattcttccctaagcgcggctatgggatttgcggaagaagcaggcttaccaaatgaaatgggtctgatcaaaaaccaatacacccagcgaacttttatccaaccgactcaagaattgcgggagcaaggagtgcggatgaaactgtctgctgtttcgggtgttgtcaaaggcaaacgtgtggtcatggtggatgattccattgtacgtggaacaacctctcgtcgtatcgttcagctcttgaaagaagcgggtgcgactgaggttcacgttgccattggaagtcctgcactagcgtatccatgtttctacgggattgatatccagacccgtcaggagctgattgcagccaatcatacggtcgaagaaactcgccaaatcattggtgcggacagtatgacttatctttcaattgatggcttgattgagtcgattggtatcgaaacagatgcgccgaacggtggtctctgtgtcgcttactttgacggtgactacccaacgcctctctatgactacgaagaagactatcgtagaagtttggaagaaaagaccagtttttacaagtag

SEQ ID NO: 30210 - protein, 480 aa, Streptococcus pneumoniae R6
MTYEVKSLNEECGVFGIWGHPDAAKLTYFGLHSLQHRGQEGAGILSNDQGQLKRHRDMGLLSEVFRNPANLDKLTGTGAIGHVRYATAGEASVDNIQPFLFRFHDMQFGLAHNGNLTNAASLKKELEQRGAIFSATSDSEILAHLIRRSHNPSLMGKIKEALSLVKGGFAYILLFEDKLIAALDPNGFRPLSIGKMANGAVVVSSETCAFEVIGAEWIRDLKPGEIVIIDDEGIQYDSYTDDTQLAVCSMEYIYFARPDSNIHGVNVHTARKRMGAQLAREFKHEADIVVGVPNSSLSAAMGFAEEAGLPNEMGLIKNQYTQRTFIQPTQELREQGVRMKLSAVSGVVKGKRVVMVDDSIVRGTTSRRIVQLLKEAGATEVHVAIGSPALAYPCFYGIDIQTRQELIAANHTVEETRQIIGADSMTYLSIDGLIESIGIETDAPNGGLCVAYFDGDYPTPLYDYEEDYRRSLEEKTSFYK

SEQ ID NO: 30211 - DNA, 1332 bp, Sulfolobus tokodaii str. 7
  CDS (1)..(1332): transl_table=11
atgaaggttaaagaacactgcggtattgttggagtttatgctgataattctccaatgatttcttacgaatccctaaaattattacaacataggggacaagaatcagcaggaattacttacagaaaagatgggagtttagttaccatgaaaggcttgggtttagttgaagaggcattagatcctaggcttcttcctaatgcgaaactatcaataggtcatgttagatattcaactaccggtaaaggttcacttgacgaggctcaacctttaagtaacggtaaaattgctatagcatttaatggtacaataactaattattttaagttcggaacttctaccgatactgaatttattcttaaggttctctcggaggcgcctaacattaaagaaggaattagaaggttagttgacttagctgacggtgcatactcactcgtagttttaactaatgaaggagaacttatcggctttagagatcctaaaggattccgtcctctggtcttaggtaaaattaataacggttatataattgcttcagaagattccgtaatcagacaattaggaggtaagcctttaagagatgtaaaacctggagaaatgatatacattaaagatggtgaaattgaaagcgaagttatttctagggatcgtgtaagtttttgctcatttgagtacatctattttgccagacccgattctataattgatggtgtgtctgtttataactctaggataaagctaggagaaattttagctgaaaatcatggagttgatgcagatgtagctataccagttccagaatcctcaattccgattgcaataggattctctaggaaatcaaagattcctatggaatacggtttgattagaacactcgtagcaaagaggtcttttatcatgcctacacaagataaaagaaatgctgtactagaagagaaatttggtatagtcaaaagtgtagtagaaaataagaaagttgttgtcattgatgactcaatcgttagaggaaatactatgagaaaaattgtaagaatgataagggataatggtgctaaggaagttcatgtaagaataggctctccaaaagtaaaatatccttgttatatgggtatagattttccattatctaaagaactaatagctagtgagaaagatgaaaaagaaatagctaagtatattggtgctgattcagttgagttcttaacagttgaagaaatgattaaagccataggaagacctgatttatgtcatgcatgtttttctggagtttatccccttaaattttcatataatttgcaagtattagaatctatatttaaaaaggtgagttaa

SEQ ID NO: 30212 - protein, 443 aa, Sulfolobus tokodaii str. 7
MKVKEHCGIVGVYADNSPMISYESLKLLQHRGQESAGITYRKDGSLVTMKGLGLVEEALDPRLLPNAKLSIGHVRYSTTGKGSLDEAQPLSNGKIAIAFNGTITNYFKFGTSTDTEFILKVLSEAPNIKEGIRRLVDLADGAYSLVVLTNEGELIGFRDPKGFRPLVLGKINNGYIIASEDSVIRQLGGKPLRDVKPGEMIYIKDGEIESEVISRDRVSFCSFEYIYFARPDSIIDGVSVYNSRIKLGEILAENHGVDADVAIPVPESSIPIAIGFSRKSKIPMEYGLIRTLVAKRSFIMPTQDKRNAVLEEKFGIVKSVVENKKVVVIDDSIVRGNTMRKIVRMIRDNGAKEVHVRIGSPKVKYPCYMGIDFPLSKELIASEKDEKEIAKYIGADSVEFLTVEEMIKAIGRPDLCHACFSGVYPLKFSYNLQVLESIFKKVS

SEQ ID NO: 30213 - DNA, 1491 bp, Sinorhizobium meliloti 1021
  CDS (1)..(1491): transl_table=11
atgaccgatctcagatccagcgaaatccatgacgaactcgacggcgacaccctccatgaggagtgcggcgttttcggcattctcggccatccggacgccgccgcgctgacggcgctcggcctgcacgctctccagcatcgagggcaggaagccgccggtatcgtcaccttcgacgggcggcagttctattcggagcgccggatgggtctcgtcggcgaccactataccgatcccacgacgctcgcgaagctgcccggttcgatgtcgatcggccatgtacgctattccaccaccggtgagacggtcctgcgcaacgtccagccgctgtttgccgagctgcaggaaggcggaatcgcaatcgcgcacaacggcaacttcacgaacggcctgacgctgcggcgccagatcatcgcagacggtgccatctgtcagtcgacatccgacaccgaagtcgtgctgcacctgatcgcgcggtcgaaacacgtctcttccagcgatcgcttcgccgacgctatcgcccaggtcgaaggcggctattcgatgctggctctgacccgcaccaagctgatcgccgcccgcgacccgaacggcattcgcccgctcgtcatgggcgaactcgacggcaagccgatcttctgctcggagacctgcgcgctggatatcatcggcgccaaattcgttcgcgatatcgagaacggtgaaatcgtcatctgcgaaattcagccggacgggtcgatcaccatcgatgcccgcaagccgcagaatccgctgccggaacgcctttgccttttcgagtacgtctatttcgcccggccggattcggtcgtcggcggccgcaacgtctacgtcgcccgcaagaacatgggcaagaacctcgccatcgaggcccccgtcgaggcggatgtcgtggtgcccgttccggacggcggtacgccggctgcaatcggctatgcgcaggaaagcggcatccccttcgagctcggcatcatccgcaatcactatgtcgggcggaccttcatcgagccgacgcagcagattcgcgccttcggcgtcaagctcaagcattctgcgaaccgggcgatgatcgccggcaagcgcgtcgtgctcgtcgacgattccatcgtccgcggcaccacttcggtcaagatcgtccagatgatgcgcgaggcaggcgcccgcgaggtgcatgtgcgcgtcgcgagcccgatgatcttccacccggatttctacggcatcgacacgcccgaccgtgacaagctgctcgccaaccagcatgccgacctcgcctcgatgtgtcgcttcatcggcgccgattctctcgaattcctctcgatcgacgggctttatcgtgccgtcggcggcgagaagcgcgacccgcaggcgccgcagttcaccgatcactatttcaccggggactacccgacccgccttctcgaccagggggcagcgagcaacgttcgcaaactctcggttctcgccagcaacggataa

SEQ ID NO: 30214 - protein, 496 aa, Sinorhizobium meliloti 1021
MTDLRSSEIHDELDGDTLHEECGVFGILGHPDAAALTALGLHALQHRGQEAAGIVTFDGRQFYSERRMGLVGDHYTDPTTLAKLPGSMSIGHVRYSTTGETVLRNVQPLFAELQEGGIAIAHNGNFTNGLTLRRQIIADGAICQSTSDTEVVLHLIARSKHVSSSDRFADAIAQVEGGYSMLALTRTKLIAARDPNGIRPLVMGELDGKPIFCSETCALDIIGAKFVRDIENGEIVICEIQPDGSITIDARKPQNPLPERLCLFEYVYFARPDSVVGGRNVYVARKNMGKNLAIEAPVEADVVVPVPDGGTPAAIGYAQESGIPFELGIIRNHYVGRTFIEPTQQIRAFGVKLKHSANRAMIAGKRVVLVDDSIVRGTTSVKIVQMMREAGAREVHVRVASPMIFHPDFYGIDTPDRDKLLANQHADLASMCRFIGADSLEFLSIDGLYRAVGGEKRDPQAPQFTDHYFTGDYPTRLLDQGAASNVRKLSVLASNG

SEQ ID NO: 30215 - DNA, 1425 bp, Thermoplasma acidophilum DSM 1728
  CDS (1)..(1425): transl_table=11
gtggattccctgcccccaggatcagatcctatagatgggcaaaagccaagtgaagactgtgctgttgtgggctttaagggtaggatcaacgcctatgagcccataataaccgcactgcgtacactgcagcacagaggtcaagaatcagccggtatggctgtttttgatggcagaaaaactgtcctgaagaagggtcgtggccttgtaaccgacgttttcaatcctgcaacggatagcataaagggcaaggtcggggttggccatacccgttattctacagccggttccaaggacgttatcgatgctggtccattcgttataaattcccaggttggattcatctctctttcccataacggcgaaatcgtcaacgcggatgagctgaaggaggagatgaagaaggaaggcgtaaattttcagagtgattcagacaccgaggtactgctcgcagagctttcaagaaacatttcaaagtacggcctgaaaaaaggttttgaggtgtctatgaacaccctcaggggggcctatgcctgcgcagtgggcataaatgacaggctcttcgccatgagggacccaaacggaataaggcccctcatcgtaggaaagaatgcggatggatacataatagccagtgaaagctgtgccatagatgcacttgatgggacgatcataaggaatgttgaacccggcgaggtcgttgaactgacagatgacggcctgaagaccatagcacttcacgaaggagagaagaccgcacactgtatgtttgaatacgtatacttctcaaggcctgacagcaccatagatggcataaatgtgtatatggccagggtcaaaatgggcatgatgcttgccaaggagagccccgtggaggccgacatggtcatacctgtccccgattccggtagatcgcaggccatcgggttctcgatgcagtcaggcataccctacaccgaaggcttgatgaagaacaggtattccgaaagaactttcataatgcctacacaaagcgacagaaaggccgcgatcaggctgaagctgaaccccgtcagggaagtcatatctggtaagaggattgtgctggtcgatgatagcatcgtaaggggaaacaccatgcgattcatcgtgagcatgatgagaaagtatggtgcgaaggaggttcatgttcgcataggttcgccacacataattgcaccttgctatttcggcgtggatatgaagacaaaggatcagttcatagcacgcggaaaaacggatgcagagataaacagcgagataggagctgattcgctggcattcctctccatagatggcctcaaggaagccattggccttgatgagaataatctgtgtcttggatgtctgaccggcacctatcccatagacatatcgaaaaaacttgcggagaagatcacgcagtattga

SEQ ID NO: 30216 - protein, 474 aa, Thermoplasma acidophilum DSM 1728
MDSLPPGSDPIDGQKPSEDCAVVGFKGRINAYEPIITALRTLQHRGQESAGMAVFDGRKTVLKKGRGLVTDVFNPATDSIKGKVGVGHTRYSTAGSKDVIDAGPFVINSQVGFISLSHNGEIVNADELKEEMKKEGVNFQSDSDTEVLLAELSRNISKYGLKKGFEVSMNTLRGAYACAVGINDRLFAMRDPNGIRPLIVGKNADGYIIASESCAIDALDGTIIRNVEPGEVVELTDDGLKTIALHEGEKTAHCMFEYVYFSRPDSTIDGINVYMARVKMGMMLAKESPVEADMVIPVPDSGRSQAIGFSMQSGIPYTEGLMKNRYSERTFIMPTQSDRKAAIRLKLNPVREVISGKRIVLVDDSIVRGNTMRFIVSMMRKYGAKEVHVRIGSPHIIAPCYFGVDMKTKDQFIARGKTDAEINSEIGADSLAFLSIDGLKEAIGLDENNLCLGCLTGTYPIDISKKLAEKITQY

SEQ ID NO: 30217 - DNA, 1503 bp, Caulobacter crescentus CB15
  CDS (1)..(1503): transl_table=11
atgaccttcctgggccagtcgactgaccgctattcctcgagcccctggcgggacccggaggacgacagcctgcgtctggaatgcggcgtgttcggcgtgttcggcgtgcgtgacgccgccgccatcgccgcgctgggcctccacgctttgcagcaccgcggccaggaggcctgcggcatcgccgccttcgacggcaatcgcttccacactgagcggcacatggggcatgtcggcgacgccttcaccggcgccgacctcgtccagcgcctgccgggcaacatggccatcggccacacgcgctattcgacggccggcggcagcttcatccgcaacgtccagccgatgttcgccgaccttgagaccggcggcgtcgcgatcgctcacaacggcaacctgaccaacttcctgaccctgcgcgagcgtctggtgcaggaaggcgcgatcttccagtcgacctcggactccgaagcgatccttcacctgatcgcgcgctcgcggaaggccaagatcgtcgatcgcttcgtcgatgcgatcagccagatcgagggcggctacgccctggtggcgatcaccaacaagaagatgatcggcgtgcgcgatccgctgggcatccgcccgctggtgctgggtgatctggacggcaagccggtgctggcgtctgagacctgcgcgctcgacatgatcggcgcccgcttcgtgcgcgacatcgaacatggcgagatggtggtgatcgaggagaccggtatcacctcgaccaagccgttccagaccgccccggcgcgcccctgcgtgttcgagtatgtctatttcgcccgtcccgacagcgtcgtgaacggtcgctcggtctatggcgtgcgcaagcgcatgggcatgaacctggccaaggaaaccggcgtcgaggccgatgtcgtggtgcccgtgcccgacagcggcgtgccggccgcgctcggctacgcccagcagagcggcctgccgttcgagatgggcatcatccgcaaccactatgtgggccgcaccttcatccagcccacccagggcgtgcgcgaactgggcgtgcgcatgaagcacagccccaatcgcgcggtcctcgcgggcaagcgcgtcgtcctgatcgacgactcgatcgtgcgcggcaccacctcgctgaagatcgtccgcatggtccgcgaagccggcgccaaggaggtccacctccgctcggccagcccgccgatcaagtggcccgacttctacggcatcgacatgcccgagcgtgagcagctgctggccgccaacaagtcgctggaagagatggcccggttcctggaggtcgactcgctgggcttcctgtccgtggacggtctctacgacgccctggaagcgggtcagcgcgacccggcgaccccgcagttcaccgatcactacttcaccggcgactatccgacccgcctgacggaccgcgagatcgccgagggtcgcaacgaaaccaacgacaagcagctttcgctgctggtcagcgcgtga

SEQ ID NO: 30218 - protein, 500 aa, Caulobacter crescentus CB15
MTFLGQSTDRYSSSPWRDPEDDSLRLECGVFGVFGVRDAAAIAALGLHALQHRGQEACGIAAFDGNRFHTERHMGHVGDAFTGADLVQRLPGNMAIGHTRYSTAGGSFIRNVQPMFADLETGGVAIAHNGNLTNFLTLRERLVQEGAIFQSTSDSEAILHLIARSRKAKIVDRFVDAISQIEGGYALVAITNKKMIGVRDPLGIRPLVLGDLDGKPVLASETCALDMIGARFVRDIEHGEMVVIEETGITSTKPFQTAPARPCVFEYVYFARPDSVVNGRSVYGVRKRMGMNLAKETGVEADVVVPVPDSGVPAALGYAQQSGLPFEMGIIRNHYVGRTFIQPTQGVRELGVRMKHSPNRAVLAGKRVVLIDDSIVRGTTSLKIVRMVREAGAKEVHLRSASPPIKWPDFYGIDMPEREQLLAANKSLEEMARFLEVDSLGFLSVDGLYDALEAGQRDPATPQFTDHYFTGDYPTRLTDREIAEGRNETNDKQLSLLVSA

SEQ ID NO: 30219 - DNA, 1518 bp, Haemophilus influenzae Rd KW20
  CDS (1)..(1518): transl_table=11
atgtgtggtattgtcggtattgttagccaaagtccggttaatgaatctatttatgcagcattaacccttttgcaacatcgtggacaagatgcggcaggtattgtaacggttgatgatgaaaaccgttttcgcttacgtaaagctaatggtttagtcagtgatgtgtttcatcaagaacatatgctacgattgcaaggaaatgctggattggggcatgttcgctatcctacagcggggagttctagcgtctcagaggcacagcctttttatgtgaattctccctatggtgtcactttagtgcataacggcaacttaaccaactcagtggagttaaaagaaaaggtctttaaaactgctcgccgccatgtaaacactaattcagattccgaacttcttcttaatattctcgccaatcacctcgatcacattcctcaagatcacctcgatccacaagatattttctatgctgttcgtaaaactcacaaggatgttcgcggtgcttatgcttgtttagcgatgattattgggcatggcatggttgcgtttcgtgatccttttggcattcgtcctttggtgttgggtaaacgcgaggaaaatggcaaaaccgattatatgtttgcgtctgaaacagtggctttagatattgtaggtttcgaatttgtgcgtgatattgctgcaggcgaagctgtttatgtgacgtttgatggcgagctttattcacaacaatgtgctgaaagtgcggtgttaaatccttgtatttttgagtatgtttattttgcacgcccagattcaacgattgatggcgtctctgtttatgctgcgcgtgttcacatgggcgaaaaacttggacaaaaaattgcaaaagaatgggctgatgaaattgataatattgatgtggtgattcccgttcctgaaacttcaacagatattgcgttacaaatagctcgtgtactagggaagccttatcgccaaggatttgtgaaaaatcgctatgttggccgtacctttattatgccaggacaagcacagcgtattagttcggttcgtcgtaaattgaataccattaaagctgaatttaaagataaaaacgtgttattggtagacgattctattgttcgtggcacaacctctgagcaaattgttgaaatggctcgctcagctggtgcgaagaaaatttacttcgcctcggctgctccagaaattcgttatccgaatgtatatggtattgatatgccgagtcgcgatgaactgatcgcttatggacgaaatgttgatgaaattgcagaattaattggcgtagataaattaattttccaagatctgaccgcacttactgaatctgttcaattggaaaacccagccattcaaggttttgattgttctgttttcacaggcgaatatattacaggcgatattagccctgaatatttagagaaaatcgcaactcaacgcaatgataacgcaaagaagaaacgagaaaaacaagcatccaatcttgaaatttacaatgaacaataa

SEQ ID NO: 30220 - protein, 505 aa, Haemophilus influenzae Rd KW20
MCGIVGIVSQSPVNESIYAALTLLQHRGQDAAGIVTVDDENRFRLRKANGLVSDVFHQEHMLRLQGNAGLGHVRYPTAGSSSVSEAQPFYVNSPYGVTLVHNGNLTNSVELKEKVFKTARRHVNTNSDSELLLNILANHLDHIPQDHLDPQDIFYAVRKTHKDVRGAYACLAMIIGHGMVAFRDPFGIRPLVLGKREENGKTDYMFASETVALDIVGFEFVRDIAAGEAVYVTFDGELYSQQCAESAVLNPCIFEYVYFARPDSTIDGVSVYAARVHMGEKLGQKIAKEWADEIDNIDVVIPVPETSTDIALQIARVLGKPYRQGFVKNRYVGRTFIMPGQAQRISSVRRKLNTIKAEFKDKNVLLVDDSIVRGTTSEQIVEMARSAGAKKIYFASAAPEIRYPNVYGIDMPSRDELIAYGRNVDEIAELIGVDKLIFQDLTALTESVQLENPAIQGFDCSVFTGEYITGDISPEYLEKIATQRNDNAKKKREKQASNLEIYNEQ

SEQ ID NO: 30221 - DNA, 1428 bp, Listeria monocytogenes EGD-e
  CDS (1)..(1428): transl_table=11
atgcttgctgaagtaaaaggacttaacgaagaatgtggtatttttggtatttgggatcatcctaatgcagcggaaatcacctattatgggttgcatagtttacaacatcgcggtcaagaaggtgccggaattgtttcgacagacggcgaaatactaaaaggtcaccgaaatctcggccttttagcagacgtatttaaacatggtgaactagatgatttaaaaggtaaagcagccattggccatgttcgatacgcgacagctggtcaaaaaaacttagggaacgtacaaccatttttatttcactttcatagttcttctttagcacttgcgcataacgggaatttggttaatgcgaaaagtttacgccgtgaactagaagaagaaggcgctatttttcaaacgagttcggatacagaagtgttagcgcatttaattaaacgtagccatacaggggattttgtggaagatttaaaagtggctttgaacaaggttaagggtggctttgcgtacatgcttctgacggaagatacgatgtatgctgcacttgatccgaatggttttagaccgctttcgattggtcgcattggtgattcttacgtagttgcttcagaaacatgtgcttttgaaacggttggcgctgaatttgttcgagacgtggagccaggcgaactaattattattaatgatgacggacttcggattgaaaaatttacggaaaatgtgaagcattcgatttgtagtatggagtatatttattttgctcgaccagactctaatatcgctgggattaatgtccactcagctagaaaacgttctgggaaaaggctagcgaaagaagcatttattgatgccgatgttgttacaggtgtgccagattcgagtatttctgcggcgattggttatgcggaagaggctggacttccatacgagcttggcctcatcaaaaatagatatgtggcaagaacctttatccaaccatcgcaagaactcagagagcaaggggttagaatgaagctttcggcggtgcgtggggttgtggaagggaaacgtgttgtcatgattgatgattcgattgtgcgcgggacgacgagtaaacgtattgtgcaacttttgcgggaagcgggagcagcggaagttcatgtgagaatagcttcaccgccacttgcttacccttgtttttacggtattgatattcaaacgcgaaatgaattaatcgcatctaattattctgtcgatgaaatttgtcggattattggggctgattctttagagtatttgagtgaagagggtttagtagattccattggtagaccttatccgaacgaaccatacgggggactttgtatggcttatttcaacggcgattacccaacccctttatacgattatgaagcggaatatttagcgagcttagaagcagaaaaataa

SEQ ID NO: 30222 - protein, 475 aa, Listeria monocytogenes EGD-e
MLAEVKGLNEECGIFGIWDHPNAAEITYYGLHSLQHRGQEGAGIVSTDGEILKGHRNLGLLADVFKHGELDDLKGKAAIGHVRYATAGQKNLGNVQPFLFHFHSSSLALAHNGNLVNAKSLRRELEEEGAIFQTSSDTEVLAHLIKRSHTGDFVEDLKVALNKVKGGFAYMLLTEDTMYAALDPNGFRPLSIGRIGDSYVVASETCAFETVGAEFVRDVEPGELIIINDDGLRIEKFTENVKHSICSMEYIYFARPDSNIAGINVHSARKRSGKRLAKEAFIDADVVTGVPDSSISAAIGYAEEAGLPYELGLIKNRYVARTFIQPSQELREQGVRMKLSAVRGVVEGKRVVMIDDSIVRGTTSKRIVQLLREAGAAEVHVRIASPPLAYPCFYGIDIQTRNELIASNYSVDEICRIIGADSLEYLSEEGLVDSIGRPYPNEPYGGLCMAYFNGDYPTPLYDYEAEYLASLEAEK

SEQ ID NO: 30223 - DNA, 1428 bp, Listeria innocua Clip11262
  CDS (1)..(1428): transl_table=11
atgcttgctgaagtaaaaggacttaatgaagaatgtggtatttttggtatttgggatcatcctaatgcagcggaaatcacttactatgggttgcatagtttacaacatcgcggtcaagaaggtgccggaattgtttcaacagacggagaaacgttaaaagggcatcggaatcttgggcttttagcagatgtatttaagcacggtgaactagacgatttaaaaggtaaggcagcaattggccacgttcgctatgcaacagctggtcaaaaaaacttaggaaatgtacaaccatttttatttcattttcacagttcttcacttgcacttgcgcataatggaaatttagtgaatgcgaagactttacgccgcgaattagaagaagaaggagctatctttcaaacaagttcggacacggaagtattagcgcatttaattaaacgcagccatactggtgattttgtagaagatttaaaagtagctttaaacaaggtcaaaggtggctttgcatatatgctgcttacagaagatacaatgtatgccgcgcttgatccaaatggctttagaccgctttcgattggtcgaattggcgattcttatgtagttgcttctgaaacttgtgcttttgaaacggttggtgctgaatttgtccgtgatgtggagccaggtgaactgattattattaataatgacggactgcggattgaaaaatttacggaaaatgtgacgcattcgatttgtagtatggaatatatttattttgctcgtccggactctaatattgctggaattaatgttcactcagctagaaagcgttctgggaaaagacttgcaaaagaagcatttattgatgcggatgtagtgacaggtgtgccggattcaagtatttctgcggcgattgggtatgcagaagaagccggactgccgtacgaacttggtctcatcaaaaatagatatgtggcaagaacttttattcagccatcgcaagaacttagggaacaaggggttagaatgaagctttctgcggtgcgaggagttgtggaaggtaaacgagttgtcatgattgatgattccatcgttcgcgggacgacaagtaaacgcattgtccagcttttacgtgaagcgggcgcggcggaagttcatgtgagaattgcttctccaccacttgcttatccttgtttttatggaattgatattcaaacacgaaatgaattgattgcttctaattattctgttgatgaaatttgccgtattattggcgcagattctttagagtatttgagtgaagaaggtttagtagattccattggcaaaccttatccgaatgaaccttatgggggactttgtatggcttattttaacggggattatccgacccctttatacgattatgaagcagaatatttagcgagcttagaagcagaaaaataa

SEQ ID NO: 30224 - protein, 475 aa, Listeria innocua Clip11262
MLAEVKGLNEECGIFGIWDHPNAAEITYYGLHSLQHRGQEGAGIVSTDGETLKGHRNLGLLADVFKHGELDDLKGKAAIGHVRYATAGQKNLGNVQPFLFHFHSSSLALAHNGNLVNAKTLRRELEEEGAIFQTSSDTEVLAHLIKRSHTGDFVEDLKVALNKVKGGFAYMLLTEDTMYAALDPNGFRPLSIGRIGDSYVVASETCAFETVGAEFVRDVEPGELIIINNDGLRIEKFTENVTHSICSMEYIYFARPDSNIAGINVHSARKRSGKRLAKEAFIDADVVTGVPDSSISAAIGYAEEAGLPYELGLIKNRYVARTFIQPSQELREQGVRMKLSAVRGVVEGKRVVMIDDSIVRGTTSKRIVQLLREAGAAEVHVRIASPPLAYPCFYGIDIQTRNELIASNYSVDEICRIIGADSLEYLSEEGLVDSIGKPYPNEPYGGLCMAYFNGDYPTPLYDYEAEYLASLEAEK

SEQ ID NO: 30225 - DNA, 1500 bp, Nostoc sp. PCC 7120
  CDS (1)..(1500): transl_table=11
atgattcccattgattccgtcactccggatgagtaccctaatcagactaacaacccaattgatagtcaagaaaatcgtcctgacaagccagaagaggcttgtggagttttcggcatttacgccccaggagaaaatgttgcaaaactgacctactttggattgtatgccctgcaacatcggggtcaagaatcagctggcattgccacgtttgagggtacaacagttcacctgcataaagacatgggtttggtttctcaagtctttaatgagtcgattttagaagagttgcctggtgatatcggcgttggtcatacccgttactctaccactggttccagccgcaaagttaatgcccagcctgctgtcctagacactcgtttaggcaagctagctctagcacataatggtaatttagtcaatactgtgaagttgcgccaagagttagttaatagcaactgcaacctagtgacaaccacagactcagaaatgattgcttttgcgatcgctcaagcagtcaacgcaggtgcggactggttagatggggcgattcaagcattccatcgttgcgagggagcttttagcttagtgattggcacacctgttggtgtgatgggagtgcgtgacaccaacggcattcgtcctctggtaattgggattttgcctggtaatcctgtgcgctatgttttatcctcggaaacttgtggtttagacattattggcgctgaatttctacgagatgtagaaccaggtgaagtagtttggattaccgaaaaaggtttagcttcctaccactggagtcaaaagccagaacgaagattgtgtattttcgagatgatttattttgctcgtcccgatagccaaatgcacaacgagagtttgtacagttatcggatgcgtttaggaaggcaactagcagccgaatcctacgtagatgctgatattgtctttggtgtacctgattctggtattcctgctgctattggattttcccaggcttctggtgttgcctacggtgaagggttaattaagaatcgctatgttggtcgcacctttattcagccaacccaaaccatgcgggagtcggggattaagatgaaactcaaccccctcaaagatgtgctggcgggtaaaagagtgattatcgttgatgactccattgtcagaggtactactagccgcaaactagttaaagctttacgtgatgctggtgcagccgaagtacatatgcggatttcttccccaccagtaactcatccttgtttctacggaattgatactgattctcaagaccagctaattgctgctactaagtcagtagaagagattgccaagcaattagaagtagaaagcctggcctatctcagttgggatgggatgttagaagcaaccagagaagacaaaaatagtttctgttctgcctgttttacaggtgattaccctgttggtattcctgaacaggtgaaacgcgctaagttgattttagaaaaggtagtagtttag

SEQ ID NO: 30226 - protein, 499 aa, Nostoc sp. PCC 7120
MIPIDSVTPDEYPNQTNNPIDSQENRPDKPEEACGVFGIYAPGENVAKLTYFGLYALQHRGQESAGIATFEGTTVHLHKDMGLVSQVFNESILEELPGDIGVGHTRYSTTGSSRKVNAQPAVLDTRLGKLALAHNGNLVNTVKLRQELVNSNCNLVTTTDSEMIAFAIAQAVNAGADWLDGAIQAFHRCEGAFSLVIGTPVGVMGVRDTNGIRPLVIGILPGNPVRYVLSSETCGLDIIGAEFLRDVEPGEVVWITEKGLASYHWSQKPERRLCIFEMIYFARPDSQMHNESLYSYRMRLGRQLAAESYVDADIVFGVPDSGIPAAIGFSQASGVAYGEGLIKNRYVGRTFIQPTQTMRESGIKMKLNPLKDVLAGKRVIIVDDSIVRGTTSRKLVKALRDAGAAEVHMRISSPPVTHPCFYGIDTDSQDQLIAATKSVEEIAKQLEVESLAYLSWDGMLEATREDKNSFCSACFTGDYPVGIPEQVKRAKLILEKVVV

SEQ ID NO: 30227 - DNA, 1443 bp, Caenorhabditis elegans
  CDS (1)..(1443)
atgtgtggtatatttgggattgttgccgctggaaattatgagcatttgaatgttcttgctgcaaatggattggctgctcttcaacacagaggaactgaatcaacaggactcgttggttcagatggaatcactcgagaccacgtggaaattatcaaaggtcatggacttgtccgagatgtgattactgaagataatatctcaagaatgaatgggcaatcgataataattggtcataataggtattcaactgcaggaaagaagaagtctggaatcaattgtgtacaaccatttgtggtatatactgcaatgggtactgtagcaattgctcataatggagaattggttgatgcgaaacaaaaaagaaaggaagtacttcatgaaggtgttggtttatcaactgacactgactcagagcttattgctcaaatgattgcaaaagcgattgctctgaatgtaaaatgcaagtatggacaagagatgggtgatattacaagagagctcgcagtaacaatgtctgcactaaacatgtcatattctctactagtaatgacatttgatagactatacgcaattcgtgatccatttggaaatcgtccactttgtgttggtactgtatattctaaaaatggaaatccagaagcattcattgcatcttctgaatcttgtgcatttcctgcaaatgctaaattagatttcgaagtgagaccaggagaaattgtggaattatcgacaggaggaatcaagtcggtgtggcagatgaaaccgaatactcctctggctatgtgcatattcgaatatgtctattttgcacgaaatgattcagaaattgaaggacaacaagtacaaactgttcgtgaagaatgtggaaaaacgatggctcttgaagatgatctagaagcagatattgttggaaatgttccagattcttcgctgagtgcagcaattggatacgcttctcagtctggaatcacatatgaacctgttttacacagaaattcatatgttggaagatcatttatagaaccaaatgatgagatgagacaaaatgcgattaaaatgaaatttggagtattgaagaaaaagattcatggacaaaggattgtgttagtagatgattcaattgtacgtggaaatacgatgagaactttggtaaaaatgttaagagatgctggagcaaaagaggttcatctacgaattgcttccccgcctgtaaaattcccatgttttatgggaatcaacattccaaccacaaaggaattgattgctgccgaaaaaacaattccagaaatctgccaatttgttggagccgattcagtacggtatctttcggttgacggtttagtttcgtctgttcaaaaaggaatcgaacgagctgccaacttctctccaggacattgcaccgcatgtctcactggaaaatatccagttgctatcgatttataa

SEQ ID NO: 30228 - protein, 480 aa, Caenorhabditis elegans
MCGIFGIVAAGNYEHLNVLAANGLAALQHRGTESTGLVGSDGITRDHVEIIKGHGLVRDVITEDNISRMNGQSIIIGHNRYSTAGKKKSGINCVQPFVVYTAMGTVAIAHNGELVDAKQKRKEVLHEGVGLSTDTDSELIAQMIAKAIALNVKCKYGQEMGDITRELAVTMSALNMSYSLLVMTFDRLYAIRDPFGNRPLCVGTVYSKNGNPEAFIASSESCAFPANAKLDFEVRPGEIVELSTGGIKSVWQMKPNTPLAMCIFEYVYFARNDSEIEGQQVQTVREECGKTMALEDDLEADIVGNVPDSSLSAAIGYASQSGITYEPVLHRNSYVGRSFIEPNDEMRQNAIKMKFGVLKKKIHGQRIVLVDDSIVRGNTMRTLVKMLRDAGAKEVHLRIASPPVKFPCFMGINIPTTKELIAAEKTIPEICQFVGADSVRYLSVDGLVSSVQKGIERAANFSPGHCTACLTGKYPVAIDL

SEQ ID NO: 30229 - DNA, 1536 bp, Ralstonia solanacearum GMI1000
  CDS (1)..(1536): transl_table=11
atgtgcggtatcgttggggtggtttcggccacgcccgtcaatcagctgatctacgacagcctgctgctgctgcagcaccgggggcaggacgcggcgggcattgccaccgcggccggcagcaccttccacatgcacaaggccaacggcatggtgcgcgacgtgttccgcacgcgcaacatgcgcggcctgccgggcaccatcggcatcggccaggtgcgctatccgaccgccggctccgccagcgaggaagaggcccagccgttctatgtcagcgcaccgttcggcatcgtgctggctcacaacggcaacctgaccaactccgagcagctgcgcgaagagatgttccggcgcgaccgccgccacatcaacacgcattccgactccgaagtgctgctcaacgtgctggccgacgaactgcagcgcgccagcaacgacatcgcgttgtcgcccgaggccatcttcaaggcggtggccggcatgcatcgccgcgtgcgcggctcgtacgccatcgtgtcgcagatcgccggctacggcatgctggccgtgcgcgacccgttcggcatccgtccgctggcgctgggcagccaggaaacgccggacggcgtcgagtggatggtggcctccgaatcggtggcgctggaaggcatcggcttcaagttcgagcgcgatgtggcgccgggcgaagccatcttcgtcgacctcgaaggccagctgcacaccaagcagtgcgcggatcatccggtcctgacgccctgcatcttcgaatacgtctatctggcgcggccggactcgcgcatggacggcgcgtccgtgtacgacgcgcgcctgcgcatgggcgattacctggccgagaagatcaagcgcgaggtgaccgacccgatcgacgtggtgatgccgatccccgattcgagccggccggcggccatgcaggtcgccaactgcctgggcgtgccgtaccgggaaggcttcttcaagaaccgctacgtgggccgcaccttcatcatgccgggccaggcggtgcgcaagaaatcggtgcgccagaagctgaacgccatggcgatcgagttcaagggcaagaacgtgctgatcgtcgacgattccatcgtgcgcggcaccacgtcgtcggagatcgtgcagatggcgcgcgatgcgggcgcgaagaaggtgatcttcgcctcggcggcgccgccggtgaagttccccaacgtgtacggcatcgacatgcccacgcgcagcgaactggtcgcgcacggtcgcacgcacgacgagatcgcccggatcatcggcgccgaccagctcgtctaccaggacgtggaagacatgaagcgcgcggtgcgcgacgtcaacccggcgctgcgcgatttcgaggcatcgtgcttcgacggccactacgtgaccggcgatatcgacgaagcgtatctcgaccggctggaagcgtcgcgcaacagcgcggcggcctgcgcggcccgcgacagcgcgcagaacgacaatccgcgcacgcagctgcacttgcagccgtcggccgtcaacgagtaa

SEQ ID NO: 30230 - protein, 511 aa, Ralstonia solanacearum GMI1000
MCGIVGVVSATPVNQLIYDSLLLLQHRGQDAAGIATAAGSTFHMHKANGMVRDVFRTRNMRGLPGTIGIGQVRYPTAGSASEEEAQPFYVSAPFGIVLAHNGNLTNSEQLREEMFRRDRRHINTHSDSEVLLNVLADELQRASNDIALSPEAIFKAVAGMHRRVRGSYAIVSQIAGYGMLAVRDPFGIRPLALGSQETPDGVEWMVASESVALEGIGFKFERDVAPGEAIFVDLEGQLHTKQCADHPVLTPCIFEYVYLARPDSRMDGASVYDARLRMGDYLAEKIKREVTDPIDVVMPIPDSSRPAAMQVANCLGVPYREGFFKNRYVGRTFIMPGQAVRKKSVRQKLNAMAIEFKGKNVLIVDDSIVRGTTSSEIVQMARDAGAKKVIFASAAPPVKFPNVYGIDMPTRSELVAHGRTHDEIARIIGADQLVYQDVEDMKRAVRDVNPALRDFEASCFDGHYVTGDIDEAYLDRLEASRNSAAACAARDSAQNDNPRTQLHLQPSAVNE

SEQ ID NO: 30231 - DNA, 1644 bp, Drosophila melanogaster
  CDS (1)..(1644)
atgatggcgcaaagtgattctggaaattgctgtgccaagcttaataaagatgagtgctgccagaagacaaaggatgtgatcttgagcggcgtatctcccaaaatgtttcccgacaaaatctacaagtctgttcaacccaaaggagaggatgccaccggaatgacctgcgaatgcggtgtttttgcagccatcgcttgcggggattacccaacacaactggacatagcacagatgatctgcctcggtctggtggctctgcagcatcgtggccaggagtcggcgggaatagtgaccagtttgggcaagtcctccaagaatttcagcgtacacaagggcatgggcatgatcaacaatctgttcaatgacgaggcgatcaggaagttaaagggtaacctgggaataggacacacccggtattccacggccgcagcctcggaagttgtgaactgccagccgtttgtggtgcacactgcccatggagcactggccattgcccacaatggtgagctagtgaactgcgagtccctgaggagggaggtcctggagcgaggagtgggcctgtctacgcacagtgacagtgaacttattgcccaatccctgtgctgtgcaccagaggatgtgtcggagcacgatggacccaattggccggccagaattcgccatttcatgaccctggctccactctcctactccctggtcgtgatgcacaaggataagatctacgctgtccgcgattcctatggcaatagaccgctgtgcttgggaaaaatcgtgcccgttgatgcaggacatgcgaatatcaatgaccaactggccgagggttgggtggtcagtagtgaaagctgcggattcctctccatcggagccagatatgttcgcgaggtggagcccggtgagatcatcgagctgtcacgaaatggttatagaaccgtggatatcgttgaaagaccggactataagcgcatggcattctgcatctttgagtacgtctactttgcccgcagtgattccatgttcgagggtcagatggtttactcagcccgcctgcaatgtggtcgccagttggccagggaatcgccattagatgcggatttggtcagctcggttccggaatcgggcacagcagctgcccatggttatgccagggagtcgggactgccattcggggaagttctctgcaagaatcgctatgtgggccgcacgttcatccaaccctcgacgagattgcgacagttgggcgtggccaaaaagtttggtgccctggctcaaaatgtcgagggcaagcggatcgtgctagtcgatgactccatagtgaggggaaataccattggaccgattatcaaactcctgcgagatgccggcgccaccgaggtgcacattcgcattgccagtcctccgctgcaatatccctgctacatgggtatcaatatacccactcgtgaggagctaatagccaacaaattgaatgcggatcagctggcggatcacgtgggtgcggatagtctggcctatttgagtgtggagggtctggtcaaggccgtccagatgaacaaggcccatgtgaatccactcaaagctggctactgcaccgcttgcctaacgggcgagtatcctggcggattgccggaggagctcagctggtag

SEQ ID NO: 30232 - protein, 547 aa, Drosophila melanogaster
MMAQSDSGNCCAKLNKDECCQKTKDVILSGVSPKMFPDKIYKSVQPKGEDATGMTCECGVFAAIACGDYPTQLDIAQMICLGLVALQHRGQESAGIVTSLGKSSKNFSVHKGMGMINNLFNDEAIRKLKGNLGIGHTRYSTAAASEVVNCQPFVVHTAHGALAIAHNGELVNCESLRREVLERGVGLSTHSDSELIAQSLCCAPEDVSEHDGPNWPARIRHFMTLAPLSYSLVVMHKDKIYAVRDSYGNRPLCLGKIVPVDAGHANINDQLAEGWVVSSESCGFLSIGARYVREVEPGEIIELSRNGYRTVDIVERPDYKRMAFCIFEYVYFARSDSMFEGQMVYSARLQCGRQLARESPLDADLVSSVPESGTAAAHGYARESGLPFGEVLCKNRYVGRTFIQPSTRLRQLGVAKKFGALAQNVEGKRIVLVDDSIVRGNTIGPIIKLLRDAGATEVHIRIASPPLQYPCYMGINIPTREELIANKLNADQLADHVGADSLAYLSVEGLVKAVQMNKAHVNPLKAGYCTACLTGEYPGGLPEELSW

SEQ ID NO: 30233 - DNA, 1509 bp, Agrobacterium tumefaciens str. C58
  CDS (1)..(1509): transl_table=11
atgattgagccgctttcgcattccccgttttctgggtccactttcaaggaagagatcgatggcgatacgctgcatgaagaatgcggcgttttcggcattctcggccatgacgatgcctcggcgctgaccgctctcggcctgcatgcgcttcagcatcgcggccaggaagcagccggcatcgtctcctttgatggcaagcgcttccatcaggagcgccatatgggcctcgtcggcgatcattataccgatccggcaacccttgcccgcctgcccggctccatcgcgattggccacacccgttattccacgacaggcgaagtggcgatgcgcaatgtgcagccgctgtttgccgagctggaagaaggcggcatttcgattgcccataacggcaatttcaccaacggcctgacgctgcgccgccagatcatcgccaccggcgccatctgtcagtcgacatcggataccgaagtcgtgctgcatctcatcgcccgttcacgccactcttccaccgccgatcgtttcatcgatgctatcaggcagatggaaggcggttattcgatgctggcgatgacgcggaccaagctgatcgccgcccgcgacccgatcggcatccgcccgctggtcatgggagagcttgatggcaagccgatcttctgctcggaaacctgtgctctcgacatcatcggcgcgaaattcgtgcgcgacgtggaaaacggcgaagtcatcatctgcgaaatccagcctgacggttctatcaccatcgatgcccgcaagccctcgaagccgcagccggagcgtctctgcctgttcgaatatgtctatttcgcccgtcccgattccgtcgtcggcggccgcaacgtctatacgacgcgcaagaacatgggcatgaaccttgccaaggaagcgccgctggaagccgatgtcgtggttccggttcccgatggcggcacgccggcagcgctcggttttgcgcaggcaagcggtattcccttcgaatacggcatcatccgcaaccattatgtcggtcgcaccttcattgagccgacacagcagatccgcgctttcggcgtcaagctcaagcattccgccaaccgggcgatgatcgaaggcaagcgcgtggtgctggtggatgattccatcgtgcgcggcacgacttcggtgaagatcgtgcagatgatccgcgaggcgggcgccaaggaagtgcatatccgcgtcgccagcccgatgatcttccatccggatttctacggcatcgacacgcctgacgctgataagctgctcgccaaccaatatgccgatgtggacgccatggcgaaattcattggtgccgattcgctggctttcctgtcgattgacgggctgtaccgcgccgttggcggtgaaaaccgcaaccacgcgcgcccgcagttcaccgaccattatttcaccggcgattatccgacccgtcttctcgaccagaacggcgaggccatgggcagcaagatttccatgctggccagcaacggctga

SEQ ID NO: 30234 - protein, 502 aa, Agrobacterium tumefaciens str. C58
MIEPLSHSPFSGSTFKEEIDGDTLHEECGVFGILGHDDASALTALGLHALQHRGQEAAGIVSFDGKRFHQERHMGLVGDHYTDPATLARLPGSIAIGHTRYSTTGEVAMRNVQPLFAELEEGGISIAHNGNFTNGLTLRRQIIATGAICQSTSDTEVVLHLIARSRHSSTADRFIDAIRQMEGGYSMLAMTRTKLIAARDPIGIRPLVMGELDGKPIFCSETCALDIIGAKFVRDVENGEVIICEIQPDGSITIDARKPSKPQPERLCLFEYVYFARPDSVVGGRNVYTTRKNMGMNLAKEAPLEADVVVPVPDGGTPAALGFAQASGIPFEYGIIRNHYVGRTFIEPTQQIRAFGVKLKHSANRAMIEGKRVVLVDDSIVRGTTSVKIVQMIREAGAKEVHIRVASPMIFHPDFYGIDTPDADKLLANQYADVDAMAKFIGADSLAFLSIDGLYRAVGGENRNHARPQFTDHYFTGDYPTRLLDQNGEAMGSKISMLASNG

SEQ ID NO: 30235 - DNA, 1551 bp, Brucella melitensis 16M
  CDS (1)..(1551): transl_table=11
gtgcctccgcttttccgcgatatgcttaagttgcctctgcaatcgaaaggccttgcggcaatgaccagccattcttctgaaaatgccccctttatgctggatgatgacaccctgcatgaagaatgtggtgtattcggcattctgggccatgaggatgcggctgcgctgaccgcgctcggcctgcatgcgctccagcatcgcggtcaggaagccgccggcattgtttcctatcataatcgccgtttccattccgaacgccatatgggcctcgtcggcgaccatttcaccgatgcggcaacactgaaccgcctgccgggcaaccgcgccatcggccatgtgcgttattccacaaccggcgagacgatcctgcgcaatgtacagccgctgtttgcggaactggaagtcggcggcatcgccattgcccataacggcaatttcaccaatggcattacgctgcgcaaacagttgattgcttccggcgcgatcttccaggcaacgtcggatacggaagtcgtgctgcacatgattgcccgttcgcggcactcctcctcaaccgaccgtttcgtggaagcgatccgccaggttgaaggcggctatgccatgctggcgcttacccgcaccaagctgatcgccgcgcgcgatcccatcggcattcgcccgctcgtcatgggcgagctggacggcaagccgatcttctgctcggaaacctgcgctctcgatattatcggcgcgaaatatattcgcgacgtcgagaatggcgaagtggtagtctgcgaaatccagaaggatggctccatcaccacccgatccatcaagccggaaaatccgcagccggagcggctgtgcctttttgaatatgtttatttcgcacggccggattcggtagtgggtggccgcagcgtctatgtggcgcgcaagaacatgggcatgaaccttgccgccgaggcgggcgtggatgccgatgtggtcgtgcccgtaccggatggcggtacgccggcagcgctgggctttgcgcaggcaagcggtattccgtttgaatatggcatcatccgcaaccattatgtgggccgcaccttcattgagcctacacagcagatccgcgcgcttggcgtgaagctgaaacattcagccaatcgcgctatgattgaaggcaagcgggtcgttctggtggatgattccatcgtgcgcggcaccacctcggtcaagatcgttcagatgatccgcgacgcaggcgcaaccgaagtccatatgcgcgtggcaagcccgatgatcttccacccggatttttacggtatcgacaccccccatgccgataagctgctggccaaccagcacgaaagcctcgaatccatgtgccgctacatcggcgccgattcgctggccttcctttccatcgacgggctctacaaggccgttggcggaaagccgcgtgatccaaaggcgccgaccttcaccgatcactatttcacgggcgagtatccgacccgccttctggatcaggaaggcgaaagcaacgtccacaccttgtcgctgctcgccagcaacggctga

SEQ ID NO: 30236 - protein, 516 aa, Brucella melitensis 16M
MPPLFRDMLKLPLQSKGLAAMTSHSSENAPFMLDDDTLHEECGVFGILGHEDAAALTALGLHALQHRGQEAAGIVSYHNRRFHSERHMGLVGDHFTDAATLNRLPGNRAIGHVRYSTTGETILRNVQPLFAELEVGGIAIAHNGNFTNGITLRKQLIASGAIFQATSDTEVVLHMIARSRHSSSTDRFVEAIRQVEGGYAMLALTRTKLIAARDPIGIRPLVMGELDGKPIFCSETCALDIIGAKYIRDVENGEVVVCEIQKDGSITTRSIKPENPQPERLCLFEYVYFARPDSVVGGRSVYVARKNMGMNLAAEAGVDADVVVPVPDGGTPAALGFAQASGIPFEYGIIRNHYVGRTFIEPTQQIRALGVKLKHSANRAMIEGKRVVLVDDSIVRGTTSVKIVQMIRDAGATEVHMRVASPMIFHPDFYGIDTPHADKLLANQHESLESMCRYIGADSLAFLSIDGLYKAVGGKPRDPKAPTFTDHYFTGEYPTRLLDQEGESNVHTLSLLASNG

SEQ ID NO: 30237 - DNA, 1263 bp, Pyrobaculum aerophilum str. IM2
  CDS (1)..(1263): transl_table=11
atgtgcggcataggcggcgcctggggcggcagggccggggagagggttaggcgcatggccccctggctcatgcaccggggacatgagggggtggggtatgcgtatatgaaaggaggggagattgccctgggggagccccgggacgacgcagagggggccttggtgcacaccagatacagcacctcgggggagtacggagtgcaactacagccagtcctcgccaagtatagagatttagaaatcgccgtggtcttcaacgggacagtagttaactacaagagactcggcgtggagagccccagttttgacggcgacgcgcttgccaaggccttggcgagggagatatgggagcggggagttgagcagggggttataagcgtatactctaaaatcgtcggcgcggccaccctcctggccttgaccccctggggccttctggccgtgagagatccgcgggggattaggccgctggcctaccgtctctacggagagggggtggccttctcttcagagaccgtggcgctgggaggcgggcaggaggtggccccgggcctagccgtgttgtacggcaagaggatggccttttggaaaatacccccaggagaggccaaaatatgcgccatggagctagtctacttcgcccacccagcctctattctgggcaaccgcctcgtggccgacgtgaggagggcattggggagggccctcgcagaggtggagacccacaacttcgacgtagtggcctacgtccccgagactgcgaggactgcggcggaggccttcgccgaggcgctgggaaagccgctggtagacgccgtggtgaagaacaggtttgcggggcgggtcttcatcacgccgcctcacctccgaaaccccggcgatgcctttcgggctgtgccccagctggtagagggcagaagggttgcccttgtggacgactcgttgataagaggcacaaacattaggacggtggtgagattgctgaaggaggcgggagccagggaggtacacgtgaggatagcgtcgccccccgtgaaatggccctgcttcttcggcatggacttccagacaaggagggagcttgtagctcacaaacgcgacgtggaggcaataagggcgtacataggcgcggacagcctcatatacctacccctcgaaaagtttagacagatcctgggaagcgcctgctacggctgcttcaccggggagtacccggtccagataaacgtcgaggaggcggaggtaagtacgcgcggcgcttag

SEQ ID NO: 30238 - protein, 420 aa, Pyrobaculum aerophilum str. IM2
MCGIGGAWGGRAGERVRRMAPWLMHRGHEGVGYAYMKGGEIALGEPRDDAEGALVHTRYSTSGEYGVQLQPVLAKYRDLEIAVVFNGTVVNYKRLGVESPSFDGDALAKALAREIWERGVEQGVISVYSKIVGAATLLALTPWGLLAVRDPRGIRPLAYRLYGEGVAFSSETVALGGGQEVAPGLAVLYGKRMAFWKIPPGEAKICAMELVYFAHPASILGNRLVADVRRALGRALAEVETHNFDVVAYVPETARTAAEAFAEALGKPLVDAVVKNRFAGRVFITPPHLRNPGDAFRAVPQLVEGRRVALVDDSLIRGTNIRTVVRLLKEAGAREVHVRIASPPVKWPCFFGMDFQTRRELVAHKRDVEAIRAYIGADSLIYLPLEKFRQILGSACYGCFTGEYPVQINVEEAEVSTRGA

SEQ ID NO: 30239 - DNA, 1446 bp, Clostridium perfringens str. 13
  CDS (1)..(1446): transl_table=11
atggtgaagccaaattttgatattatggatccacaaaatgataaattcaaagatgaatgcggagtttttggagttttcgcaaataaaccaatagatgttgcttctataaattattatggactttatgctcttcaacatagaggacaagaaagtgctggcattgcagtagcaaatggagaagatataaaagttcataaggggttaggtgttttaacggaagcctttgaagctgaagatttaaagagacttagagaatttaatggttatatatcaataggacatgttagatattctacagcgggagctaaaactgttgaaaatgcacaacctttagttagtaatactaaacttggtcctatatctactgctcataatggtaatttagttaatgcagatgtaataagaagtcttttagaggatgggggacaagttttccatactagtgttgattctgaggtgattacaagcttagttgctagaggagctaaaaaagggattgagagggctgtaattgatgctatatcagcggttaaaggttctttcgctatggtaataatgactaaggataagctaataggtataagagatccacatggaattagacctttatgcttaggaaaatttgaagagggatatatattaacttcagaaagttgtgctttagacacaattggagcagagtttgtgagagatataaaaccaggagaaatcgtggttatagataatgatgggattaaaagttatagatattcagaaaatactgtttgccaaacctgtgcctttgaatatatatactttgcaagaccagattcagtaattgatggtttagatgttcaaactacaagggttaagcaaggagaaatattatttaaagaatatccaatagatgctgatattgtggtagctgtaccagattcaggaataccagctgctatgggatatgctaaggcttcaggaattccttatgaggttggatttgtgaaaaatagatatataggaagaacatttatatcaccatcacaagaaattagggagagagctgtagctgtaaagcttaatcctttaaaagttaatgtaaatggaaagagagttattttaatagacgattctattgttagaggaacaacttctaaacatttaattgaatctttaagaagagctggtgctaaggaagttcattttctagttgcatcaccaatggttaaatatccatgttattttggcattgatacaccatatagaagtcagttaattggagcaagtagaagtgtagaagaaattagagagatgataggttgtgattctctagggtatttaagtttagaaggaatgtacgaaagttttgaaggtagaagaaatttctgtgtaggatgctttagtggggtttatccagttgcagcgcctatggaagctttagaggataatcttgaaagggtggagaattaa

SEQ ID NO: 30240 - protein, 481 aa, Clostridium perfringens str. 13
MVKPNFDIMDPQNDKFKDECGVFGVFANKPIDVASINYYGLYALQHRGQESAGIAVANGEDIKVHKGLGVLTEAFEAEDLKRLREFNGYISIGHVRYSTAGAKTVENAQPLVSNTKLGPISTAHNGNLVNADVIRSLLEDGGQVFHTSVDSEVITSLVARGAKKGIERAVIDAISAVKGSFAMVIMTKDKLIGIRDPHGIRPLCLGKFEEGYILTSESCALDTIGAEFVRDIKPGEIVVIDNDGIKSYRYSENTVCQTCAFEYIYFARPDSVIDGLDVQTTRVKQGEILFKEYPIDADIVVAVPDSGIPAAMGYAKASGIPYEVGFVKNRYIGRTFISPSQEIRERAVAVKLNPLKVNVNGKRVILIDDSIVRGTTSKHLIESLRRAGAKEVHFLVASPMVKYPCYFGIDTPYRSQLIGASRSVEEIREMIGCDSLGYLSLEGMYESFEGRRNFCVGCFSGVYPVAAPMEALEDNLERVEN

SEQ ID NO: 30241 - DNA, 1350 bp, Pyrococcus furiosus DSM 3638
  CDS (1)..(1350): transl_table=11
gtgaggggtgaaagcatagtgattagggagaaatgtggtatatttgcggcatatgctgataatgctcctgagaaggcttattactctctgttatcactccagcatagaggtcaggagggagctggaattactttttgggaaaatggtatcaagacgataaagggaattgggcttgtccctgaagtttttaaagggggaatagagtcgaaatcaagccttgcaattggacatgtgagatattctacttttggctcccttacggaagttcagcccattgaagttaaatgttgcaattataagcttgcaatagctcacaatgggactcttacaaactatctgccattaagagagaagtatgaaagtgagggcttcaagtttaactccactatagacacagagctaattggagtggcctttttgaaacattacaaagagctcggagatgaattcaaggcaatggaagaagtttttaatgaagttaggggagcttattctgtggcaattctctttgatggaaagataatcgtggcgagagatcccgctggttttagacctttagcttatggagaaggagatggtttttatttcgcttctgagaactcaggtttgagaatgtttacaaataagattagagatgtctttccaggcgaagtttttgttgttgaagagggtgaaatttatagtaaagttctgaagaaacttcctcatagccattgtgtttttgaatatatttactttgcaagacctgatagcaatatagagggggtaagtgtttacttggcaaggtataggatgggagttgaattagcaagagaaagcccagctcctggagatgttgttatagctgttcccgattctggaaggacagcggcccttggttttgcccatgaaagtggaattccttatatggaaggacttataaagaaccgttatattgggagaacttttatcatgcccagcggaagggagcttaaagttaagctaaagctttctcctgtaagggaggtcattgagggaaaaagggtggttttggttgatgattcaatagttagaggaacgaccataaagagaatagtaaagatgattagagatgcaggggctgaggaagttcatgtaagaatttcttcacctccaattagatatccatgctacatggggatagatattccaactaggcatgagcttattgcagcatggagaactgtcgaggatataagaagagaaattggagctgattctttagcttatttgagcatagaaggccttaaaagagctgtaggaatagaggatctttgcatggcctgcttaactggtcattatcccgagtgggcctttgactttgagttatga

SEQ ID NO: 30242 - protein, 449 aa, Pyrococcus furiosus DSM 3638
MRGESIVIREKCGIFAAYADNAPEKAYYSLLSLQHRGQEGAGITFWENGIKTIKGIGLVPEVFKGGIESKSSLAIGHVRYSTFGSLTEVQPIEVKCCNYKLAIAHNGTLTNYLPLREKYESEGFKFNSTIDTELIGVAFLKHYKELGDEFKAMEEVFNEVRGAYSVAILFDGKIIVARDPAGFRPLAYGEGDGFYFASENSGLRMFTNKIRDVFPGEVFVVEEGEIYSKVLKKLPHSHCVFEYIYFARPDSNIEGVSVYLARYRMGVELARESPAPGDVVIAVPDSGRTAALGFAHESGIPYMEGLIKNRYIGRTFIMPSGRELKVKLKLSPVREVIEGKRVVLVDDSIVRGTTIKRIVKMIRDAGAEEVHVRISSPPIRYPCYMGIDIPTRHELIAAWRTVEDIRREIGADSLAYLSIEGLKRAVGIEDLCMACLTGHYPEWAFDFEL

SEQ ID NO: 30243 - DNA, 1347 bp, Fusobacterium nucleatum subsp. nucleatum ATCC 25586
  CDS (1)..(1347): transl_table=11
atgggaatattagctttacattcaaaaaaagttagaaatgatttagtgggaatcgcatattatggaatgtatgctttacaacatagaggacaagcaggagcaggatatactatctgtgactctaaaactaataatgaagtaagaataaaaactattaaaaatgtaggacttgtatcagatgtatttaaagttgaagattttcaaaaatttattggaactatcttaatagctcatacaagatatggtagtaaaaatacagtttcttcaagaaattgtcaacctgttggtggagaatctgctatgggttatatatctcttgtacataatggtgacatatcaaatcaagctgaattgaaacaagaattattaaacaatggttctttattccaaacagcaatagatactgaaattatactaaaacttttaagtatcaatggtaaatatggttataaagaagcagttttaaaaacagttaaaaaattaaaaggttgttttactcttggaataataataaatgataaacttataggagttcgtgatcctgaaggattaagaccattatgtctaggtagaatagttgaaaatgatatgtatgttctggcttctgaaacttgtgcattagatgctattggtgcagaatttgtgagagatatagaagcaggagaaatggtagttatagatgacaatggagtggaaagcataaaatataaggaaagtagtaaaaaagcaagttcatttgaatatatttattttggaagaccagatagtgttatagatggaattagtgtttacgattttagacatcaaacgggaaaatgcttatatgaacaaaatccgatagaagctgatattgttattggtgttcctgattcaggtgttccagcagcaataggatattctgaagcaagtggaataccctattcagcagcacttttaaaaaataaatatgtaggtagaacatttattgctcctgtacaagaattgagagagagagcagtaaaagttaaattgaatcctattaaagaattaattaagggaaaaagagttgtagttatagatgactctattgttcgtggaacaacttctaaaaaattaatagatattttatttgaagcaggagcaaaagaagttcactttagatcagcttcaccagttgttattgaagaatcatattttggagtaaatatagatcctaataataagttaatgggaagctatatgagtattgaagaaattagaaaagtaataggagcaacaacattggactatctttcattaaaaaatttaaagaaaattttaaatggtggagaagatttttatatgggttgctttaaggaggatgaataa

SEQ ID NO: 30244 - protein, 448 aa, Fusobacterium nucleatum subsp. nucleatum ATCC 25586
MGILALHSKKVRNDLVGIAYYGMYALQHRGQAGAGYTICDSKTNNEVRIKTIKNVGLVSDVFKVEDFQKFIGTILIAHTRYGSKNTVSSRNCQPVGGESAMGYISLVHNGDISNQAELKQELLNNGSLFQTAIDTEIILKLLSINGKYGYKEAVLKTVKKLKGCFTLGIIINDKLIGVRDPEGLRPLCLGRIVENDMYVLASETCALDAIGAEFVRDIEAGEMVVIDDNGVESIKYKESSKKASSFEYIYFGRPDSVIDGISVYDFRHQTGKCLYEQNPIEADIVIGVPDSGVPAAIGYSEASGIPYSAALLKNKYVGRTFIAPVQELRERAVKVKLNPIKELIKGKRVVVIDDSIVRGTTSKKLIDILFEAGAKEVHFRSASPVVIEESYFGVNIDPNNKLMGSYMSIEEIRKVIGATTLDYLSLKNLKKILNGGEDFYMGCFKEDE

SEQ ID NO: 30245 - DNA, 1455 bp, Streptococcus pyogenes MGAS8232
  CDS (1)..(1455): transl_table=11
atgacatacgaagtaaaatctctaaatgaagaatgtggagtctttggtatctgggggcatcctcaggcagctcaagtcacttactttgggcttcatagccttcaacatcgcggtcaagaaggagctggtattgtttcaaatgacaatgggaaactctatggttatcgaaatgttgggcttctttctgaagtttttaagaatcaatctgaattagataatttaactgggaatgcggctattggacatgttcggtatgctactgcaggttctgcagatattcgcaatattcagccttttctttataaatttcatgacgggcaatttgctttatgccataatggtaatttgacaaatgctatttccttaaggaaagaattagaaaagcaaggtgcaattttcaatgcctcctcagatactgaaattttaatgcatttgattcgtcgaagccataactcaaatttcatgggaaaggtaaaagaagctctaaatacagtaaagggtggctttgcctatctactgatgacagaaaataaattaattgctgctcttgaccctaatgcctttcgtcctttgtcaattggacaaatgcaaaatggtgcctgggttatttccagtgagacctgtgcttttgaggtggtaggcgcaaaatgggttagagatgttgaacctggcgaagttattcttatagacgatagtggtattcaatgtgatcgttatactgatgaaacgcaactggcaatttgttcgatggaatatgtctattttgcaaggccggattcaactatacatggtgttaatgttcatacggctcgaaaaaatatgggaaagcgtcttgcacaagaatttaaacaggatgctgatattgtaattggtgtcccaaattcgtccttatcggctgctatgggctttgctgaagaatccggattaccaaatgagatgggtcttgtaaaaaatcagtatacgcagcgaacctttattcaaccgacacaagaattaagggaacaaggtgttcgaatgaaactatcagcggtatctggtgttgtcaaaggaaagcgcgttgttatgattgatgactcaattgtaagaggaacgacttctagaaggattgtcggattattaagagaagcaggagctagtgaagtacatgttgctatagctagtccagaattaaagtatccttgtttttatggtattgatattcaaacaagacgagaattaatttcagcaaatcacgctgttgacgaagtgtgtgatattattggcgcagatagtctgacctatctctcattagatgggttgattgaatcaattggactcgaaacaaaagcaccaaatggtggtttatgcgtagcttactttgatgggcattatccaacaccgctttatgattatgaagaagaatacctcagaagtttagaagagaaaacaagtttttatattcaaaaagtgaaataa

SEQ ID NO: 30246 - protein, 484 aa, Streptococcus pyogenes MGAS8232
MTYEVKSLNEECGVFGIWGHPQAAQVTYFGLHSLQHRGQEGAGIVSNDNGKLYGYRNVGLLSEVFKNQSELDNLTGNAAIGHVRYATAGSADIRNIQPFLYKFHDGQFALCHNGNLTNAISLRKELEKQGAIFNASSDTEILMHLIRRSHNSNFMGKVKEALNTVKGGFAYLLMTENKLIAALDPNAFRPLSIGQMQNGAWVISSETCAFEVVGAKWVRDVEPGEVILIDDSGIQCDRYTDETQLAICSMEYVYFARPDSTIHGVNVHTARKNMGKRLAQEFKQDADIVIGVPNSSLSAAMGFAEESGLPNEMGLVKNQYTQRTFIQPTQELREQGVRMKLSAVSGVVKGKRVVMIDDSIVRGTTSRRIVGLLREAGASEVHVAIASPELKYPCFYGIDIQTRRELISANHAVDEVCDIIGADSLTYLSLDGLIESIGLETKAPNGGLCVAYFDGHYPTPLYDYEEEYLRSLEEKTSFYIQKVK

SEQ ID NO: 30247 - DNA, 1356 bp, Methanopyrus kandleri AV19
  CDS (1)..(1356): transl_table=11
ttgtgcggggtttccggctgttacctgcttaaggaaaacgaggcgggcgtttataattacctcatcctccatgcgaaccagcacaggggccaagagtcggccggaatctgcgtgtacgatggactccgactggtcgggaagaagggcatgggcctagtgaccgaagtcttcgatcggcccgacctgcggaagctctcgggtccagtgggtatcggccacgtcaggtactcgacgactggcgcttccgagctcgtcaacgcccaaccgttcaaagtggggtactcgaagggcgagctggctttggcccacaacggagacatcgtgaactccgaagagctaaggcgggagctcgtttccgacggacatgctttcgtttcggagactgattcggaggtcatcgcccgactgctcgcggtcgctctcaccgagaccgacgatatgttcgaggcgttcgaggacgttatggaacggttggtaggctcgtactccctgaccgtgataacgagtcacggtgacctaatcgcggtccgagatccctggggattccgaccactgtgcctgggatgggacgaacgtggcttcttcgtttcctccgagacggtaggtctggacgtgttaggtgtggaggaacgccgcgagctggaacgtggcgaggtagtttggattcgggagggcgacgtcgaaagtaaagtcgtgagaagggaacgcaaggccgtctgtatgttcgagttcgtgtacttcgcacggccggattccatcatcgaaggcaggtgcgtgtacgaatgtcggaagtgcatgggtaagcgactcgccgaggaggccccggtcgagtgcgatctggtggttcccgtcccggattcgggtcggacggcggcgctgggatacgcggagtcgttgggggtccctatggaagagggactgatcaaaaatcggtacgtgggtaggacgttcatcatgccggagcaggaggagcgcgtacggagcatccgggtaaagctgaaccccatccgggaggtgatcaaagggtgctcgctggcagtagtggacgacagcatcgtacgtggaaacacctctcgacaaatagtggaaatgctgcgggatgccggggcccgtgaggttcacatgaggatcgcgtcacctcccgtggtgtccccttgttactacgggatcgacatggccacgaaggaggagctaatagccgcagacctcgatgttccagagatctgtgagaaaatctcggcagactcgctggcttacctgtctctagaaggtctcgtcgagtcgatcagattgaagaaacgggagctgtgcgtgggttgcctcacgggggagtaccccaccccggtccccgaatga

SEQ ID NO: 30248 - protein, 451 aa, Methanopyrus kandleri AV19
MCGVSGCYLLKENEAGVYNYLILHANQHRGQESAGICVYDGLRLVGKKGMGLVTEVFDRPDLRKLSGPVGIGHVRYSTTGASELVNAQPFKVGYSKGELALAHNGDIVNSEELRRELVSDGHAFVSETDSEVIARLLAVALTETDDMFEAFEDVMERLVGSYSLTVITSHGDLIAVRDPWGFRPLCLGWDERGFFVSSETVGLDVLGVEERRELERGEVVWIREGDVESKVVRRERKAVCMFEFVYFARPDSIIEGRCVYECRKCMGKRLAEEAPVECDLVVPVPDSGRTAALGYAESLGVPMEEGLIKNRYVGRTFIMPEQEERVRSIRVKLNPIREVIKGCSLAVVDDSIVRGNTSRQIVEMLRDAGAREVHMRIASPPVVSPCYYGIDMATKEELIAADLDVPEICEKISADSLAYLSLEGLVESIRLKKRELCVGCLTGEYPTPVPE

SEQ ID NO: 30249 - DNA, 1455 bp, Methanosarcina acetivorans C2A
  CDS (1)..(1455): transl_table=11
ctgcaccggaggtcaagattgaaagaagaatgcggagttgcaggcataatcctccctgacgacaggtctcagtcaaatactgtcgcattcaagctttactatgccctgtacgccctccagcataggggacaggaatctacgggtataatggtgcatgatgggacatctcccctctccatcaagggtatggggcttgtgccggacgtgtacaacaaggattctctggggcgccttatagggaatgcaggagtcggacacgtccgctactctacgactggcgggtcaaggattgaaaattgtcagccttttatccttaatttcaagggtggaacagttgccattgcccataacgggaatctggtaaatgcaagagcgctcaaagacgagctggaaaacgaaggccgaatttttataagtaattccgataccgaggttatcggtcacctgcttgtgaaggaactgataaggcacgatcctatcgagtctatcaggaatgtaatgcgcaagcttgttggatcttattctcttgttatcttcatcaacggtgttgtgtacgctgtcagggaccccttcggcctcaagcccctctgttttggagaagttgacggcggatatggaatattttcggaaagtgttgctattgataccctgaacggcacccttatccgggatgtcaggccaggcgaggtaatggtctttacgagttcaggctttgagagccaccagctcacaaatgagccccacccggcacattgtgtttttgagtttatttactttgcaagacccgattccgtcatagacggcaaactcgtctacaagatccgggaaagaatcggaagagagcttgcccgtgagcatgatgttgaagcggatatcgtttctcctgtccctgactcgggaattacgtctgcaatcggctatgcaagagagtccggaatcatgtatctggaaggtcttatgaagaaccgctacatagggcgcacatttattcttccgggacaggacctgcgcgaaactgcagttcggctcaagatgaacgccattcaggaaaacgtcaaaggaaagcgtgtagtccttgtcgatgacagcattgtccgcggcacaacttcccggcgtatcatagatatggtcaggaaggcaggtgcgtcagaagtccatgcaagggtcggaagtccggcaattattgccccctgctatctcgggatcgatatggcaacccggcaggaacttattgcctcatacaagactataaaagaggttgaagggctaataaatgccgactctctcggttatctcagcattgaagggctcatgagagctcttgagtgcgataagaacgatatgtgcatcggctgccttacaggtgagtatcctgtagacatccccggcgagaaatgcagaaaaaagcagtcccgccttgatgatttcagtaaggacgcaagttcctctaagtaa

SEQ ID NO: 30250 - protein, 484 aa, Methanosarcina acetivorans C2A
MHRRSRLKEECGVAGIILPDDRSQSNTVAFKLYYALYALQHRGQESTGIMVHDGTSPLSIKGMGLVPDVYNKDSLGRLIGNAGVGHVRYSTTGGSRIENCQPFILNFKGGTVAIAHNGNLVNARALKDELENEGRIFISNSDTEVIGHLLVKELIRHDPIESIRNVMRKLVGSYSLVIFINGVVYAVRDPFGLKPLCFGEVDGGYGIFSESVAIDTLNGTLIRDVRPGEVMVFTSSGFESHQLTNEPHPAHCVFEFIYFARPDSVIDGKLVYKIRERIGRELAREHDVEADIVSPVPDSGITSAIGYARESGIMYLEGLMKNRYIGRTFILPGQDLRETAVRLKMNAIQENVKGKRVVLVDDSIVRGTTSRRIIDMVRKAGASEVHARVGSPAIIAPCYLGIDMATRQELIASYKTIKEVEGLINADSLGYLSIEGLMRALECDKNDMCIGCLTGEYPVDIPGEKCRKKQSRLDDFSKDASSSK

SEQ ID NO: 30251 - DNA, 1398 bp, Thermoanaerobacter tengcongensis MB4
  CDS (1)..(1398): transl_table=11
atgggaaatggagagaaattaaaagaggaatgtggtgtttttggtgcctttagtttgtccacttcagttacttcttatatctattatggcttacaagccttgcagcacagagggcaggaaagttcaggtatagctatttatgatggcgaaaaaataaattgtattaaggggttgggacttgtcagcgaggtctttaataaggagaatttaaagacattagaggggaaaatggggataggccatgtaaggtattctactacaggcagcaataacattataaatgctcaacccctcgttgctaattttaaaaacaaatatatggctcttgcccataatggcaatttgataaacgcagaagagttaagatgcctattggaggaggatggtagaatatttcaaactacaactgatagtgaaataattctccatctaattgcaaaaaattttcaagaaaacttaatcggagctcttttagaaacaatgaaacaaataaaaggttcatatgctttggtgattttaacagacaataaattaatagggataagagacgtaaacagtataaggcctctttgcataggtaaaaaagatgacacttatttcttatcttctgagtcttgtgcttttgacgtaataggagcagaattgatacgagatgtggaagcaggtgaaatagttataattgatgaaaaaggtatagattctgttaagttagaagtaaaagaaaaaaagaagccttgtgtttttgaatacatctattttgctagacctgacagtgtcatagatggaaaaagtgtttattttacacgattggagatggggaaaagattagctgaagaagcacctgtagatgcagacttggtagtaccagttccagattcaggtattgctgctgcaagaggctattctctcaaaacagggataccaatgggggaaggacttataaaaaataaatacattggaaggacttttattgctcccgaccaaagggatagagagacaggcgtgaggataaagctaaatgtcttaaaagaattggttcaaggcaaaaggatagttttaatagatgattcaattgttagaggcacaactatgaaaagattagtgagtctactaaaaaatggcggagcaaaagaagtccatgtgaggataagttcaccccctgttaaatattcttgctactttggaattgatactccgacaaaaaaagaactgatagcggcgaggatgtcagttgaagagatgtgcaaattaataggagctgacagcctacagtttttaagtattgaagggcttataaaaagtgtaggacttaaatctatttgcacaggttgctttgatggcaattatcctatgtatgttccaaaagaaagaagtaaatatctttttgagaaaaaataa

SEQ ID NO: 30252 - protein, 465 aa, Thermoanaerobacter tengcongensis MB4
MGNGEKLKEECGVFGAFSLSTSVTSYIYYGLQALQHRGQESSGIAIYDGEKINCIKGLGLVSEVFNKENLKTLEGKMGIGHVRYSTTGSNNIINAQPLVANFKNKYMALAHNGNLINAEELRCLLEEDGRIFQTTTDSEIILHLIAKNFQENLIGALLETMKQIKGSYALVILTDNKLIGIRDVNSIRPLCIGKKDDTYFLSSESCAFDVIGAELIRDVEAGEIVIIDEKGIDSVKLEVKEKKKPCVFEYIYFARPDSVIDGKSVYFTRLEMGKRLAEEAPVDADLVVPVPDSGIAAARGYSLKTGIPMGEGLIKNKYIGRTFIAPDQRDRETGVRIKLNVLKELVQGKRIVLIDDSIVRGTTMKRLVSLLKNGGAKEVHVRISSPPVKYSCYFGIDTPTKKELIAARMSVEEMCKLIGADSLQFLSIEGLIKSVGLKSICTGCFDGNYPMYVPKERSKYLFEKK

SEQ ID NO: 30253 - DNA, 1593 bp, Streptomyces coelicolor A3(2)
  CDS (1)..(1593): transl_table=11
gtgatccatgagtggtcccgtatccccaattcggaccagtggtcgatctcgcctacactcgaaggcgtgccacgtggtgacggtcgactcaatcacgatctgcttcccggcgagaagggcccccaggacgcttgcggcgtcttcggtgtctgggctccgggcgaagaggtcgcaaagctcacgtacttcgggctgtacgccctccagcatcggggccaggaatccgcgggaatcgcggtcagcaacggctcccagatcctcgtcttcaaggacatgggcctggtgtcccaggtcttcgacgagacctcgctcggttcgctccagggtcacatcgcggtcggtcacgcccgctactcgaccaccggtgcctccgtgtgggagaacgcccagccgacgttccgtgccaccgcgcagggttccatcgcgctcgggcacaacggcaacctcgtcaacaccgcccagctcgccgggctggtggccgacctgccgaagcaggacggccgctccacccgggtcgcggcgaccaacgacaccgacctgatcaccgcgctgctcgcgggccaggtcgacgacgacggcaagccgctgaccgtcgaggaggcggccggcaaggtgctgccccaggtgcgcggcgccttctccctcgtcttcatggacgagcacaccctctacgccgcccgcgacccgcagggcatccgcccgctggtcctcggccgcctggagcgcggctgggtggtcgcctccgagtccgccgccctggacatctgcggcgcctcctacgtccgggagatcgagccgggcgagttcgtcgccatcgacgagaacggcctgcggacatcgcgattcgcagaagcgaagcccaagggctgtgtcttcgagtacgtgtacctggcccgcccggacaccgacatcgccggccgcaacgtctacctctcgcgtgtcgagatgggccgcaagctggcgaaggaggcccccgcggaggccgatctcgtcatagcgaccccggaatccggcacccccgccgcgatcggctacgccgaggcctccggcatccccttcggcaacggcctggtgaagaacgcctatgtcggccggaccttcatccagccctcacagaccatccgccagctgggcatccgcctgaagctgaatcccctgaaggaagtcatcaagggcaagcggctggtcgtcgtcgacgactccatcgtccgcggcaacacccagcgggccctggtccgcatgctccgcgaggcgggcgccgccgagatccacatccggatctcgtccccgcccgtgaagtggccctgcttcttcggcatcgacttcgccacccgcgccgagctgatcgccaacggcatgagcgtcgaggagatcggcacctcgatgggcgccgactccctggcgtacatctccatcgacggcatgatcgaggcgaccaccatcgccaagcccaacctgtgccgcgcctgcttcgacggcgagtacccgatggagcttcccgaccccgagctgctcggcaagcagctcctggagaccgagctggccgccgggcccgccggtacggccgccgccgacgccatccgtcgcccgtag

SEQ ID NO: 30254 - protein, 530 aa, Streptomyces coelicolor A3(2)
MIHEWSRIPNSDQWSISPTLEGVPRGDGRLNHDLLPGEKGPQDACGVFGVWAPGEEVAKLTYFGLYALQHRGQESAGIAVSNGSQILVFKDMGLVSQVFDETSLGSLQGHIAVGHARYSTTGASVWENAQPTFRATAQGSIALGHNGNLVNTAQLAGLVADLPKQDGRSTRVAATNDTDLITALLAGQVDDDGKPLTVEEAAGKVLPQVRGAFSLVFMDEHTLYAARDPQGIRPLVLGRLERGWVVASESAALDICGASYVREIEPGEFVAIDENGLRTSRFAEAKPKGCVFEYVYLARPDTDIAGRNVYLSRVEMGRKLAKEAPAEADLVIATPESGTPAAIGYAEASGIPFGNGLVKNAYVGRTFIQPSQTIRQLGIRLKLNPLKEVIKGKRLVVVDDSIVRGNTQRALVRMLREAGAAEIHIRISSPPVKWPCFFGIDFATRAELIANGMSVEEIGTSMGADSLAYISIDGMIEATTIAKPNLCRACFDGEYPMELPDPELLGKQLLETELAAGPAGTAAADAIRRP

SEQ ID NO: 30255 - DNA, 1458 bp, Methanosarcina mazei Go1
  CDS (1)..(1458): transl_table=11
ttgaaagaagagtgcggggttgcaggcataattttgcctgatgacagacccgcgtcaaatgctgtcgcattcaagctttattatgccctttatgcccttcagcacagaggacaggaatcgacaggcataatggtgcacaacggctcatgtccgctttccatcaaaggaatggggcttgtacctgatgtatataacaaagattccctcgggcgtctggtcggtaatgcaggagtcgggcatgtccgttactccacaactggcgggtcaaagattgaaaactgtcagccttttatcctgaacttcaagggcggaacagttgccattgctcataatgggaatctggtaaatgcaagggaactgaaggatgagctggaaaatgaaggcagaatttttatcagtgattcagatactgaagttattggccatctgcttgtaaaagaactgataaaacacgaacctatcgagtctatcaggactgtaatgcgcaagcttgttggctcttactctcttgtcattttcattaacggtgttatctacgccgtaagggatcctttcggttttaagccactctgttttggagaagttgacggcggatacggagtattttccgagagcgtagccattgacaccctgaacggcacccttataagggacgtcaaaccaggcgaggtcatggtctttacaggctcaggttttgaaagccaccagctcgcaaatgaaccgcatccggcacattgcgtttttgagttcatttactttgcaaggccagactccgttatagacggcaagcttgtctataaagtaagggaaagaatcggaagggagcttgcccgcgaacatcatgtagacgcagacatcgtgtctcctgtccctgactccggaatcacttccgcaatcggctatgcaagggaatcaggtataatgtacctggaagggctcatgaagaaccgttatatcgggcgcaccttcattcttccgggacaggacctgcgtgaaactgcagttcggcttaagatgaacgctattcaggacaatatcaaaggcaaacgtgttgtcctggtagatgacagcattgtccgcgggactacctcgaggcgtatcatagatatggtcaggaaggcaggcgcgtcagaagtccacgcaagggtcggaagcccggcaattattgccccctgctacctgggaatcgatatggcaacccggcaggaacttatcgcttcatacaagaccataaaagaggtcgaagggctgataagtgctgattctctcggctacctcagcatcgacgggcttatgagagcacttgagtgcgacaagaacgacatgtgcattggctgccttacaggagaatatcctgtagagatcccgggcgagaaatgcagaaagaaacagacccgtctggacgatttcagtaaggctgaaagatcctctcaggcagtatctccggacagcctttaa

SEQ ID NO: 30256 - protein, 485 aa, Methanosarcina mazei Go1
MKEECGVAGIILPDDRPASNAVAFKLYYALYALQHRGQESTGIMVHNGSCPLSIKGMGLVPDVYNKDSLGRLVGNAGVGHVRYSTTGGSKIENCQPFILNFKGGTVAIAHNGNLVNARELKDELENEGRIFISDSDTEVIGHLLVKELIKHEPIESIRTVMRKLVGSYSLVIFINGVIYAVRDPFGFKPLCFGEVDGGYGVFSESVAIDTLNGTLIRDVKPGEVMVFTGSGFESHQLANEPHPAHCVFEFIYFARPDSVIDGKLVYKVRERIGRELAREHHVDADIVSPVPDSGITSAIGYARESGIMYLEGLMKNRYIGRTFILPGQDLRETAVRLKMNAIQDNIKGKRVVLVDDSIVRGTTSRRIIDMVRKAGASEVHARVGSPAIIAPCYLGIDMATRQELIASYKTIKEVEGLISADSLGYLSIDGLMRALECDKNDMCIGCLTGEYPVEIPGEKCRKKQTRLDDFSKAERSSQAVSPDSL

SEQ ID NO: 30257 - DNA, 1467 bp, Xanthomonas axonopodis pv. citri str. 306
  CDS (1)..(1467): transl_table=11
atgtgtggcatcgtcggtattgtcggcaaccagaacgtcgccgggcagctgtatgacggcctgaccgtcctgcagcatcgtgggcaggacgccgcaggcatcgccaccgcagatggcacgcgcctgcgcgtgcagaaggccaacggcctggtgcgcgacgtcttcgacgaaaagaagatggcggtgctggaaggccgcgtcggcatcgcgcattgccgctacccgaccgcaggttcggaaggcatggacgaggcgcagccgttctacgtcaactcgccctacggcatcgcgctggcgcacaacggcaacctgatcaacaccgaggccttgcgccaacaggtgttcgaagccgaccgccgcaatatcaataccgattcggacagcgaagtgctgttgaacgtgttcgcctacgagctggacgcgcagcgcatgcttacccccgaagcggcgatccgcgcggtggccggcgtgcaccgccgttgcaagggcggctacgcggtggtcagcgtggtgctgggcctgggcctggtggcgttccgcgatccgcacggcatccgcccgctggtgctgggcaagcgcgagcatgccgaaggcaccgaatacatcgtgtcctccgaatcggcagcgctggatatcctcggctaccagcgcgtgcgcgacgtgcgcccgggcgaagcgctggtgatcaccgcgcgcggcgaactgttctcggaagtctgcgcggcaccgaccaacaacgcgccgtgcattttcgagtacgtgtatttcgcgcgccccgattcgatgatcgacaacatctcggtgcacaaggcgcgcatgcgcatgggcctgaagctgggcgaaaagatcctgcgcctgcgcccggaccatgacatcgacaccatcattccgatcccggacacctcgcgcgatgtggcgttggagatgtccaacgtgctcggcgtgaagtaccgcgagggcttcgtcaagaatcgctacgtgggccgcaccttcatcatgccggggcagggcgaacggcagaaatcggtacgtcgcaagctcaatccgatccatctggaatttcgtaaccgcgtggtgctgctggtggacgattccatcgtgcgcggcaccaccagccggcagatcgtgcagatggcgcgcgatgccggtgcgcgcaaggtgtacctggcctccgccgcgccgccggtgcgctaccccaacatctacggcatcgacatgccggccgccgaagagctcatcgcgcatggccgcagcgagctggaaatccaggagttcctgggctgcgactggctgatctaccaggatctggaagacctggaagtggcggtgcgcgaaggtaatccggacatcaagcagttcgattcttcgtgcttcaacggcgagtacatcaccggtatcgaaccggggtatttcgaacgcatccagcagctgcgctcggacgatgccaagaagcgtcgccgcgcctga

SEQ ID NO: 30258 - protein, 488 aa, Xanthomonas axonopodis pv. citri str. 306
MCGIVGIVGNQNVAGQLYDGLTVLQHRGQDAAGIATADGTRLRVQKANGLVRDVFDEKKMAVLEGRVGIAHCRYPTAGSEGMDEAQPFYVNSPYGIALAHNGNLINTEALRQQVFEADRRNINTDSDSEVLLNVFAYELDAQRMLTPEAAIRAVAGVHRRCKGGYAVVSVVLGLGLVAFRDPHGIRPLVLGKREHAEGTEYIVSSESAALDILGYQRVRDVRPGEALVITARGELFSEVCAAPTNNAPCIFEYVYFARPDSMIDNISVHKARMRMGLKLGEKILRLRPDHDIDTIIPIPDTSRDVALEMSNVLGVKYREGFVKNRYVGRTFIMPGQGERQKSVRRKLNPIHLEFRNRVVLLVDDSIVRGTTSRQIVQMARDAGARKVYLASAAPPVRYPNIYGIDMPAAEELIAHGRSELEIQEFLGCDWLIYQDLEDLEVAVREGNPDIKQFDSSCFNGEYITGIEPGYFERIQQLRSDDAKKRRRA

SEQ ID NO: 30259 - DNA, 1494 bp, Chlorobium tepidum TLS
  CDS (1)..(1494): transl_table=11
atgtgcggagttttcggcgtttttaattcaaaaactcccgccgaagataccttttacggcctctactcgctacaacaccgaggacaggaagccgcaggtatcgtcgttgccgaatacaacaaggccaagaaaaagaccctgttcaagcagcataaagggctggggctggtatccgaagttttcaaggacgaacagattttcgagaacctgagcggatacgcagcaatcggccataaccgctactccaccaccggcgcctccaaatcgaacaacaatatccagcccttctccctcacctaccgctccggcagcctcgccatcgcccacaacggaaacctgaccaattcgagagttttgcgcaaggagctgaccgaagagggcgtaattttccaggcctcatcggataccgaaatcatcccgcaccttgccgcgcgcagcaaggaaaaagagccactgcaccagatttacgatgcattgcggcaggtagaaggagctttttcgatcgtgattctggccaacaaccagatgattgcggcgcgagacccttacggcgtgcgccccttggctctcggcaagaaaatcgatcccgcaaccggtgagctggcctacgtcgtagcgagcgaaacctgtgctttcgacatcatcaaggccgagtacatccgcgacatcgaaccgggtgaaatcctcctgatcgaccacctcgccgtggacaacgaaaagccggtttcgctctaccttccacctgtcgagcgcaaagcccgctgcatcttcgagtatgtctatttcgcccgcccggacagcttcatctttcggcactcggttgacaaggtgcgccggaacctcggcaagaacctggccagggaatcaacgatcgaacgagaccccaacgacaaggagctggccgtagtcagcgtgccagactcctcgaacacggctgcgctcggcttcgtcagagaaagcaacaaactcggcaagcctgcgcgcttcgagcacggcctgatccgcaaccactatgttggccgcacctttattcagccaggcattcagagccgtgaaatcaaggttcgctcgaaatacaacatcgtgcgcggcgtcatgcagggccgcccaatcatcctcgtcgatgactcgatcgtgcgcggcacaacggccaagatgctcatcaagctggttcgcgaggccaatccgaaagagattcacctgcacatcagctcaccaccgatcaccaatccctgcttttacggcatggacttcccctccaagcgccaactgctcacgcacatgcttgctgacgccgagcacgagctgggcgatatcgaaaaaatcagggagtacatcggcgtggattcactgagatatctctccatgcagggcctcctgaacagcgtaccggaattcgagggcgaaacctgcagctactgcactgcctgcttcagcggcgactaccccatcccgatcgccgacgccacgaccgacaaggaagagaacgactaa

SEQ ID NO: 30260 - protein, 497 aa, Chlorobium tepidum TLS
MCGVFGVFNSKTPAEDTFYGLYSLQHRGQEAAGIVVAEYNKAKKKTLFKQHKGLGLVSEVFKDEQIFENLSGYAAIGHNRYSTTGASKSNNNIQPFSLTYRSGSLAIAHNGNLTNSRVLRKELTEEGVIFQASSDTEIIPHLAARSKEKEPLHQIYDALRQVEGAFSIVILANNQMIAARDPYGVRPLALGKKIDPATGELAYVVASETCAFDIIKAEYIRDIEPGEILLIDHLAVDNEKPVSLYLPPVERKARCIFEYVYFARPDSFIFRHSVDKVRRNLGKNLARESTIERDPNDKELAVVSVPDSSNTAALGFVRESNKLGKPARFEHGLIRNHYVGRTFIQPGIQSREIKVRSKYNIVRGVMQGRPIILVDDSIVRGTTAKMLIKLVREANPKEIHLHISSPPITNPCFYGMDFPSKRQLLTHMLADAEHELGDIEKIREYIGVDSLRYLSMQGLLNSVPEFEGETCSYCTACFSGDYPIPIADATTDKEEND

SEQ ID NO: 30261 - DNA, 1449 bp, Thermosynechococcus elongatus BP-1
  CDS (1)..(1449): transl_table=11
atgacagaacaacaatttgcggataagccggaagaggcctgtggggtatttggggtttatgcccccggggcggatgtggctcgcctcacctactttggtctctatgccctgcaacaccgaggtcaggaatccgctggaattgctacatttgccggtgacaccgtccactgtcacaaggatatgggtttggtgtcccaagtctttgacgaagagattttgggacggctggtgggagatttggctgtgggccacaaccgctactcaaccacgggttccagtcgcattgtcaacgcccaaccagtggtggtagacactcgtttaggacctttggccttagcccacaacggcaacttagtgaatacctacgccctgcgggaacaggtgctggcctgtgatgcgccgacggcggtgttggcgagcacaaccgattctgaactcattgcctgggcgatcgcccaagcggtggccaccggtcaatcctgggcagaggggatgattacagcggctcaacagtgccaaggggcttttagtttagtaatgggtaccccagcgggattgtttggactgcgggatgcccacggcatccgtcccttagtcattggccgcttgatgacagaagggacgccccactatgtccttgcttcggagacctgcgccctcgatattattggtgccgactatgtgcgggatgtggagccgggggaactggtgcacattactccggaagggattggcagtgtgcagtgggcagagtctcaacggaagctgtgtatctttgagatgatttactttgcccgtcccgatagtgtcatgcagcgggagagcctctatagctatcggcagcgcttgggttatcagttgggtcgtgaagctcccgccgatgccgacgtggtgattgctgtgcctgattctggggtgccagcggccattggcttttcccaagcaactggggtaccctatgccgaaggcttgattaaaagtcgctacgtggggcggacatttattcagcccacccagtcgatgcgggagtcgggaattcgcatgaagctgaatccactgccagatgtgctgatgggtcagcgggtggtgattgtggatgactcgattgtgcggggcaccactagccgcaaaattgtcaaggcgctgcgggatgccggtgctgtggaagtccacatgcgcatttcttcgccccctgttacccacccctgcttctatggcatcgataccgatacccaagatcagctgattgctgccaccaagtctgtgcctgaaattgccgctcagattggcgtggattccctcagttacctcagttggcaggggatgattgccgccacctacgatacgggcgatcgcttctgttccgcctgttttaccggcaactacccgattagcatccccgagccagtgaaacggcaaaagttggtgcttgagcaacttccccaatga

SEQ ID NO: 30262 - protein, 482 aa, Thermosynechococcus elongatus BP-1
MTEQQFADKPEEACGVFGVYAPGADVARLTYFGLYALQHRGQESAGIATFAGDTVHCHKDMGLVSQVFDEEILGRLVGDLAVGHNRYSTTGSSRIVNAQPVVVDTRLGPLALAHNGNLVNTYALREQVLACDAPTAVLASTTDSELIAWAIAQAVATGQSWAEGMITAAQQCQGAFSLVMGTPAGLFGLRDAHGIRPLVIGRLMTEGTPHYVLASETCALDIIGADYVRDVEPGELVHITPEGIGSVQWAESQRKLCIFEMIYFARPDSVMQRESLYSYRQRLGYQLGREAPADADVVIAVPDSGVPAAIGFSQATGVPYAEGLIKSRYVGRTFIQPTQSMRESGIRMKLNPLPDVLMGQRVVIVDDSIVRGTTSRKIVKALRDAGAVEVHMRISSPPVTHPCFYGIDTDTQDQLIAATKSVPEIAAQIGVDSLSYLSWQGMIAATYDTGDRFCSACFTGNYPISIPEPVKRQKLVLEQLPQ

SEQ ID NO: 30263 - DNA, 1455 bp, Streptococcus agalactiae 2603V/R
  CDS (1)..(1455): transl_table=11
atgacatacgaagtaaaatctctaaatgaagaatgtggagtctttggtatctgggggtatcctcaggcagctcaagtcacttactttgggcttcatagccttcaacatcgcggtcaagaaggagctggtattatttcaaatgataatgggaaactctatggttatcgaaatgttgggctcctttctgaagtttttaagaatcaatctgaattagataatttaactgggaatgcggctattggacatgttcggtatgctactgcaggttctgcagatattcgcaatattcagccttttctttataaatttcatgatgggcaatttgctttatgtcataatggtaatttgacaaatgctatttcctcaaggaaagaattagaaaagcaaggtgcaattttcaatgcctcctcagatactgaaattttaatgcatttgattcgtcgaagccataacccaagttttatggggaaggtaaaagaagctttaagcactgtaaagggaggtttcgcctatctactgatgacagaagataaattaattgctgctcttgaccctaatgcctttcgtcctttgtcaattggacaaatgcaaaatggtgcctgggttatttccagtgagacctgtgcttttgaggtggtaggcgcaaaatgggttagagatgttgaacctggtgaagttattcttatagacgatagtggtattcaatgtgatcgttatactgatgaaacgcaactggcaatttgttcgatggaatatgtctattttgcaaggccggattcaactatacatggtgttaatgttcatacggctcgaaaaaatatgggaaagcgtcttgcacaagaatttaaacaggatgctgatattgtaattggtgtcccaaattcgtccttatcggctgctatgggctttgctgaagaatccggattaccaaatgagatgggccttgtaaaaaatcagtatacgcagcgaacctttattcaaccgacacaagaattaagggaacaaggtgttcgaatgaaattatcagcggtatctggtgttgtcaaaggaaagcgcgttgttatgattgatgactcaattgtaagaggaacgacttctagaaggattgtaggattattaagagaagcaggagctactgaagtacatgttgctatagctagtccagaattaaagtatccttgtttttatggaattgatattcaaacaagacgagaattaatttcagcaaatcacgctgttgacgaagtgtgtgatattattggcgcagatagtctaacttatctatcaatcgatgggttaattaaatcaattggactcgaaacaaaagcaccaaatggtggtttatgcgtagcttactttgatggacattatccaacaccgctttatgattatgaagaagaatacctcagaagtttagaagaaaaaacaagtttttatattcaaaaagtgaaataa

SEQ ID NO: 30264 - protein, 484 aa, Streptococcus agalactiae 2603V/R
MTYEVKSLNEECGVFGIWGYPQAAQVTYFGLHSLQHRGQEGAGIISNDNGKLYGYRNVGLLSEVFKNQSELDNLTGNAAIGHVRYATAGSADIRNIQPFLYKFHDGQFALCHNGNLTNAISSRKELEKQGAIFNASSDTEILMHLIRRSHNPSFMGKVKEALSTVKGGFAYLLMTEDKLIAALDPNAFRPLSIGQMQNGAWVISSETCAFEVVGAKWVRDVEPGEVILIDDSGIQCDRYTDETQLAICSMEYVYFARPDSTIHGVNVHTARKNMGKRLAQEFKQDADIVIGVPNSSLSAAMGFAEESGLPNEMGLVKNQYTQRTFIQPTQELREQGVRMKLSAVSGVVKGKRVVMIDDSIVRGTTSRRIVGLLREAGATEVHVAIASPELKYPCFYGIDIQTRRELISANHAVDEVCDIIGADSLTYLSIDGLIKSIGLETKAPNGGLCVAYFDGHYPTPLYDYEEEYLRSLEEKTSFYIQKVK

SEQ ID NO: 30265 - DNA, 1407 bp, Oceanobacillus iheyensis HTE831
  CDS (1)..(1407): transl_table=11
atgcttgctgaaatcaaaggcataaatgaagaatgtggtgtttttggcatctggggtcacgaaaaagcagctgaattaacttattatggcttacattccatgcaacatcgaggacaagaaggtgctggggttgttgttaatacgggtagcgaactaaaaggacataaaggtttgggtcttgtaaatgatgtgttcaaacgagttaaatttgatgacttggaaggaagtgtagcagtagggcacgtccggtatgcgacacaaggtgggagaggcattgaaaatgtccaacctttattatttcagtcacaaactggcggaatggcgctagcacataatggtaatctgatgaacgcacatgaactgcgtggcgaattagaaggagaaggaagcatattacaaacctcttcggatacggaagtcttagctcatttaattaaacgtagtggagaagtaacagaggactctatagctcgtgcactgaatcgtgtagtcggtgcatacgcatatatcatactgcaagaagataaaatgtttgcagcacttgatccttcaggtattcgtccactttctattggtagattgggagatgcttatgtgatagcttccgagacgtgtgcttttgaccaaattggtgcaacatttgaacgagaagtgcttccaggggaattgatcacaattagtgatgaagggatgacctctactcgatttgcaccaagagacaagcgacgaatgtgtgcaatggaatatgtctacctttctagaccagatagtgatgtgaactatgtgaatgtccatgcgtcgagaaaacaaatggggaaagagttagcgaaagaatcatccgttgatgcggatatcgttgtcggtgtacctgattctagtatttctgctgcaatcggctatgcggaagaaagtggactcccttatgaaatgggcatcataaaaaatcgttatgtcggacgtacctttatccaaccatctcaagaactcagagaattaggggtgaagatgaagctttcacctgttcgaagcattattgaaggaaaacgagttgttatgattgatgattcaattgtacgtgggacaacaagccgacgcattgttcagatgttacgagaagcgggtgcaaaagagattcatgttcggatagcttctccagcgattcaaaatccatgttattacggaattgatatgtctactaaaaaagaattaattggagccaattattctgttgatgaaatcaatggaattataggctcagatacgctagcttatttatcagaaaaagggttggaaaaagcaatcgtaaaagacaaaacgattaatcaaggtgtttgtatggcttgtatgactggcaaatacccagtaaaacaagacggtgaattggaaattcattatacaagttgttaa

SEQ ID NO: 30266 - protein, 468 aa, Oceanobacillus iheyensis HTE831
MLAEIKGINEECGVFGIWGHEKAAELTYYGLHSMQHRGQEGAGVVVNTGSELKGHKGLGLVNDVFKRVKFDDLEGSVAVGHVRYATQGGRGIENVQPLLFQSQTGGMALAHNGNLMNAHELRGELEGEGSILQTSSDTEVLAHLIKRSGEVTEDSIARALNRVVGAYAYIILQEDKMFAALDPSGIRPLSIGRLGDAYVIASETCAFDQIGATFEREVLPGELITISDEGMTSTRFAPRDKRRMCAMEYVYLSRPDSDVNYVNVHASRKQMGKELAKESSVDADIVVGVPDSSISAAIGYAEESGLPYEMGIIKNRYVGRTFIQPSQELRELGVKMKLSPVRSIIEGKRVVMIDDSIVRGTTSRRIVQMLREAGAKEIHVRIASPAIQNPCYYGIDMSTKKELIGANYSVDEINGIIGSDTLAYLSEKGLEKAIVKDKTINQGVCMACMTGKYPVKQDGELEIHYTSC

SEQ ID NO: 30267 - DNA, 1512 bp, Bifidobacterium longum NCC2705
  CDS (1)..(1512): transl_table=11
ttgtcggctgaactcgaagacattcacgaggaatgtggcatcttcggcgtatggggccaccccgacgcctcacgactcacctattttggcctgcacgcgctgcagcatcgcggtcaggaaggtgccggcatcgtctccaacgataacggtcatctcatcggtcatcgcggactcggcctgctcacccaggtgttcggcgatgagcgcgaaatcgaacgactgaagggcaattgcgccatcggccacgtgcgttacgcaacggccggctcgggcaccacggacaacatccagccgttcatcttccgcttccatgacggcgacgtggctctgtgccataacggcaacctgacgaactgcccgtcactgcgccgcaagcttgaagacgaaggcgccatcttccattcgaactccgacaccgaagtgctgatgcacttgattcgccgttcgatgcagcgcacctttatggacaagctcaaggaagcgctcaacacggtgcatggcggtttcgcctacctgctgatgaccgaagacgccatgatcggcgcactcgacccgaacggcttccgcccgctctccctcggcaagatgaagaacggcgcctacgtgctcgcctccgaaacctgcgcactggatgtcgtcggcgccgagctggtgcgtaacattcgcccgggtgaaatcgtggtggtcaacgatcacggctacaagatcgtgcagtacaccaacaacacgcagctggccatctgctcgatggagtacatctacttcgcccgcccggattccgatatctatggcgtcaacgtgcactccgcccgcaagcgcatgggcgcacgtctcgccgccgaatccccggtggaggccgatatggttatcggcgtgccgaactcctcattgtccgccgcatccggctatgcggaagcagcaggcctgcccaacgaaatgggtctaatcaaaaaccagtatgtggcccgcaccttcattcagcccacgcaagaactgcgcgagcagggtgtgcgtatgaagctctctgctgtgcgcagcgtggttaaaggcaagcgcgttatcgttatcgatgattccatcgtgcgcggcaccacgtccaagcgcatcgtgcagctgctcaaggaagccggcgccgctgaagtgcatatgcgcatcagctccccgccgctgaagtacccctgcttctatggcatcgatatctccaccaccaaggaactcatcgcagccaagatgagcgtggaggaaatccgtgaatacatcggcgcggattccttggcctacctttcgctcgacggtctggtcgaatccatcggactgaacgccgacgccccatacggtggcctgtgcgtcgcctacttcaacggcgactaccccactgcgctcgacgactacgaggccgacttcctgaagtccctcacgcccgaggaccgtgtgcgtctgcctgaattcgcgctgtacaagagcaagtacatcggcaacgagtacaacaccgtgcagccggacgccgaatag

SEQ ID NO: 30268 - protein, 503 aa, Bifidobacterium longum NCC2705
MSAELEDIHEECGIFGVWGHPDASRLTYFGLHALQHRGQEGAGIVSNDNGHLIGHRGLGLLTQVFGDEREIERLKGNCAIGHVRYATAGSGTTDNIQPFIFRFHDGDVALCHNGNLTNCPSLRRKLEDEGAIFHSNSDTEVLMHLIRRSMQRTFMDKLKEALNTVHGGFAYLLMTEDAMIGALDPNGFRPLSLGKMKNGAYVLASETCALDVVGAELVRNIRPGEIVVVNDHGYKIVQYTNNTQLAICSMEYIYFARPDSDIYGVNVHSARKRMGARLAAESPVEADMVIGVPNSSLSAASGYAEAAGLPNEMGLIKNQYVARTFIQPTQELREQGVRMKLSAVRSVVKGKRVIVIDDSIVRGTTSKRIVQLLKEAGAAEVHMRISSPPLKYPCFYGIDISTTKELIAAKMSVEEIREYIGADSLAYLSLDGLVESIGLNADAPYGGLCVAYFNGDYPTALDDYEADFLKSLTPEDRVRLPEFALYKSKYIGNEYNTVQPDAE

SEQ ID NO: 30269 - DNA, 1515 bp, Shewanella oneidensis MR-1
  CDS (1)..(1515): transl_table=11
atgtgtggtatcgtcggaatagttggccaatcatcggttaatcagaccatttatgatgcactgactgtgcttcaacacagaggtcaggatgcggcaggtattgtcaccgttgatcgtggtgctttcagactacgtaaagccaatggtctagtcaaagacgtatttgaagtcaaacacatgcagcgcctacagggcaatgcgggtattggccatgtacgttatcctactgctggcagttccagtgcgtcagaagcgcagcctttctatgttaactcgccatttgggatttcattggcccataacggtaacttaaccaacacacttgaattggccgaaggcctgatcaaaaaacgtcgccatgtgaacaccacatctgactcagaggtgttgttaaacctgcttgccgatgaactgcaaaaaaccacgagcctcgatctgaccgctgacgaagtgtttgacactatcgctaaggttcatgagcaggcccgtggcgcctatgccgtagtggccatgatcattggtcaaggtttagtcgcatttcgcgatcctttcggcattcgccctttggtactaggtaaacatgaaacgccaactggcactgaatacatggtcgcctctgagagcgtggccctcgatgccgtaggctttgaagtcatgcgcgatgtggcaccaggtgaggcgatttatatttcccttgatggcaatctttacacccgccaatgtgcaaaagagccaagctattcaccttgtatcttcgaatttgtatatttcgctcgccctgattccaccatcgataatgtctctgtttacgctagccgcgtgaatatgggggctaagcttggtgagaagattaagaaagaatggtacgaccatgatatcgatgtggtgatccctattccggaaacctcatgcgatatcgcgctggaaatcgcacgctgcatggatttgccttatcgccaaggttttgtgaagaaccgttatatcggccgtacctttattatgcctggccaacaggaacgtaagaaatcagtacgccgtaaactcaatgccatcaataccgagtttaaaggtaaaaatgtcctgttagtcgatgactctatcgtgcgcggcaccacctctgagcaaattattgagatggcccgtgaagcaggggcgaagaaagtatactttgcctccgcggcgccggaaatccgcttcccgaacgtgtatggtatcgatatgccaacgtcgaacgagcttatcgcccacggtcgtgatgccgatgaaattgctaaactgattggtgccgatggcattatcttccaaaatctgccggatctgattgaagcggtaagaatggaaaatcctgagatcaaacgttttgaaacctcagtgtttgacggacattacatcaccaacgatgttgatcaatcctatcttgatcatttaacgcagcttcgtaacgatgatgccaaagctgaccgtaataaggatattggtactaaccttgagttgcacaacgtctgccatccctag

SEQ ID NO: 30270 - protein, 504 aa, Shewanella oneidensis MR-1
MCGIVGIVGQSSVNQTIYDALTVLQHRGQDAAGIVTVDRGAFRLRKANGLVKDVFEVKHMQRLQGNAGIGHVRYPTAGSSSASEAQPFYVNSPFGISLAHNGNLTNTLELAEGLIKKRRHVNTTSDSEVLLNLLADELQKTTSLDLTADEVFDTIAKVHEQARGAYAVVAMIIGQGLVAFRDPFGIRPLVLGKHETPTGTEYMVASESVALDAVGFEVMRDVAPGEAIYISLDGNLYTRQCAKEPSYSPCIFEFVYFARPDSTIDNVSVYASRVNMGAKLGEKIKKEWYDHDIDVVIPIPETSCDIALEIARCMDLPYRQGFVKNRYIGRTFIMPGQQERKKSVRRKLNAINTEFKGKNVLLVDDSIVRGTTSEQIIEMAREAGAKKVYFASAAPEIRFPNVYGIDMPTSNELIAHGRDADEIAKLIGADGIIFQNLPDLIEAVRMENPEIKRFETSVFDGHYITNDVDQSYLDHLTQLRNDDAKADRNKDIGTNLELHNVCHP

SEQ ID NO: 30271 - DNA, 1440 bp, Streptococcus mutans UA159
  CDS (1)..(1440): transl_table=11
atgacatacgaagtaaaatctctcaacgaagaatgtggggtcttcggtatctggggacatcctcaagcagctcaagtcacttattttggactgcatagtctgcaacaccgtggtcaagaaggtgctggcattctgacaaatgatgctggcaaattgatacgacatcgtgatacaggattaatttcagaagttttcaaaaatccagctaatttggaaaaattaacaggtcaggctgctattgggcatgtccgttatgcaacggctggagaagcctccattgataatatccagcctttccattttaagttttacgatatggaatttggtctggcacataacggtaacctgactaatacgaaaaccctgaagaaagaattagaacataacggcgctatcttctcttcttcatctgatacggaaattctggctcatcttattcgccgcagccataatccaagctttatgggtaaggttaaggaagcgctcaatacggtcaaaggtggttttgcctatcttctgatgatggaagataagctgattgcagctcttgatccaaacggttttcgtccgctttctattggtaaaatggcaaatggtgccatcgttgtttccagcgaaacctgtgcctttgaagtggtgggtgccgagtggattcgtgatgtcaagccgggtgaagtggttatcattgataatagtggtatccagtacgacacttacacgacagatacgcagttggctatttgttcaatggaatacatctactttgcccgtcctgactcaaatattcacggggtcaatgtccacactgctcgtaaacgtatgggagcacagttggcgcgtgagttcaaacatgaggcagacattgtggtcggtgtacctaattcctcactcagcgcagctatgggcttcgccgaagaatcaggactgccaaatgaaatgggtcttatcaaaaatcaatacacccaacgaacctttatccagccaacgcaggaactgcgtgagcaaggggttcgcatgaaactttctgccgtatctggagtggttaaaggcaaacgtgtcgtcatgattgatgactccatcgtgcgtgggacaacctcacgtcgtatcgttcagctcttgaaagaagctggtgctacagaggttcacgtggctatcggtagcccagcgctggcctatccatgtttctatgggattgatattcaaacacggcgtgaattgattgcggctaatcattctgttgaagaaacacgccagattatcggtgcggatagcctaacttacttgtctattgacggtttgattgactctatcggacttgaaacagatgccccaaacggcggtctctgtgttgcttactttgatggcaagtacccaacaccgctttacgattacgaagaagagtatcgtagaagcttggatgagaaggttagcttttattga

SEQ ID NO: 30272 - protein, 479 aa, Streptococcus mutans UA159
MTYEVKSLNEECGVFGIWGHPQAAQVTYFGLHSLQHRGQEGAGILTNDAGKLIRHRDTGLISEVFKNPANLEKLTGQAAIGHVRYATAGEASIDNIQPFHFKFYDMEFGLAHNGNLTNTKTLKKELEHNGAIFSSSSDTEILAHLIRRSHNPSFMGKVKEALNTVKGGFAYLLMMEDKLIAALDPNGFRPLSIGKMANGAIVVSSETCAFEVVGAEWIRDVKPGEVVIIDNSGIQYDTYTTDTQLAICSMEYIYFARPDSNIHGVNVHTARKRMGAQLAREFKHEADIVVGVPNSSLSAAMGFAEESGLPNEMGLIKNQYTQRTFIQPTQELREQGVRMKLSAVSGVVKGKRVVMIDDSIVRGTTSRRIVQLLKEAGATEVHVAIGSPALAYPCFYGIDIQTRRELIAANHSVEETRQIIGADSLTYLSIDGLIDSIGLETDAPNGGLCVAYFDGKYPTPLYDYEEEYRRSLDEKVSFY

SEQ ID NO: 30273 - DNA, 1413 bp, Drosophila melanogaster
  CDS (1)..(1413)
atgatctgcctcggtctggtggctctgcagcatcgtggccaggagtcggcgggaatagtgaccagtttgggcaagtcctccaagaatttcagcgtacacaagggcatgggcatgatcaacaatctgttcaatgacgaggcgatcaggaagttaaagggtaacctgggaataggacacacccggtattccacggccgcagcctcggaagttgtgaactgccagccgtttgtggtgcacactgcccatggagcactggccattgcccacaatggtgagctagtgaactgcgagtccctgaggagggaggtcctggagcgaggagtgggcctgtctacgcacagtgacagtgaacttattgcccaatccctgtgctgtgcaccagaggatgtgtcggagcacgatggacccaattggccggccagaattcgccatttcatgaccctggctccactctcctactccctggtcgtgatgcacaaggataagatctacgctgtccgcgattcctatggcaatagaccgctgtgcttgggaaaaatcgtgcccgttgatgcaggacatgcgaatatcaatgaccaactggccgagggttgggtggtcagtagtgaaagctgcggattcctctccatcggagccagatatgttcgcgaggtggagcccggtgagatcatcgagctgtcacgaaatggttatagaaccgtggatatcgttgaaagaccggactataagcgcatggcattctgcatctttgagtacgtctactttgcccgcagtgattccatgttcgagggtcagatggtttactcagcccgcctgcaatgtggtcgccagttggccagggaatcgccattagatgcggatttggtcagctcggttccggaatcgggcacagcagctgcccatggttatgccagggagtcgggactgccattcggggaagttctctgcaagaatcgctatgtgggccgcacgttcatccaaccctcgacgagattgcgacagttgggcgtggccaaaaagtttggtgccctggctcaaaatgtcgagggcaagcggatcgtgctagtcgatgactccatagtgaggggaaataccattggaccgattatcaaactcctgcgagatgccggcgccaccgaggtgcacattcgcattgccagtcctccgctgcaatatccctgctacatgggtatcaatatacccactcgtgaggagctaatagccaacaaattgaatgcggatcagctggcggatcacgtgggtgcggatagtctggcctatttgagtgtggagggtctggtcaaggccgtccagatgaacaaggcccatgtgaatccactcaaagctggctactgcaccgcttgcctaacgggcgagtatcctggcggattgccggaggagctcagctggtag

SEQ ID NO: 30274 - protein, 470 aa, Drosophila melanogaster
MICLGLVALQHRGQESAGIVTSLGKSSKNFSVHKGMGMINNLFNDEAIRKLKGNLGIGHTRYSTAAASEVVNCQPFVVHTAHGALAIAHNGELVNCESLRREVLERGVGLSTHSDSELIAQSLCCAPEDVSEHDGPNWPARIRHFMTLAPLSYSLVVMHKDKIYAVRDSYGNRPLCLGKIVPVDAGHANINDQLAEGWVVSSESCGFLSIGARYVREVEPGEIIELSRNGYRTVDIVERPDYKRMAFCIFEYVYFARSDSMFEGQMVYSARLQCGRQLARESPLDADLVSSVPESGTAAAHGYARESGLPFGEVLCKNRYVGRTFIQPSTRLRQLGVAKKFGALAQNVEGKRIVLVDDSIVRGNTIGPIIKLLRDAGATEVHIRIASPPLQYPCYMGINIPTREELIANKLNADQLADHVGADSLAYLSVEGLVKAVQMNKAHVNPLKAGYCTACLTGEYPGGLPEELSW

SEQ ID NO: 30275 - DNA, 1455 bp, Streptococcus agalactiae NEM316
  CDS (1)..(1455): transl_table=11
atgacatacgaagtaaaatctctaaatgaagaatgtggagtctttggtatctgggggcatcctcaggcagctcaagtcacttactttgggcttcatagccttcaacatcgcggtcaagaaggtgctggtattgtttcgaatgataatgggaaactctatggttatcgaaatgttgggctcctttctgaagtttttaagaatcaatctgaattagataatttaactgggaatgcggctattggacatgttcggtatgctactgcaggttctgcagatattcgcaatattcagccttttctttataaatttcatgacgggcaatttgctttatgccataatggtaatttgacaaatgctatttctttaaggaaagaattagaaaagcaaggtgcaattttcaatgcctcctcagatactgaaattttgatgcacttgattcgtcgaagccataacccaagttttatggggaaggtaaaagaagctttaagcactgtaaagggaggcttcgcctatctactgatgacagaagataaattaattgctgctcttgaccctaatgcctttcgtcctttgtcaattggacaaatgcaaaatggtgcttgggttatttccagtgagacctgtgcttttgaggtggtaggcgcaaaatgggttagagatgttgaacctggcgaagttatccttatagacgatagtggtattcaatgtgatcgttatactgatgaaacgcaactggcaatttgttcgatggaatatgtctattttgcaaggccggattcaactatacatggtgttaatgttcatacggctcgaaaaaatatgggaaagcgtcttgcacaagaatttaaacaggatgctgatattgtaattggtgtcccaaattcgtccttatcggctgctatgggctttgctgaagaatccggattaccaaatgagatgggtcttgtaaaaaatcagtatacgcagcgaacctttattcaaccgacacaagaattaagggaacaaggtgttcgaatgaaactatcagcggtatctggtgttgtcaaaggaaagcgcgttgttatgattgatgactcaattgtaagaggaacgacttctagaaggattgtcggattattaagagaagcaggagctagtgaagtacatgttgctatagctagtccagaattaaagtatccttgtttttatggtattgatattcaaacaagacgagaattaatttcagcaaatcacgctgctgacgaagtgtgtgatattattggcgcagatagtctgacttatctctcactagatgggttgattgaatcaattggactcgaaacaaaagcaccaaatggtggtttatgcgtagcttactttgatggacattatccaacgccgctttatgattatgaagaagaatacctcagaagtttagaagaaaaaacaagtttttatattcaaaaagtgaaataa

SEQ ID NO: 30276 - protein, 484 aa, Streptococcus agalactiae NEM316
MTYEVKSLNEECGVFGIWGHPQAAQVTYFGLHSLQHRGQEGAGIVSNDNGKLYGYRNVGLLSEVFKNQSELDNLTGNAAIGHVRYATAGSADIRNIQPFLYKFHDGQFALCHNGNLTNAISLRKELEKQGAIFNASSDTEILMHLIRRSHNPSFMGKVKEALSTVKGGFAYLLMTEDKLIAALDPNAFRPLSIGQMQNGAWVISSETCAFEVVGAKWVRDVEPGEVILIDDSGIQCDRYTDETQLAICSMEYVYFARPDSTIHGVNVHTARKNMGKRLAQEFKQDADIVIGVPNSSLSAAMGFAEESGLPNEMGLVKNQYTQRTFIQPTQELREQGVRMKLSAVSGVVKGKRVVMIDDSIVRGTTSRRIVGLLREAGASEVHVAIASPELKYPCFYGIDIQTRRELISANHAADEVCDIIGADSLTYLSLDGLIESIGLETKAPNGGLCVAYFDGHYPTPLYDYEEEYLRSLEEKTSFYIQKVK

SEQ ID NO: 30277 - DNA, 1533 bp, Corynebacterium efficiens YS-314
  CDS (1)..(1533): transl_table=11
atgcatgtggcacaacttgatcagcacacatcccccggttctgtcgtgaactacccctacgatgatcacaacgaacagtccccgcaggaggaatgcggagtgttcggtgtctgggctccaggtgaagaggtggccaagctcacctacttcggtctgtttgccctgcagcaccgtgggcaggaggccgccggcattgcggtaggggacggcgaacagatcctggtgttcaaagacctcggtctggtatcccaggtcttcgacgaacccatcctggagtccctgcagggggacatcgccatcgggcacacccggtacaccaccgcgggcggcaactcctgggagaacgcccagccgatgttccgcatggccccggacggcaccgatgtggcgctgggtcacaacggcaacctcatcaaccatgtgcagctgcgcgagaaggcgaccgaactcggcctcgtcgacccgcagcagaagccttccgacaccgatgtgctgaccgcgctgctggccaacggcatcggtgacggtgatgatctcttcgaatccgcccggaagctcctccccgaggtcaggggggcctactgcctgaccttcaccgatggccacaccctctacgccgcccgtgacccctacggcatccgaccgctgtccatcggacgtctcgcccgtggctgggtggttgcctccgagacctccgccctggatatcgtcggtgcttcgctggtgcgtgaggtggagcccggtgagctcatcgccatcgatgaatccgggctgcgttccacccgttttgcagagaccaaccgcaaggcctgcgtcttcgaatatgtctacctagcccgccccgactcggtgatcaagggacgcaacgtcaatgaggtccgtctggagatcgggcgcaccctggcacgggaagccccggccgagggtgatctggtcatcccgacacctgattccggcacccctgcggcggtggggttcgcccaggcctccggcatccccttcgggcagggcatggtgaagaacgcctatgtgggacgcaccttcatccagccgtccgacaccctgcgtcagttgggcatccgcctgaagctgaacccactgcgcgaggtcatcgcaggaaaacgcctcgtggtggtcgatgattccattgtgcgtggcaacacccagcgcgcggtgatccgcatgctgcgtgaggccggggccgccgaggtccatgtgcgcatcgcctccccgccggtgaaatggccgtgtttctacggcattgacttcgccacccccggtgagctcatcgccaatgcggtcaccagtgacaacgaggaggagatggtggaggctgtccgctccgccatcggcgctgattcactcggttatgtctccatcgacgggatggtggcatccaccaccaagcccgtggaggaactgtgcctggcatgtttcaacgggcactatcccatgggattgcccgaggccaaccccaatgccgagctggtgttcaagatgcaggccggcaggcaggataagatcgggacctag

SEQ ID NO: 30278 - protein, 510 aa, Corynebacterium efficiens YS-314
MHVAQLDQHTSPGSVVNYPYDDHNEQSPQEECGVFGVWAPGEEVAKLTYFGLFALQHRGQEAAGIAVGDGEQILVFKDLGLVSQVFDEPILESLQGDIAIGHTRYTTAGGNSWENAQPMFRMAPDGTDVALGHNGNLINHVQLREKATELGLVDPQQKPSDTDVLTALLANGIGDGDDLFESARKLLPEVRGAYCLTFTDGHTLYAARDPYGIRPLSIGRLARGWVVASETSALDIVGASLVREVEPGELIAIDESGLRSTRFAETNRKACVFEYVYLARPDSVIKGRNVNEVRLEIGRTLAREAPAEGDLVIPTPDSGTPAAVGFAQASGIPFGQGMVKNAYVGRTFIQPSDTLRQLGIRLKLNPLREVIAGKRLVVVDDSIVRGNTQRAVIRMLREAGAAEVHVRIASPPVKWPCFYGIDFATPGELIANAVTSDNEEEMVEAVRSAIGADSLGYVSIDGMVASTTKPVEELCLACFNGHYPMGLPEANPNAELVFKMQAGRQDKIGT

SEQ ID NO: 30279 - DNA, 1506 bp, Pseudomonas putida KT2440
  CDS (1)..(1506): transl_table=11
atgtgtggcatcgtcggtatcgtcggtaagtcgaacgtcaatcaggcgctgtatgacgcgcttacggtcctccagcaccgcggccaggacgctgccggtatcgtgaccagccatgacggccggttgttcctgcgcaaggataatggcctggtgcgcgacgtgttccagcagcgccacatgcagcgcctggttggcaacatcggtatcggccacgtgcgctacccgactgcgggcagctcgacctcggccgaggcccagccgttctacgtcaactcgccttacggcatcaccctggctcacaacggcaacctgaccaatgtcgagcagttggccaaggagatctacgagtccgacctgcgccacgtcaacaccaactccgactcggaagtgctgctgaacgtgttcgcccatgagctggcagtgcgcggcaagctgcagccgaccgaagaagacgtgttcgctgcggtctcccatgtgcacagccgctgcgttggcggttacgccgtggtggccatgatcaccggctacggcatcgtcggtttccgcgacccccatggcattcgcccggtggtgttcggtcagcgtcacaccgacgaaggtgtggaatacatgatcgcctcggaaagcgtcgccctggacgtgctcggcttcaccctgatccgcgacctggcgccgggcgaagcggtgtacatcaccgaagaaggccagttgttcaccaagcagtgcgccgaatcgccaaagttgcagccgtgcatcttcgagcacgtctacctggcgcgtccggactcgatcatcgatggggtctcggtgtacaaggcgcgtctgcgcatgggtgaaaagctggccgacaagatcatgcgcgagcgccccgatcatgatatcgacgtggtcatcccgatcccggataccagtcgtactgccgcgctggaactggccaaccggttgggcgtcaagttccgcgaaggtttcgtcaagaaccgttacatcggccgtaccttcatcatgcccggccaggccgcgcgcaagaagtcggtgcgtcagaagctcaacgccatcgagctggagttccgcggcaagaatgtgatgctggtggacgactcgatcgtgcgcggcaccacctgcaagcagatcatccagatggcccgcgaagccggcgccaagaatgtctacttctgctccgcagcgcctgcagtacgctaccccaacgtctacggcatcgacatgccgagtgttcacgaactgatcgcccacaaccgcaccaccgaacaggtgggtgagttgattggcgccgattggctggtctatcaggacctgccagacctgatcgactcggtcggcggcggcaagatcaagatcgagcagttcgattgtgcggtgttcaacggcgagtacgtcactggcgatatcgacgaagcctacctcgaccgcatcgagcaggcccgtaacgacttggccaaggtcaagaaccaggccgtcagcgcgatcatcgacctttacaacaactga

SEQ ID NO: 30280 - protein, 501 aa, Pseudomonas putida KT2440
MCGIVGIVGKSNVNQALYDALTVLQHRGQDAAGIVTSHDGRLFLRKDNGLVRDVFQQRHMQRLVGNIGIGHVRYPTAGSSTSAEAQPFYVNSPYGITLAHNGNLTNVEQLAKEIYESDLRHVNTNSDSEVLLNVFAHELAVRGKLQPTEEDVFAAVSHVHSRCVGGYAVVAMITGYGIVGFRDPHGIRPVVFGQRHTDEGVEYMIASESVALDVLGFTLIRDLAPGEAVYITEEGQLFTKQCAESPKLQPCIFEHVYLARPDSIIDGVSVYKARLRMGEKLADKIMRERPDHDIDVVIPIPDTSRTAALELANRLGVKFREGFVKNRYIGRTFIMPGQAARKKSVRQKLNAIELEFRGKNVMLVDDSIVRGTTCKQIIQMAREAGAKNVYFCSAAPAVRYPNVYGIDMPSVHELIAHNRTTEQVGELIGADWLVYQDLPDLIDSVGGGKIKIEQFDCAVFNGEYVTGDIDEAYLDRIEQARNDLAKVKNQAVSAIIDLYNN

SEQ ID NO: 30281 - DNA, 1524 bp, Bradyrhizobium japonicum USDA 110
  CDS (1)..(1524): transl_table=11
atgcgacaccctgaccaggacgcccaacttgatctcgatccaaaagccggtttgagcccggccgcgctagagcttcaggacgatctggagggggatacgctccgcgaggaatgcggcgtattcggcatctacggccaccccgacgccgccgccatcaccgccctcggcctccacgcccttcagcaccgcggccaggaagccgccggcatcgtctcctatgacggcagccgctttcacagcgaacgccgcctcggcctcgtcggcgacactttctcccgccgcgaggtgatcgaccgcctgcccggcaacatggcggtcggccatgtccgctactccaccaccggcgcgaccatcctgcgcaacgtgcagccgctgttcgccgaactcaacgccggcggccttgcggtcgcccataacggcaacctcaccaacggcctgacgctgcgccgcgagctcgtgaggaacggcgcgatgatgcagtcgaccaccgacaccgaggtgatcctgcacctcgtcgcgcgctcccggcgcagccgcttcatcgagcgctatatcgacgcgctgcgcgagatcgagggcgcctatgcgctggtctcgctgaccaacaagaagctggtcggcgcgcgcgacccgcgcggcatccgccccctggtgctcggtgagctcgatggctgcccgatcctgacgtcggagacctgcgcgctcgacatcatcggcgcgcgcttcatccgcgacatcgagccgggcgaagtcatcgtgttcgacgagaacggccaggacatccacaagccgttcccgccgatggcgccgcgtccctgcatcttcgaatacatctatttctcccgtccggattccatcgtccacggccgctcggtctacgaggtgcgcaaggcctttggtgcgcagctcgcgcgcgagagccacgtgccgatcgacgtcgtcgtgccggtgccggattccggcgtgcccgccgctgtcggctacagccagcattccggcgtgccgttcgagctcggcatcatccgcaaccactatgtcggccgcaccttcatccagccgacgcaggcaatccgcgaatccggcgtgcgcatgaagcattcggccaaccgcgccgcgatcgaaggcaagcgcatcatcctgatcgacgactcgctggtgcgcggcaccacctcgaagaagatcgtgcgcatgatgcgcgatgcaggcgcgaaggaagtgcatttccgcctcgcctcgccgccgatcctctatcccgattattacggcatcgacctgccggaccgcggcggcctgctggccgcaacgcattcgctggaggaaatgcgggagatcattggcgccgactcgctcgccttcctgtcgatcgacggcatgtaccgcgccatgggcgagcccggccgcgacccggccaatccgaagttctcggatcactgcttcaccggggcgtatccgacccacctcaccgaccagacccagaccgagcagcagccccggcaattgtcgctgctggcggaggcgagctga

SEQ ID NO: 30282 - protein, 507 aa, Bradyrhizobium japonicum USDA 110
MRHPDQDAQLDLDPKAGLSPAALELQDDLEGDTLREECGVFGIYGHPDAAAITALGLHALQHRGQEAAGIVSYDGSRFHSERRLGLVGDTFSRREVIDRLPGNMAVGHVRYSTTGATILRNVQPLFAELNAGGLAVAHNGNLTNGLTLRRELVRNGAMMQSTTDTEVILHLVARSRRSRFIERYIDALREIEGAYALVSLTNKKLVGARDPRGIRPLVLGELDGCPILTSETCALDIIGARFIRDIEPGEVIVFDENGQDIHKPFPPMAPRPCIFEYIYFSRPDSIVHGRSVYEVRKAFGAQLARESHVPIDVVVPVPDSGVPAAVGYSQHSGVPFELGIIRNHYVGRTFIQPTQAIRESGVRMKHSANRAAIEGKRIILIDDSLVRGTTSKKIVRMMRDAGAKEVHFRLASPPILYPDYYGIDLPDRGGLLAATHSLEEMREIIGADSLAFLSIDGMYRAMGEPGRDPANPKFSDHCFTGAYPTHLTDQTQTEQQPRQLSLLAEAS

SEQ ID NO: 30283 - DNA, 1458 bp, Xylella fastidiosa Temecula1
  CDS (1)..(1458): transl_table=11
atgtgcggtatcctcggtatcgttggcaatcaaaacgttgctggccaactctatgacggtttgactgttttgcaacatcgtggacaagatgctgcaggcattgccacggccagtggcactcgcttgcgcgttcaaaaggccaatggtttggtacgagacgtattcgatgagcagcgtatggcggtccttgatgggtgtattgggattgctcattgccgttatccaactgctggttctgaggggatggatgaggcacaacctttttacgtcaactcaccgtacggcattgctctagcacataatggaaaccttatcaacacagaggcgctacaccaacaggtgttcgaagcggatcgacgtaacatcaacaccgactctgacagcgaagtattacttaacgtattcgcatatgagttagatgcgcagcgtatgctcactccagaagcggcaattcgtgctgtagcaggagtacatcgccgctgtaagggcggctacgccgtagtgagcatgatattagggctgggacttgttgcattccgcgatccacacggtatccgtccgttggtgctgggaaagcgtgtacataccgaaggtgatgaatatatggtcgcttccgaatcagctgcactcgatatcctagggtttatacgtatacgcgatgtacgtccaggtgaggctgtggtgattactgcacgtggcgaactgttttcagaggtctgtgctacacctaccaaccatactccatgcattttcgagtacgtttacttcgcacgtccggattcgatgatcgataatatttcagtacataaggcacgcatgcgtatgggtgtgaagttaggtgaaaagatcctgcgcttgcgcccgaatcacgatatcgacaccattattccgataccggatacctcgcgggatgcagcgctggaaatatctaacgtgctcggcgtaaagtatcgcgaaggtttcgttaaaaatcgctacgttggccgtacttttatcatgccgggacagggagagcgagttaagtcagtacgtcgtaaacttaacccaatccatctggagttccgaaaccgcgtggtgctgttgattgatgattcaattgttcgcggtaccaccagccgccagattgtccagatggtaagagatgctggtgcacgcaaggtgtacttagcaagtgctgcgccacctgtgcgttatccaaatgtgtatggcattgatatgccagctgcagatgaattaatcgcacatgatcggactgagcaggaaatacaatcccttcttggctgcgattggttgatttaccaagatttagaggatctagaaaacgctgtgcgtgagggaaaccaagaaatcaagcaatttgattcctcatgcttcaatggtcattacatcactggaattgaacggggctatttagatcgcatccgtcaactacgctccgatgaggtaaagcgaaaataa

SEQ ID NO: 30284 - protein, 485 aa, Xylella fastidiosa Temecula1
MCGILGIVGNQNVAGQLYDGLTVLQHRGQDAAGIATASGTRLRVQKANGLVRDVFDEQRMAVLDGCIGIAHCRYPTAGSEGMDEAQPFYVNSPYGIALAHNGNLINTEALHQQVFEADRRNINTDSDSEVLLNVFAYELDAQRMLTPEAAIRAVAGVHRRCKGGYAVVSMILGLGLVAFRDPHGIRPLVLGKRVHTEGDEYMVASESAALDILGFIRIRDVRPGEAVVITARGELFSEVCATPTNHTPCIFEYVYFARPDSMIDNISVHKARMRMGVKLGEKILRLRPNHDIDTIIPIPDTSRDAALEISNVLGVKYREGFVKNRYVGRTFIMPGQGERVKSVRRKLNPIHLEFRNRVVLLIDDSIVRGTTSRQIVQMVRDAGARKVYLASAAPPVRYPNVYGIDMPAADELIAHDRTEQEIQSLLGCDWLIYQDLEDLENAVREGNQEIKQFDSSCFNGHYITGIERGYLDRIRQLRSDEVKRK

SEQ ID NO: 30285 - DNA, 1398 bp, Clostridium tetani E88
  CDS (1)..(1398): transl_table=11
atggaatggaacaatttaaaagaagataaatttaaagatgaatgtggagtttttggaatatttactggcgaagaaagagaaataggagtaataaattattatggactctttgcattacaacataggggacaagatagtgcaggaatggtagtatcaaatggagaaaaatttatatttcataaagatataggtcttgttgaagatgtgtttagttatgataaattaaataagtttaaggggatatgtggaataggtcatgttaaatattccagttgtaaaaatggagatttagataacgtacagcctgtacttggcaaggctaagctaggatcaattgctatagctcataatgggagtttagtaaatgcaaaaatagtaaaagaattattagaagaggcaggaattgtttttcaaactaatgtagaatcagaagtagtattaaatttaatagctaggtcaaataaaaaagaattagaagatgctttaatagaagctttacaaagtataaaaggatcttatgcaatgcttttaatgacacaggataaattaattggattaagagatcctaaaggtataagacctctttgcataggaaaacttgatgataattatgttatttcatctgaaagctgtgctataaatgctataggtggagagtttataagggatgtagaaccaggagaaatggtaattgtagataaaggtggattaaaaagcttaagatttgcagagaaaacaaagggaagcatatgtgcttttgaatatatatattttgcaagaccagatagctctattgataatataagtgtttatgaatatagggttaaatctggagaagaactttacaaagaatgccctgttgatgcagatattgtagtgggagttccagactcaggaatacctgctgccataggatattcaaaagcttcaggcattccctatggcatagggtttgtaaaaaataaatatataggaagaagttttatagaacctactcaagaaatgagagaaagagcggttttagtgaaattaaacccgttaaaatataatgttgagggaaaaagagttgtaattatagacgattctatagtaaggggaactactagtaaaaaacttataagttctataagacgagctggagcaaaggaagttcattttatgtcagcatcaccaatggttaagtttccttgttatttaggtattgatactcctaataaagaagatttaatggcatctaattataacatagatgaaataaaggaaatgataggagcggacagtgtaggctatttaagtattgaaggactcacaagagctttaggatgtgaaaattgtaaaaaagaattttgcttaggatgttttagtggagaatatccagtatctatacctaaagaatga

SEQ ID NO: 30286 - protein, 465 aa, Clostridium tetani E88
MEWNNLKEDKFKDECGVFGIFTGEEREIGVINYYGLFALQHRGQDSAGMVVSNGEKFIFHKDIGLVEDVFSYDKLNKFKGICGIGHVKYSSCKNGDLDNVQPVLGKAKLGSIAIAHNGSLVNAKIVKELLEEAGIVFQTNVESEVVLNLIARSNKKELEDALIEALQSIKGSYAMLLMTQDKLIGLRDPKGIRPLCIGKLDDNYVISSESCAINAIGGEFIRDVEPGEMVIVDKGGLKSLRFAEKTKGSICAFEYIYFARPDSSIDNISVYEYRVKSGEELYKECPVDADIVVGVPDSGIPAAIGYSKASGIPYGIGFVKNKYIGRSFIEPTQEMRERAVLVKLNPLKYNVEGKRVVIIDDSIVRGTTSKKLISSIRRAGAKEVHFMSASPMVKFPCYLGIDTPNKEDLMASNYNIDEIKEMIGADSVGYLSIEGLTRALGCENCKKEFCLGCFSGEYPVSIPKE

SEQ ID NO: 30287 - DNA, 1455 bp, Lactobacillus plantarum WCFS1
  CDS (1)..(1455): transl_table=11
atgcctactgaagtaagaagtctgaatgaagaatgtggcgtctttggggtttggggctcgccggacgccgcccaattaacgtactttgggctccatgcgttacaacaccgggggcaagaaggagccggtatcacggcgaatgatcacggcaaactgcagacggaacgcggactagggttgttggctgatgtctttcgggacccacggcggttggcacgtttgacgggtcaagctgcagtcggccatgtacgttatgccacggctggtaatcatggattggaaaacattcaacccttgagttttaattttagcgactcacagtttgcactcgcacataacggcaatttgacgaatgcggtgacactgcggcgacggttggaacagcatggtgccatttttcatgctagttctgatagtgagattttaatgcatctgattcgacgcagccccgcagcaacgttaacggaacaggttaaggatgctttacgtcaagtccacggaggctttgcttacttactactaacgaatgattgtttgattgccgctttggatcctaacgggttacgaccattagtcgtcggtcagttacccacgggcgggtacgtcgtttgtagtgaaacttgcgcgcttgatacgattggtgcgacgtttgttcaagatgttcagccgggagaattgttaacgatcgatgatcatggcttgacgatcgaccattatacgactgatacacagttggcgatttgttcaatggagtttatctactttgcacgtccagattctgatattcacggcgtcaacgtccattctgcacgtaaacgaatgggtgctcagctcgctgttgaacagcccgtggacgccgacattgttgtcggggtacccaattcatctttatcagcggcgaccggctatgcggaagcgagtggcctgccttacgagatgggattaattaaaaatcaatattcgtcacggacctttattcagccgacccaagcattgcgagaacagggggttcggatgaagctttcagcggtcaaaggtgttgtcgctggtaaacgagtcgtcttaatcgatgattcgattgtacgtggtaccaccagtcggcggatcgtcaaattattgaaagatgcgggtgcaaagtcagttcatttacgaattgcatcgccaccattacgctatccatgtttttacggtatcgatattcaatcgactaatgaattgattgcggctcagcaaacgattcgggagatgtgtcagacgtttggtgcggactcacttggttttctcagtgaacagggcgtcgttgatgcagttggcttgtcgaccaccgaaccgtatggtggactatgcatggcctattttaatggggattatccaacggccctgtatgattaccaagccgagtatgatgcggaaattgcgcaattacaagccaatcatgaaggggtgatcaagtga

SEQ ID NO: 30288 - protein, 484 aa, Lactobacillus plantarum WCFS1
MPTEVRSLNEECGVFGVWGSPDAAQLTYFGLHALQHRGQEGAGITANDHGKLQTERGLGLLADVFRDPRRLARLTGQAAVGHVRYATAGNHGLENIQPLSFNFSDSQFALAHNGNLTNAVTLRRRLEQHGAIFHASSDSEILMHLIRRSPAATLTEQVKDALRQVHGGFAYLLLTNDCLIAALDPNGLRPLVVGQLPTGGYVVCSETCALDTIGATFVQDVQPGELLTIDDHGLTIDHYTTDTQLAICSMEFIYFARPDSDIHGVNVHSARKRMGAQLAVEQPVDADIVVGVPNSSLSAATGYAEASGLPYEMGLIKNQYSSRTFIQPTQALREQGVRMKLSAVKGVVAGKRVVLIDDSIVRGTTSRRIVKLLKDAGAKSVHLRIASPPLRYPCFYGIDIQSTNELIAAQQTIREMCQTFGADSLGFLSEQGVVDAVGLSTTEPYGGLCMAYFNGDYPTALYDYQAEYDAEIAQLQANHEGVIK

SEQ ID NO: 30289 - DNA, 1515 bp, Tropheryma whipplei str. Twist
  CDS (1)..(1515): transl_table=11
gtgaatttggaacactattcgcgggacagtgtcctgcgaggtgatggcgcaaaaatgtgtggcatagtcgggctaatcggttcagagccagccaatcaggctatatacgacagcctcttgcttttgcagcatcgcggccaggactcaaccggaatagcgaccgatgaatcaggaatattgcacctcaggaaagcaagaggttatgttcgtgaagctttccgcaccaggcatatgcgatccttgcttggccgggttggccttgggcatgtcaggtacgctactcagggaagtgtatcaagcgaagaagaggcacagccattctatgtaaatgctccgtatggtattgcaatggtgcacaatggcaatctaacaaatgcaagcaagctcagtaaagagctgttccatacagatcgcagacaccttaacacgtcgagcgacacagaggttttaataaatgtttttgccaacgaactgcaacagagtgtctcaggttttgaattgtcaccagatcaaatttttagtgccgtttcgcgcgtgcataaacgagtcgaggggtcgtatgcggttgttgcgctaatagctggcaccggaattttggctttcagagatccgttcggaataagacctttggtattgggagcccgcgaaagcaaatttacttccaataccgagtggataatagcgagtgaatcagttgtccttgaggcgcaaggatataaactgctaagagattttgctccgggtgaggctgtatttataacgcaacagggcgagatttttatgacccaatgcgcccaaaatccacaactaaatccctgcgccttcgaatatgtttatctagcgagacccgattccgttatgaatggcgtatcggtttatgaggcacgcttgcgccttggtgacactttatctacaactatcaaacaacagatgccttgcgggaacattgatgttgttatgcccatcccagattcatcgcgcccagcggcgttacaggtctcaagaaatcttggcatagagtatcgggaagggtttttaaagaaccgatacgttggccgaactttcataatgccaggacaactccagcgcaagaaaagcgttaggcagaagctgaatgccatgggtctcgaattccgcggtaaaaatgtcctgattgttgacgattcaattgtgcgtggtacaacctcaaaggagattattcacatggctcgcagtgctggggcaaatcaggtattctttacttctgccgcgccgcctgttcgataccaaaatgtttttggaatcaacatgccaacaagctctgagcttgttgcgcacaaccggcaactacaagaaattcgtcaatacatagacgccgaccgcctcatataccaaagtattgaagatatgcgacgcgcgatcatgcatggtggtgagttcaagcgacttgaggattcgtgcttttcaggcgaatacgtgacagggcgagttacccaggagtacctggactgggttgaaaacacgcagtccagctaa

SEQ ID NO: 30290 - protein, 504 aa, Tropheryma whipplei str. Twist
MNLEHYSRDSVLRGDGAKMCGIVGLIGSEPANQAIYDSLLLLQHRGQDSTGIATDESGILHLRKARGYVREAFRTRHMRSLLGRVGLGHVRYATQGSVSSEEEAQPFYVNAPYGIAMVHNGNLTNASKLSKELFHTDRRHLNTSSDTEVLINVFANELQQSVSGFELSPDQIFSAVSRVHKRVEGSYAVVALIAGTGILAFRDPFGIRPLVLGARESKFTSNTEWIIASESVVLEAQGYKLLRDFAPGEAVFITQQGEIFMTQCAQNPQLNPCAFEYVYLARPDSVMNGVSVYEARLRLGDTLSTTIKQQMPCGNIDVVMPIPDSSRPAALQVSRNLGIEYREGFLKNRYVGRTFIMPGQLQRKKSVRQKLNAMGLEFRGKNVLIVDDSIVRGTTSKEIIHMARSAGANQVFFTSAAPPVRYQNVFGINMPTSSELVAHNRQLQEIRQYIDADRLIYQSIEDMRRAIMHGGEFKRLEDSCFSGEYVTGRVTQEYLDWVENTQSS

SEQ ID NO: 30291 - DNA, 1461 bp, Tropheryma whipplei TW08/27
  CDS (1)..(1461): transl_table=11
atgtgtggcatagtcgggctaatcggttcagagccagccaatcaggctatatacgacagcctcttgcttttgcagcatcgcggccaggactcaaccggaatagcgaccgatgaatcaggaatattgcacctcaggaaagcaagaggttatgttcgtgaagctttccgcaccaggcatatgcgatccttgcttggccgggttggccttgggcatgtcaggtacgctactcagggaagtgtatcaagcgaagaagaggcacagccattctatgtaaatgctccgtatggtattgcaatggtgcacaatggcaatctaacaaatgcaagaaagctcagtaaagagctgttccatacagatcgcagacaccttaacacgtcgagcgacacagaggttttaataaatgtttttgccaacgaactgcaacagagtgtctcaggttttgaattgtcaccagatcaaatttttagtgccgtttcgcgcgtgcataaacgagtcgaggggtcgtatgcggttgttgcgctaatagctggcaccggaattttggctttcagagatccgttcggaataagacctttggtattgggagcccgcgaaagcaaatttacttccaataccgagtggataatagcgagtgaatcagttgtccttgaggcgcaaggatataaactgctaagagattttgctccgggtgaggctgtatttataacgcaacagggcgagatttttatgacccaatgcgcccaaaatccacaactaaatccctgcgccttcgaatatgtttatctagcgagacccgattccgttatgaatggcgtatcggtttatgaggcacgcttgcgccttggtgacactttatctacaactatcaaacaacagatgccttgcgggaacattgatgttgttatgcccatcccagattcatcgcgcccagcggcgttacaggtctcaagaaatcttggcatagagtatcgggaagggtttttaaagaaccgatacgttggccgaactttcataatgccaggacaactccagcgcaagaaaagcgttaggcagaagctgaatgccatgggtctcgaattccgcggtaaaaatgtcctgattgttgacgattcaattgtgcgtggtacaacctcaaaggagattattcacatggctcgcagtgctggggcaaatcaggtattctttacttctgccgcgccgcctgttcgataccaaaatgtttttggaatcaacatgccaacaagctctgagcttgttgcgcacaaccggcaactacaagaaattcgtcaatacatagacgccgaccgcctcatataccaaagtattgaagatatgcgacgcgcgatcatgcatggtggtgagttcaagcgacttgaggattcgtgcttttcaggcgaatacgtgacagggcgagttacccaggagtacctggactgggttgaaaacacgcagtccagctaa

SEQ ID NO: 30292 - protein, 486 aa, Tropheryma whipplei TW08/27
MCGIVGLIGSEPANQAIYDSLLLLQHRGQDSTGIATDESGILHLRKARGYVREAFRTRHMRSLLGRVGLGHVRYATQGSVSSEEEAQPFYVNAPYGIAMVHNGNLTNARKLSKELFHTDRRHLNTSSDTEVLINVFANELQQSVSGFELSPDQIFSAVSRVHKRVEGSYAVVALIAGTGILAFRDPFGIRPLVLGARESKFTSNTEWIIASESVVLEAQGYKLLRDFAPGEAVFITQQGEIFMTQCAQNPQLNPCAFEYVYLARPDSVMNGVSVYEARLRLGDTLSTTIKQQMPCGNIDVVMPIPDSSRPAALQVSRNLGIEYREGFLKNRYVGRTFIMPGQLQRKKSVRQKLNAMGLEFRGKNVLIVDDSIVRGTTSKEIIHMARSAGANQVFFTSAAPPVRYQNVFGINMPTSSELVAHNRQLQEIRQYIDADRLIYQSIEDMRRAIMHGGEFKRLEDSCFSGEYVTGRVTQEYLDWVENTQSS

SEQ ID NO: 30293 - DNA, 1509 bp, Pseudomonas syringae pv. tomato str. DC3000
  CDS (1)..(1509): transl_table=11
atgtgtggcatcgtcggtatcgtcggcaagtcgaacgtcaatcaggcgctgtatgacgcgcttaccgtcctccagcaccgcggccaggacgctgccggtatcgtaaccagccacgatggccggttattcctgcgcaaggacaacggattggtgcgtgatgtgtttcatcagcgccatatgcagcgcctggtcgggcatatgggcatcggtcatgtgcgttatccaacggcgggcagttcgacttcggccgaagcccagccgttctacgtcaactcgccttacggcatcacgttggcgcataacggcaacctcaccaacgttgagcaactggccaaggagatttacgaatccgacctgcgccatgtgaacaccaattccgattcggaagtgctgctcaacgtttttgcccatgaactggccgtgcgcggcaagttgcagccgaccgaagaagatatcttcgcggccgtgaccgacgtgcaccatcgctgccgtggcggctatgcggtcgtggcaatgatcaccggctacggcatcgtcggtttccgtgacccggatgccattcgtcctatcgtgttcggccagcgtcatactgacgaaggtgtcgagtacatgatcgcgtcggaaagcgtctcgctggacgtgctgggcttcaccctgattcgcgacctggcaccgggcgaagcggtctacatcaccgaagacggcaagctgcacacccgtcagtgtgcggccaaccccaagtatgcgccgtgcatcttcgagcacgtctatctggcacgtccggactcgatcatcgatggcatctcggtctacaaggcgcgtctgcgcatgggcgagaagctggctgacaagatcttgcgcgagcgcccggatcacgacatcgatgtggtcatccccattccagacaccagccgtaccgctgcgctggaactggccaaccacctgggcgtcaagtttcgcgaaggtttcgtcaagaaccgctacatcggccggaccttcatcatgccgggtcaggcagcgcgcaaaaagtctgttcgccagaagctcaacgcaatcgagctggaatttcgcggcaagaatgtgatgctggtggatgactccattgtgcgtggcacgacctgcaagcagatcatccagatggcccgcgaagccggtgccaagaatgtctacttctgttcggctgccccggcagtgcgttaccccaacgtctacggcatcgacatgccgagtgctcacgagctgatcgctcacaaccgttccacccaggacgtggccgacctcatcggtgccgactggctggtctatcaggatctgaatgacctgatcgaagcggtcagtggcagcaagaagatcaagatcgacaacttcgactgctcggttttcgacggcaagtacgtgaccggtgacatcgacgagcactacctgaacaggatcgagagcgcgcgcaacgacgcctccaagatcaagacccaggcagtgagtgcgatcatcgatctgtacaacaactaa

SEQ ID NO: 30294 - protein, 502 aa, Pseudomonas syringae pv. tomato str. DC3000
MCGIVGIVGKSNVNQALYDALTVLQHRGQDAAGIVTSHDGRLFLRKDNGLVRDVFHQRHMQRLVGHMGIGHVRYPTAGSSTSAEAQPFYVNSPYGITLAHNGNLTNVEQLAKEIYESDLRHVNTNSDSEVLLNVFAHELAVRGKLQPTEEDIFAAVTDVHHRCRGGYAVVAMITGYGIVGFRDPDAIRPIVFGQRHTDEGVEYMIASESVSLDVLGFTLIRDLAPGEAVYITEDGKLHTRQCAANPKYAPCIFEHVYLARPDSIIDGISVYKARLRMGEKLADKILRERPDHDIDVVIPIPDTSRTAALELANHLGVKFREGFVKNRYIGRTFIMPGQAARKKSVRQKLNAIELEFRGKNVMLVDDSIVRGTTCKQIIQMAREAGAKNVYFCSAAPAVRYPNVYGIDMPSAHELIAHNRSTQDVADLIGADWLVYQDLNDLIEAVSGSKKIKIDNFDCSVFDGKYVTGDIDEHYLNRIESARNDASKIKTQAVSAIIDLYNN

SEQ ID NO: 30295 - DNA, 1410 bp, Bacteroides thetaiotaomicron VPI-5482
  CDS (1)..(1410): transl_table=11
atgggaggttttttcggaacagtctcgaaatcgagttgcgtgactgatttattctatggtacagattataactcacatctgggtacaaagcggggcggactcgcgacttatagtcaggagaaaggatttattcgctccattcacaatctggaaagtacatatttccgatccaagtttgaaggagagcttgataaatttaaaggcaatgccggcataggcattatcagcgacacagatgcacaacccattatcatcaattcccacctcggccgcttcgccatcgtcacagtcgctaaaatatcgaatatccaggaactggaagaagaccttctcaaccaaaatatgcacttcgccgaacttagttcgagcaacaccaatcaaacggaactcatcgcactgcttatcatacaaggaagaaccttcaccgaaggtatcgagaacgtattcaaacatatcaagggttcttgttctctgctgattctgacagaggatggcagtattatcgcggctcgtgaccaatggggacgtactccggtggtgatcggcaagaaagatggtgcgtatgccgctaccagcgagtcatccagtttcccgaatctggattatgaaatcgaaaagtatctgggaccgggggaaatagtacgcatgtatcccgatcatatcgagcagcttcgccaaccgaatgaaggaatgcagatttgttctttcctttgggtgtattatggtttcccgacctcttgttatgagggcaaaaatgtagaggaagtccgtttcaccagtggaatgaagatgggacagaaggacgaatcggaagtggattgtgcctgtggtatccctgattcgggagtaggtatggcgttgggttatgcggaaggtaaaggagttccttatcatcgtgccatttcaaaatatacaccgacatggcctcgtagcttcacacccagcaatcaggaaatgcgttcgctggttgcaaagatgaagctaattccgaatcgtgccatgcttcagggaaagcgtctgctgttttgtgatgattcgattgtgcgtggaacacagttgcgtgataatgtgaagattctatatgattatggagcgaaagaggtacatatgcgtatcgcttgccctccgttgatctatgcctgtccgtttgtgggtttctcggcttctaagaatgctttggagttgattacccgtcgtattattaaagaactggaaggcgatgagaataagaatctggagaaatacgccactacggggtctcccgaatacgagaaaatggttagtatcatagccgagcgtttcggactgacttcattgaaattcaacacgcttgagactttgattgaagctatcgggctgccgaaatgtaaagtgtgtacgcattgttttgatggtagcagtcacttttaa

SEQ ID NO: 30296 - protein, 469 aa, Bacteroides thetaiotaomicron VPI-5482
MGGFFGTVSKSSCVTDLFYGTDYNSHLGTKRGGLATYSQEKGFIRSIHNLESTYFRSKFEGELDKFKGNAGIGIISDTDAQPIIINSHLGRFAIVTVAKISNIQELEEDLLNQNMHFAELSSSNTNQTELIALLIIQGRTFTEGIENVFKHIKGSCSLLILTEDGSIIAARDQWGRTPVVIGKKDGAYAATSESSSFPNLDYEIEKYLGPGEIVRMYPDHIEQLRQPNEGMQICSFLWVYYGFPTSCYEGKNVEEVRFTSGMKMGQKDESEVDCACGIPDSGVGMALGYAEGKGVPYHRAISKYTPTWPRSFTPSNQEMRSLVAKMKLIPNRAMLQGKRLLFCDDSIVRGTQLRDNVKILYDYGAKEVHMRIACPPLIYACPFVGFSASKNALELITRRIIKELEGDENKNLEKYATTGSPEYEKMVSIIAERFGLTSLKFNTLETLIEAIGLPKCKVCTHCFDGSSHF

SEQ ID NO: 30297 - DNA, 1440 bp, Enterococcus faecalis V583
  CDS (1)..(1440): transl_table=11
atgtcttatgaagcaaaaagcttaaatgaagagtgtggtattttcggtatttggggtcatcctgatgcggcacaagtgacctattttggcttacacagcttgcagcatcgaggccaagaaggcgcgggaattgtggcgaacaattctgggaaattagatggccaccgtgatttaggtttattagcagaagtattccaaaagcaagaacaactgaatgcgttagaaggaacggcggctattggtcatgtacgctatgcaaccgctggtacgggtagcgtggataatattcagccatttttatttaaattttatgatagtcaaattgggttagcacacaatggcaatttgacaaatgccaaacgtttacgaaaacaactagaaagagaaggcgctatttttcattccaattcagacactgaaattttaatgcacttgattcgaaaaagcactgctgcctcgtttctcgataaattaaaagagagcttgaatttggttaagggtggctttgcttatcttttattaacagaaacgatgatgattgctgcactggatcccaacggctttcgccctctctccatcggacaaatgaacaatggggcgtacgttgtggcatccgaaacgtgtgcattagaaacagttggggctcgctttattcaagatgtggcgcctggtgaagtagtcatcatttctgatgaaggcttgaaaatagaggttttcactacggaagtccaaccggcaatttgtgcaatggaatatatttattttgcacgaccagattcaaatattgccggagttaatgtgcatacagctcgtaaaagaatggggaagaacttggcaatcgaaagtccagtcgcagctgatatggtaattggtgtaccgaactcgtcattgtctgcagctagcggctatgcagaagaagcacagataccttacgaactaggtttagtaaaaaatcaatatgtcgctcgaacattcatccagccgacacaagaattaagagaacaaggtgtccgtatgaaactatcggcagttcgtggcgtggtcaaaggaaaaaaagtcattttagtagatgattcgattgttcgcgggaccactattcggcgcattattcatttattaaaagaagcagaagcgcaagaagttcatgtcagaattgcttcaccaccattaaaatatccgtgtttttatggcattgatatacagacgcgggacgaactaattgcggcaaactattcaattgaagaaatcaaagagcagattggcgcagattcgctggcttttttgagtgaagcagggctgattgatgggattcaattaaattatgatgctccttattctgggctgtgtatggcttactttaatggagactatccaacgcctttgtatgattatgaagaacaatatcaagcatccttgaaaaaagaaactaggaggaattga

SEQ ID NO: 30298 - protein, 479 aa, Enterococcus faecalis V583
MSYEAKSLNEECGIFGIWGHPDAAQVTYFGLHSLQHRGQEGAGIVANNSGKLDGHRDLGLLAEVFQKQEQLNALEGTAAIGHVRYATAGTGSVDNIQPFLFKFYDSQIGLAHNGNLTNAKRLRKQLEREGAIFHSNSDTEILMHLIRKSTAASFLDKLKESLNLVKGGFAYLLLTETMMIAALDPNGFRPLSIGQMNNGAYVVASETCALETVGARFIQDVAPGEVVIISDEGLKIEVFTTEVQPAICAMEYIYFARPDSNIAGVNVHTARKRMGKNLAIESPVAADMVIGVPNSSLSAASGYAEEAQIPYELGLVKNQYVARTFIQPTQELREQGVRMKLSAVRGVVKGKKVILVDDSIVRGTTIRRIIHLLKEAEAQEVHVRIASPPLKYPCFYGIDIQTRDELIAANYSIEEIKEQIGADSLAFLSEAGLIDGIQLNYDAPYSGLCMAYFNGDYPTPLYDYEEQYQASLKKETRRN

SEQ ID NO: 30299 - DNA, 1521 bp, Coxiella burnetii RSA 493
  CDS (1)..(1521): transl_table=11
atgtgcggaatcgtcggtattattgccaatggcatcgttaatcaggccctttacgacgccttaaccatattgcaacaccgcggacaagatgcggctgggattatgacaagcgatggtgagcgtgtttttttgcgaaaatcgaatgggttagttcgcgatgcgattcgcgagccacacatgctgcatttagtgggtaatatgggcattggccatgttcgttatcccacggcgggatcagaaagtcctgcagaatcgcaaccgttttatgtcaattcgccttacggtttgagtctggtgcacaatggtaatttagttaatgttaaagaattaactaacgatttgattcgtagcgacttgcgccatttaaacaccacttctgattcggaaattttattgaatgtcgttgcacatgaattacagcattatggtggcgttcaactctcgcctaagcaattgtttaaagccatgacaaaagtgtatgaaagggtggaaggcgcgtttgcggctgtaatgattattacgggttatggtgttatcggatttcgcgaccctcacgctatccgtcctttagtttatgggcgccgcgataacggtaacgggccggaatatatgttggcttcggaaagcattgctttagatgcactgggttttgaactcattgacgatgtgggtcccggagaagttatttatttcgatcgtgaggggagcgttcatcgagaacgatgtgccaaacaagtgagccattctccttgcatttttgaatatatttatttagcgcgtcctgattctattattgatggtgtcccggtttaccaagcacgttctggtatgggtgaaagtctagcgcaaaaaatattacgggagcgtcccgaccacggtatcgatgtcgtgattcctatccccgacacgagtcggaacgcggcgcaggcattggcgcgcgccttagatgttccttattcagaaggttttgtaaaaaaccgttacatcggacggacatttattatgccggggcaagcgaagcggcgaagttctgttcggttaaaattaaatgccattaaagctgaatttgccaataaaaccgttttattagtggatgattccattgtgcgaggcaccacttctaaagaaattatccaaatggcgcgcgacgtgggcgctaaaaaggtgtatttcgcttctgcggctcctgaagtgcgctaccccaatgtctatggaattgatatgcctaccgctgatgaattaattgctcacaataaatcgactgaagaggtgatgcactcaattggcgctgattggctagtctatcaaaatttggaagatgtctatcaagcgataaacgacgctatgggctcgcgtaagccaaaaattgaacgatttgaagattctgtttttaccggagattatattgctggtaatattacaaaagaatatttggccgagttggccgaatcccgtaacgatgccgctaaaatgaaaaagcgggcattaaacgaacaggaagaggcgaacggattgttatga

SEQ ID NO: 30300 - protein, 506 aa, Coxiella burnetii RSA 493
MCGIVGIIANGIVNQALYDALTILQHRGQDAAGIMTSDGERVFLRKSNGLVRDAIREPHMLHLVGNMGIGHVRYPTAGSESPAESQPFYVNSPYGLSLVHNGNLVNVKELTNDLIRSDLRHLNTTSDSEILLNVVAHELQHYGGVQLSPKQLFKAMTKVYERVEGAFAAVMIITGYGVIGFRDPHAIRPLVYGRRDNGNGPEYMLASESIALDALGFELIDDVGPGEVIYFDREGSVHRERCAKQVSHSPCIFEYIYLARPDSIIDGVPVYQARSGMGESLAQKILRERPDHGIDVVIPIPDTSRNAAQALARALDVPYSEGFVKNRYIGRTFIMPGQAKRRSSVRLKLNAIKAEFANKTVLLVDDSIVRGTTSKEIIQMARDVGAKKVYFASAAPEVRYPNVYGIDMPTADELIAHNKSTEEVMHSIGADWLVYQNLEDVYQAINDAMGSRKPKIERFEDSVFTGDYIAGNITKEYLAELAESRNDAAKMKKRALNEQEEANGLL

SEQ ID NO: 30301 - DNA, 1581 bp, Streptomyces avermitilis MA-4680
  CDS (1)..(1581): transl_table=11
ttgcagaacgcaccggattcggaacggtgcacgatctcgcctacactcggtggcgtgccacgtggtgacggtcgactcaatcatgatctgctccccggtgagaaaggcccccaggacgcttgtggcgtcttcggtgtctgggctccgggcgaagaggtcgccaagctcacttacttcgggctctacgccctccagcatcggggccaggaatccgcgggtatcgcggtcagcaatggctcccagatcctcgtcttcaaggacatgggtctcgtgtcccaggtcttcgacgagacctctctcggttcgctccagggtcatatcgcggtcggtcacgcccgctactcgaccaccggtgcctccgtctgggagaacgcccagccgacgttccgcgccaccgcgcacggttcgatcgcgctcgggcacaacggcaacctggtcaacacggcgcagctcgccgagatggtcgccgacctccccaaggagaacgggcgctccccgaaggtcgcggccaccaacgacacggacctcgtcaccgcgctcctcgcgggccagcgggacgacgagggccagccgctgaccatcgaggaggcggccgccaaggtcctcccgcaggtccagggcgccttcagcctcgtcttcatgaacgagcacaccctctacgcggcccgcgacccgcagggcatccgcccgttggtcctcggccgcctcgagcgcggctgggtcatcgcctcggagtccgccgccctcgacatctgcggcgccagctacgtccgcgagatcgagccgggcgagttcgtcgccatcgacgagaacggccttcgcagctcccgattcgcggaagcgaagcccaagggctgtgtcttcgagtacgtgtacctggcccgtcccgacacggacatcgccggccgcaacgtgtacctcagccgggtcgagatgggccgtcgcctcgccaaggaggcgcccgccgaggccgacctggtgatagcgacgccggagtccggcacccccgccgcgatcggttacgcggaggcctccggcattccgttcggcgccggcctggtgaagaacgcgtatgtcggccggaccttcatccagccctcgcagacgatccgccagctcggcatccgcctcaagctgaacccgctcaaggaagtcatcaagggcaagcgcctggtcgtcgtcgacgactcgatcgtgcgcggcaacacccagcgcgcgctggtgcggatgctccgcgaagcgggtgcggcggaagtccacatccggatttcctcgccccccgtgaagtggccctgcttcttcggcatcgacttcgccacccgtgccgagctgatcgccaacggcatgacgatcgaggagatcggtacctcgctgggcgccgactccctctcgtacatctccatcgacggcatgatcgaggcgaccacgatcgccaagcccaacctctgccgggcctgcttcgacggcgagtacccgatggatctccccgaccccgaactgctgggcaagcagcttctggagaccgagctggcggcgggtcccgccgccacggccgcggccgacgcgatccgtcgcccctga

SEQ ID NO: 30302 - protein, 526 aa, Streptomyces avermitilis MA-4680
MQNAPDSERCTISPTLGGVPRGDGRLNHDLLPGEKGPQDACGVFGVWAPGEEVAKLTYFGLYALQHRGQESAGIAVSNGSQILVFKDMGLVSQVFDETSLGSLQGHIAVGHARYSTTGASVWENAQPTFRATAHGSIALGHNGNLVNTAQLAEMVADLPKENGRSPKVAATNDTDLVTALLAGQRDDEGQPLTIEEAAAKVLPQVQGAFSLVFMNEHTLYAARDPQGIRPLVLGRLERGWVIASESAALDICGASYVREIEPGEFVAIDENGLRSSRFAEAKPKGCVFEYVYLARPDTDIAGRNVYLSRVEMGRRLAKEAPAEADLVIATPESGTPAAIGYAEASGIPFGAGLVKNAYVGRTFIQPSQTIRQLGIRLKLNPLKEVIKGKRLVVVDDSIVRGNTQRALVRMLREAGAAEVHIRISSPPVKWPCFFGIDFATRAELIANGMTIEEIGTSLGADSLSYISIDGMIEATTIAKPNLCRACFDGEYPMDLPDPELLGKQLLETELAAGPAATAAADAIRRP

SEQ ID NO: 30303 - DNA, 1416 bp, Bacillus cereus ATCC 14579
  CDS (1)..(1416): transl_table=11
atgcttgctgaaataaaggggttaaacgaagaatgtggcgttttcggaatttgggggcatgaaaatgcagcacaagtttcatactacggattgcacagtttacagcaccgtgggcaagaaggcgcaggcattgtcgtaaataatggggaaaaaatcgtcggtcacaaggggttaggtttaatatcagaagtgttttcaagaggtgagctagaaggattaaatggaaaatcagcgatcggacatgtacgatatgcaacagctggtggaagtgaagttgctaacgttcaaccattgttgttccgtttttccgatcatagtatggcgttagctcataacggaaatttaattaacgcaaaaatgcttcgtcgtgaattagaagcagagggcagtatttttcaaactagttcagatacagaagtacttttacatcttattaaacgtagtacgaaagattctttaattgaaagtgtaaaagaagctttaaacaaagtgaaaggtgcgtttgcgtatcttttactaactggaaatgaaatgatcgttgcattagatccgaatgggttccgtccgctttcaattggaaagatgggggatgcttacgttgtagcatctgaaacatgtgcttttgatgtagtaggtgcaacatacattcgtgatgtagaaccgggtgaattacttatcattaatgatgaaggaattcacgtagatcgtttcacaaacgatgtagaacatgcaatttgtagtatggaatacatttactttgcacgaccagattctaatattgcaggcgttaacgttcatgcagcacgtaagaatatggggaaacgtttagcggcagaagctcctattgaagcagatgttgttactggtgtaccagactctagtatttcagctgcgattggctatgcggaggcgacaggtattccatatgagttaggattaattaaaaatcgttacgttggacgtacgtttattcaaccttctcaggaactgcgagagcaaggggttaagatgaaactttccgcagtaagaggtgtagttgaagggaaacgagttgttatgattgatgactctatcgtaagaggaacgacaagtaaacgaattgttcgtatgcttcgtgaagctggagcgacagaagttcacgtaagaattgcttcaccacctctgaaatatccatgtttctatggcattgatattcaaacgagaaaagaattaattgcagcaaatcatacagtagaagaaatccgtgaaatgatcggagcagattctttaacatttttaagcgaagatggattagtagatgcaattggacgtccatatgaagggaaatatggtggcctatgcatggcttactttaatggggactatccaacagctctttatgattatgagcaagagcttttagaaagtatgaaataa

SEQ ID NO: 30304 - protein, 471 aa, Bacillus cereus ATCC 14579
MLAEIKGLNEECGVFGIWGHENAAQVSYYGLHSLQHRGQEGAGIVVNNGEKIVGHKGLGLISEVFSRGELEGLNGKSAIGHVRYATAGGSEVANVQPLLFRFSDHSMALAHNGNLINAKMLRRELEAEGSIFQTSSDTEVLLHLIKRSTKDSLIESVKEALNKVKGAFAYLLLTGNEMIVALDPNGFRPLSIGKMGDAYVVASETCAFDVVGATYIRDVEPGELLIINDEGIHVDRFTNDVEHAICSMEYIYFARPDSNIAGVNVHAARKNMGKRLAAEAPIEADVVTGVPDSSISAAIGYAEATGIPYELGLIKNRYVGRTFIQPSQELREQGVKMKLSAVRGVVEGKRVVMIDDSIVRGTTSKRIVRMLREAGATEVHVRIASPPLKYPCFYGIDIQTRKELIAANHTVEEIREMIGADSLTFLSEDGLVDAIGRPYEGKYGGLCMAYFNGDYPTALYDYEQELLESMK

SEQ ID NO: 30305 - DNA, 1518 bp, Nitrosomonas europaea ATCC 19718
  CDS (1)..(1518): transl_table=11
atgtgtggaattttaggcgtggtagcccggtcacccgccaatcagttgctctatgatggtctgttgatgctgcagcaccgtggtcaggatgctgccggtatcgttactgcacaaggtaacagctttcacatgcataaaggtctcggtctggtacgggatgttttccgtacccgggatatgcgtgcgctgccggggtacatgggaatcggccatgtacgctaccccacggcgggatcttcaacctctcctgctgaagcacagcctttttacgtaaattccccgtttggtatcgtgctggcccataacggtaatctgaccaatgcggaaaccctcaatcaggaactgtttcttgcagaccggcgtcacgtcaatacgcattccgattcagaagtattgctgaatgtactggcgcacgagttgcaggaacgtgccgtcggttatcagcttgacctggctgagattttctcggcagtagccggtgtacacgaacgctgtcagggtgcctatgccgttattgccatgattgcaggctatggtctgctcgcattccgcgatccgtacggaatcaggccgctcgtgttcggttcagtagaaacagatgcgggtaccgagtacatggtggcttccgagagtgttgcgttggatacgctgggttttcgtctcatccgcgatgttgctcccggggaagccatttttatcgatatggaagggcatttctacagtcatcagtgcgctgctctacccagcctgaatccctgtatttttgagtacgtttatctcgcccggcctgattcgatgctggatggaatatcggtttatgaaacccgcctcaacatgggtatcaatctggcggacaagatcagtacttccatgcaacatctcgatatcgatgtcgtcattccgattccggaatccagccgtccgagtgccatgcagcttgccaaccgtcttgggatcagtttcagggaagggttcgtcaagaatcgttatgtgggcagaacctttattatgccaggccagcaacaacgccggaaatcggtcaggcagaagctgaatgcgatcgaaatagaatttcgcggcaagaatatcctgctggtcgatgattccatcgtgcgtggaaccaccagtcgggaaatcgtccagatggcgcgtgaggctggtgccaacaaagtttactttgcttcggccgcacccccggtacgttttcctaatgtttacggtatcgatatgccaactcgtcaggaactgattgcaacagatcgaaccgatgaggaaatatgtcgtgaaatcggtgcggattatctggtttatcagaatctggatgcgctcaggcaggcaatcactcagatcgatccacagatcaggcattttgaaacatcctgtttcgatggacgatacatcgcaggcaatatcactcaggaatatctctgcagaatcgagtcacaacgcaacaatcccggcctgtctcagggtgagcgtactactcagcttgatttagctctgttatcaacggattaa

SEQ ID NO: 30306 - protein, 505 aa, Nitrosomonas europaea ATCC 19718
MCGILGVVARSPANQLLYDGLLMLQHRGQDAAGIVTAQGNSFHMHKGLGLVRDVFRTRDMRALPGYMGIGHVRYPTAGSSTSPAEAQPFYVNSPFGIVLAHNGNLTNAETLNQELFLADRRHVNTHSDSEVLLNVLAHELQERAVGYQLDLAEIFSAVAGVHERCQGAYAVIAMIAGYGLLAFRDPYGIRPLVFGSVETDAGTEYMVASESVALDTLGFRLIRDVAPGEAIFIDMEGHFYSHQCAALPSLNPCIFEYVYLARPDSMLDGISVYETRLNMGINLADKISTSMQHLDIDVVIPIPESSRPSAMQLANRLGISFREGFVKNRYVGRTFIMPGQQQRRKSVRQKLNAIEIEFRGKNILLVDDSIVRGTTSREIVQMAREAGANKVYFASAAPPVRFPNVYGIDMPTRQELIATDRTDEEICREIGADYLVYQNLDALRQAITQIDPQIRHFETSCFDGRYIAGNITQEYLCRIESQRNNPGLSQGERTTQLDLALLSTD

SEQ ID NO: 30307 - DNA, 1425 bp, Helicobacter hepaticus ATCC 51449
  CDS (1)..(1425): transl_table=11
atggaaagctggaacgaagagtgcgccattgtgggcgtatataatgttgataatgcagcactcttaagctattattcactctttgcaatgcagcatagggggcaggaagcaagtgggatttccgcaagtaatggcacaaaaatcacaactatcaaaaatactggtttagtaactaaaatttttacacaaaagcgacttgataaattgcaaggtcgctcaagtattggacacaatcgctattcaactgcaggtgaagattctataaatgacacacaacctatttttgcacgatatgatttaggcgaaatggcaatcgcacataatgggaatctcacaaatgccaaagaagtgcgcgagatgcttattaaagagggaacaatattccaaagctatcttgatactgaaaatctcattcatctgattgcacgaagtaaaaaaacatcgcttactgatagaatcattgatgctttaagctacattgatggagcgtattgctttgtatttctttcacggagcaaaatgtttgctattcgtgataggtatggattgcgcccacttagcttaggcaaaatacaaaacgaagacggaagcacaggctatgttgtagcgagtgaaagttgtgcatttgaccttataggtgcggaatttgtccgagatgtcaaagcaggtgagatgattatttttgatggagcgtatgcctttcaagattctcaacccaaaagtattcaagtctttgaaccaaaaccgcatttttgcgtatttgaatacatatattttgcacgtcctgatagcaatgtgtttggacataatgtctatcaagcacgcaaacaaatgggtatagagcttgctaaagaacatcaaattcaagcagatatggtaattcctgtgccagattctggtgtggctgcagctattggttatagtaagcaaagcggaattgattttgagctaggatttatccgcaatcactatgtaggaaggacatttattgagccaacgcagcaagagagagagcttaaagttcgccttaaactcaaccctatcagagaacttatagctaataaagatattattgtcattgatgattctgtggttagaggcacgacaagtaagcaaattattaaaatcttgcgtcaagcgggggcaagaaaaattcatctacttattagctctccgcctacgatttcgccgtgcttttatggtatagatacgcccaataaggagcaactcatttgtgctaataaaagtattgaagaagtgtgtaagcatatcggtgcagattctctaggttttctctcccttagcggtttgaccaaaagtataggcgaaaacaattctttatgcaaagcgtgttttgatggacattatattgatgattataccacaggtgcagcaatccctgccgctttaaaatcctctcattaa

SEQ ID NO: 30308 - protein, 474 aa, Helicobacter hepaticus ATCC 51449
MESWNEECAIVGVYNVDNAALLSYYSLFAMQHRGQEASGISASNGTKITTIKNTGLVTKIFTQKRLDKLQGRSSIGHNRYSTAGEDSINDTQPIFARYDLGEMAIAHNGNLTNAKEVREMLIKEGTIFQSYLDTENLIHLIARSKKTSLTDRIIDALSYIDGAYCFVFLSRSKMFAIRDRYGLRPLSLGKIQNEDGSTGYVVASESCAFDLIGAEFVRDVKAGEMIIFDGAYAFQDSQPKSIQVFEPKPHFCVFEYIYFARPDSNVFGHNVYQARKQMGIELAKEHQIQADMVIPVPDSGVAAAIGYSKQSGIDFELGFIRNHYVGRTFIEPTQQERELKVRLKLNPIRELIANKDIIVIDDSVVRGTTSKQIIKILRQAGARKIHLLISSPPTISPCFYGIDTPNKEQLICANKSIEEVCKHIGADSLGFLSLSGLTKSIGENNSLCKACFDGHYIDDYTTGAAIPAALKSSH

SEQ ID NO: 30309 - DNA, 1614 bp, Rhodopirellula baltica SH 1
  CDS (1)..(1614): transl_table=11
atggctgaattgaatcacgaatgcggcgttgccgcgatctaccacctttctggtcgcgggcgcagcccggtgtgcacggacgatggaccgcgacaaatttcgcgtctgttgccccgcatgttgctcgacatccaaaatcgcgggcagcttgccgctgggatgtccacgttcgaccccgatcgtcccgcgctgctgaaaacgcggcgtgatgtcggaacggtgacggaagtcttccgcctgaatcatcgggccaaagccgaatcgttgatgaaatcgctggccggtcgcgccgccatcggacacgttcgctacgccacctgtggcgccgatgaccggaactacgctcaacctttcgagcgacggcatatccataaacgcaaatggttcagcttctgcttcaatggccaactggccaattacacccttttgaagcagcggttgctcgccgatggcgatcaccacttggcactcgacaccgacaccgaaatcattctccacgagatcgctcgattgctatcgcagtcgcaggaacgagtcgactggatcgacgtcctgaaacaggtcacggccggtttcgacggtgcctactcaatggcattgttgaccgcagaaggtgagatgttggtcgctcgcgacccattgggcatcaaaccgatgtgctacatccacgaaggcccgctgtttgcctgtgccagcgaaagcgtcgctcttttgaatctcgggttcgaaccagatcaaattcgatcgttgcctcctggtcatgcgatcttgattgatcctgacgaaggtttccggatggaacgattcgcggaacccgaaacgcccaaacactgcttctttgaatggatctatttcgccaacgtcgccagcacgctggacgaccgaagcgtctatctttcgcgaaccaacttgggtcgtgaactggccaccgcggaacgtgagttcggtcgagttccgttggacgatccagacacgatcattgtgccggttcctgacaccagcaaagctgccgcagactcgatggcctatgaattatcgatcccatgccgcgaaggcttgatccgcaaccgatatgccgggcggacattcatcgaaggcggtcgcgctcgcaaagcaaaggcggcggcaaagtacacgccgcttcgcgaagtcttgcaagggaaacgagtcatcctggtggaggactccatcgttcgaagcacgaccatgaacgcgttgctggatcgtattcgtgacgttggtggcgcgaaggaaatccacgttcgcgtggcttgcccgccgatcgttgctccgtgcttctacggaatcgacatgagcacgatcgatcaattgatcgcgccgaagtacttctcgttgaccggtgaactggacgaagaatcgcagcaacggatggccgacgatctcggtgctgattcgctgcaatacttgccagtatccgcaatcgcacgagccatcaacttgccggaggaacacctctgtcaggcttgcgtgacgggcaaatacccaacgcctatcggccagcacctgtatcagattgcatgcgacaatcgtggggcgagagtcaacaatcagcgaacctacgagcaactcgctgcggctgttgccggacagtga

SEQ ID NO: 30310 - protein, 537 aa, Rhodopirellula baltica SH 1
MAELNHECGVAAIYHLSGRGRSPVCTDDGPRQISRLLPRMLLDIQNRGQLAAGMSTFDPDRPALLKTRRDVGTVTEVFRLNHRAKAESLMKSLAGRAAIGHVRYATCGADDRNYAQPFERRHIHKRKWFSFCFNGQLANYTLLKQRLLADGDHHLALDTDTEIILHEIARLLSQSQERVDWIDVLKQVTAGFDGAYSMALLTAEGEMLVARDPLGIKPMCYIHEGPLFACASESVALLNLGFEPDQIRSLPPGHAILIDPDEGFRMERFAEPETPKHCFFEWIYFANVASTLDDRSVYLSRTNLGRELATAEREFGRVPLDDPDTIIVPVPDTSKAAADSMAYELSIPCREGLIRNRYAGRTFIEGGRARKAKAAAKYTPLREVLQGKRVILVEDSIVRSTTMNALLDRIRDVGGAKEIHVRVACPPIVAPCFYGIDMSTIDQLIAPKYFSLTGELDEESQQRMADDLGADSLQYLPVSAIARAINLPEEHLCQACVTGKYPTPIGQHLYQIACDNRGARVNNQRTYEQLAAAVAGQ

SEQ ID NO: 30311 - DNA, 1413 bp, Wigglesworthia glossinidia endosymbiont of Glossina brevipalpis
  CDS (1)..(1413): transl_table=11
atgtgcggtgttattggaatttctggggttaattcaatttctcaatctatttatgatgctttaacagttttgcagcatcgtgggcaagattccgctggaattacaacgatagataagtttaattgttttcgtgtgcataaatctagtggattagtgaaagatgtttttaaaccaaatgatataaaatatttaaaaggtaaaatgggaattggtcatgtacgttatcccactaccagagaaaaaaatatatatgaagcccaaccactatatgtaaactctccttttggaattactttagctcacaatggtaatataataaatacaaaatttttaaaaaaacaattgttcgaaactcagagaaggcatataaatacaaattcagattctgaaattttattaaatatttttgcatctgaattaaatcaattccataattatcctttgcattatgaaaatattttttcagcaataaaaaatacacataaaagagtaaaaggagcatattcttgtgtaggaatgattataggacatgggttatttgcatttagagacccttatggaattagaccattagtattaggggaacgtactctttcatgcaaaaaagagtacataatagcatctgaaacagttgctttagatatattaggatttaaacatttacgtgatgttgctccaggagagggggtgttattaactaacagtggaaagcttttgaccaagcagtgttctttaacttcaaactattgcccttgtttatttgaatatatttatttttctagaccagattctattatagacaagatatctgtttacacagctagaatgaaaatgggacaaattttaggaaaaaaaatatctagagaatggaaaaatttgaatattgatgctgtaattcctataccagaaacatcttgtgatgtagcattagaaatagctcgaatattaaaaataccatataggcaaggatttgtgaaaaatagatatgtcggaagaacatttataatgtctaatccaagcattagaaaaaaatcaataagatataaatttaatgtaaataaagctgaattttacaaaaaacaagtactcttggtagatgattcgattgtaagaggaaatacatctaagcaaattgtagaaatggcaagagatgcaggtgcaaatagcgtatatttagcatcagcttctccggaaattagatttcccaacatatatggaattgatataccagattcagaagaactaatagcacatcaaaaatcattaaatgatataagaatatcgattaaagctgatgctttaatttttcaaaatcttaatgatttagaaaaatcccttaaaaaatttaatccaaaaataaaaaattttgaatcgtccatatttaatggaatatatccaacttctttaatataa

SEQ ID NO: 30312 - protein, 470 aa, Wigglesworthia glossinidia endosymbiont of Glossina brevipalpis
MCGVIGISGVNSISQSIYDALTVLQHRGQDSAGITTIDKFNCFRVHKSSGLVKDVFKPNDIKYLKGKMGIGHVRYPTTREKNIYEAQPLYVNSPFGITLAHNGNIINTKFLKKQLFETQRRHINTNSDSEILLNIFASELNQFHNYPLHYENIFSAIKNTHKRVKGAYSCVGMIIGHGLFAFRDPYGIRPLVLGERTLSCKKEYIIASETVALDILGFKHLRDVAPGEGVLLTNSGKLLTKQCSLTSNYCPCLFEYIYFSRPDSIIDKISVYTARMKMGQILGKKISREWKNLNIDAVIPIPETSCDVALEIARILKIPYRQGFVKNRYVGRTFIMSNPSIRKKSIRYKFNVNKAEFYKKQVLLVDDSIVRGNTSKQIVEMARDAGANSVYLASASPEIRFPNIYGIDIPDSEELIAHQKSLNDIRISIKADALIFQNLNDLEKSLKKFNPKIKNFESSIFNGIYPTSLI

SEQ ID NO: 30313 - DNA, 1458 bp, Prochlorococcus marinus subsp. marinus str. CCMP1375
  CDS (1)..(1458): transl_table=11
atgtgtggaatagtaggaatagtttctaataatcaaattaatcaaaagatttatgatagtttgcttttattacagcatagagggcaggactcaacaggaatagcaacgatggaaggaagtgtttttcacttacataaatctaagggtcaagttaaagaagcatatagaacaagagacatgagaattctgaccggcaatattggaattggtcatgtaaggtatgctacttcaggagaggcacatcgagaagatgaagcacaacctttttatgtaaatgcaccttatggaattattcttgtacacaatggaaatttgacaaatacgcgtgaattagaaaaagaactttttagtattgatagaagacatacgaattcctctagtgatacagaaatgcttttaaatgtattggcaactgaaattcagtctgaaaattatggaagttcattatctcccgaacatattttttctgctatatcatcattacataaaagagtagaaggtacatattcagcaattgcaatgattgctggttatggattacttgcttttagagatccatatggaataagacctttagtcttaggtaaaagagttttagataatggtaaaaccgaatggattgttgcaagtgaatctttggtattagaaaataatgattttgatgtagtacgagatgttgtacctggtgaagctatttttatttctaatgaaggagaattttattcaaaacagtgtgctgataatccacaattgtttccttgttcttttgaatatgtttatttggctcgaccagattctgtaatgaatggtatttctgtatatgaagctagattaaggatgggagattatcttgccaagacaattcaggaacaaattacttcgggcgaaattgatgtagttatgccaattcctgattcttctagaccatctgcgatgcaggttgcaagacaattaggtcttgagtatagagaaggattttttaagaatcgttatgtaggaaggacttttattatgcctggtcaggcacaaagaaagaaatctgtacgtcaaaaacttaatgcgatgagtagtgagtttaaaggaaaaaatgtattattagtcgatgattctatagttcgtggaactacatctcgagagattgtacaaatggcaaaattagcaggagctaataaagtaacctttacttctgcggcgcctccgatacgttttcctcatgtttatggtattaatatgccatcaaagatggagttaattgctcatgataaatctattgatcaaatacaagaaactttattggcagatggtttggtatatcaaaaaatatctgatttagagcaatctattttaaaaggttctcaagtgaaaaatcttgacctttcttgctttaatggtgaatatgtaactggaaaggttactgaagaatatttagcttgggtcggatctaaatattcttcttaa

SEQ ID NO: 30314 - protein, 485 aa, Prochlorococcus marinus subsp. marinus str. CCMP1375
MCGIVGIVSNNQINQKIYDSLLLLQHRGQDSTGIATMEGSVFHLHKSKGQVKEAYRTRDMRILTGNIGIGHVRYATSGEAHREDEAQPFYVNAPYGIILVHNGNLTNTRELEKELFSIDRRHTNSSSDTEMLLNVLATEIQSENYGSSLSPEHIFSAISSLHKRVEGTYSAIAMIAGYGLLAFRDPYGIRPLVLGKRVLDNGKTEWIVASESLVLENNDFDVVRDVVPGEAIFISNEGEFYSKQCADNPQLFPCSFEYVYLARPDSVMNGISVYEARLRMGDYLAKTIQEQITSGEIDVVMPIPDSSRPSAMQVARQLGLEYREGFFKNRYVGRTFIMPGQAQRKKSVRQKLNAMSSEFKGKNVLLVDDSIVRGTTSREIVQMAKLAGANKVTFTSAAPPIRFPHVYGINMPSKMELIAHDKSIDQIQETLLADGLVYQKISDLEQSILKGSQVKNLDLSCFNGEYVTGKVTEEYLAWVGSKYSS

SEQ ID NO: 30315 - DNA, 1521 bp, Bordetella parapertussis 12822
  CDS (1)..(1521): transl_table=11
atgtgtggaatcgtcggtgtcattgggcgcgggccggtcaaccagctgctctatgacagcttgctgctgctgcaacaccgggggcaggacgcggcgggcatcgccacgctgcagggcaaccacttcaacatgtacaaggcgcacggcctggtgcgcgatgtgttccgtacccgcaacatgcgcgcgctgccgggcaccagcggcgtgggccaggtgcgctatcccaccgccggctccagcgccagcgaggaagaggcgcagccgttctacgtcaatgcgccgttcggcatcatgttcgcccacaacggcaacctgaccaactggcgcgagctgcgcgagtcgctctaccgcgccgaccgccgccacatcaataccaattccgattccgaagtgctgctcaatgtgctggcgcacgagctgcaatcggccgccagcggcgtgtcgctcgacgatgacacgatctttcgcgctgtctccgcggtgcaccagcgcgtcaagggcgcctacgccgtggtggcgcagatctcgggctacggcatgctggcgtttcgcgatccccacggcatccggccgctgtgcatcggccgccaggagaccgaggaaggcgtggaatggatggccgcctcggaatccgtggcgctagaaggcagcggttttgccttcgtgcgcgacgtcgagcccggcgaggcgatattcgtcgacctcgacggccgcatgaccagccgccagtgcgccgacaatgcgcaactggtgccgtgtatcttcgagtacgtgtactttgcccgccccgattcgctgatcgacggcgtctcggtgtacgacgcgcgcctgcgcatgggcgaatacctggccgacaaggtcgcgcgcagcatgcgcctgggcgatatcgacgtggtgatgccgattcccgactcgtcgcgtccggccgccatgcagctggcgcaccggctggggctggactatcgcgaaggcctgatcaagaaccgctacgtgggccgtacgttcatcatgccgggccaggcggtgcgccgcaaatcggtgcgccagaaactgaacgccatcggcatggaattcaagggcaagaacgtgctgctggtcgacgattccatcgtgcgcggcaccaccagccgcgagatcgtcgacatggcgcgcgcggccggcgccaacaaggtgtatttcgcctccgcggcgcctccggtgcgattccccaacgtgtacggcatcgacatgccgacccagaaggaactgatcgccaccggccgcaccgatgacgaaatcgcccgcaccatcggcgccgacgcgctgatctaccaggacctgcaggacatgcagcaggcggtgcgtgacatcaatccgcgcctgagccgcttcgaggcatcgtgtttcgacggcgagtacgtgaccggcgacatcaccgccgaatacctggcccgcctgggccagtcgcgcgacagcagcgccggcgacgaagaggccggcggcctgcagttcaacatgggctacgcggccaacgacgcctga

SEQ ID NO: 30316 - protein, 506 aa, Bordetella parapertussis 12822
MCGIVGVIGRGPVNQLLYDSLLLLQHRGQDAAGIATLQGNHFNMYKAHGLVRDVFRTRNMRALPGTSGVGQVRYPTAGSSASEEEAQPFYVNAPFGIMFAHNGNLTNWRELRESLYRADRRHINTNSDSEVLLNVLAHELQSAASGVSLDDDTIFRAVSAVHQRVKGAYAVVAQISGYGMLAFRDPHGIRPLCIGRQETEEGVEWMAASESVALEGSGFAFVRDVEPGEAIFVDLDGRMTSRQCADNAQLVPCIFEYVYFARPDSLIDGVSVYDARLRMGEYLADKVARSMRLGDIDVVMPIPDSSRPAAMQLAHRLGLDYREGLIKNRYVGRTFIMPGQAVRRKSVRQKLNAIGMEFKGKNVLLVDDSIVRGTTSREIVDMARAAGANKVYFASAAPPVRFPNVYGIDMPTQKELIATGRTDDEIARTIGADALIYQDLQDMQQAVRDINPRLSRFEASCFDGEYVTGDITAEYLARLGQSRDSSAGDEEAGGLQFNMGYAANDA

SEQ ID NO: 30317 - DNA, 1521 bp, Bordetella bronchiseptica RB50
  CDS (1)..(1521): transl_table=11
atgtgtggaatcgtcggggtcattgggcgcgggccggtcaaccagctgctctatgacagcttgctgctgctgcaacaccgggggcaggacgcggcgggcatcgccacgctgcagggcaaccacttcaacatgtacaaggcgcacggcctggtgcgcgatgtgttccgtacccgcaacatgcgcgcgctgccgggcaccagcggcgtgggccaggtgcgctatcccaccgccggctccagcgccagcgaggaagaggcgcagccgttctacgtcaatgcgccgttcggcatcatgttcgcccacaacggcaacctgaccaactggcgcgagctgcgcgagtcgctctaccgcgtcgaccgccgccacatcaataccaattccgattccgaagtgctgctcaatgtgctggcgcacgagctgcaatcggccgccagcggcgtgtcgctcgacgatgacacgatctttcgcgccgtctccgcggtgcaccagcgcgtcaagggcgcctacgccgtggtggcgcagatctcgggctacggcatgctggcgtttcgcgatccccacggcatccggccgctgtgcatcggccgccaggagaccgaggaaggcgtggaatggatggccgcctcggaatccgtggcgctggaaggcagcggttttgccttcgtgcgcgacgtcgagcccggcgaggcgatattcgtcgacctcgacggccgcatgaccagccgccagtgcgccgacaatgcgcaactggtgccgtgtatcttcgagtacgtgtactttgcccgccccgattcgctgatcgacggcgtctcggtgtacgacgcgcgcctgcgcatgggcgaatacctggccgacaaggtcgcgcgcagcatgcgcctgggcgatatcgacgtggtgatgccgattcccgactcgtcgcgcccggccgccatgcagctggcgcaccggctggggctggactatcgcgaaggcctgatcaagaaccgctacgtgggccgtacgttcatcatgccgggccaggcggtgcgccgcaaatcggtgcgccagaaactgaacgccatcggcatggaattcaagggcaagaacgtgctgctggtcgacgattccatcgtgcgcggcaccaccagccgcgagatcgtcgacatggcgcgcgcggccggcgccaacaaggtgtatttcgcctccgcggcgcctccggtgcggttccccaacgtgtacggcatcgacatgccgacccagaaggaactgatcgccaccggccgcaccgatgacgaaatcgcccgcaccatcggcgccgacgcgctgatctaccaggacctgcaggacatgcagcaggcggtgcgtgacatcaatccgcgcctgagccgcttcgaggcatcgtgtttcgacggcgagtacgtgaccggcgacatcaccgccgaatacctggcccgcctgggccagtcgcgcgacagcagcgccggcgacgaagaggccggcggcctgcagttcaacatgggctacgcggccaacgacgcctga

SEQ ID NO: 30318 - protein, 506 aa, Bordetella bronchiseptica RB50
MCGIVGVIGRGPVNQLLYDSLLLLQHRGQDAAGIATLQGNHFNMYKAHGLVRDVFRTRNMRALPGTSGVGQVRYPTAGSSASEEEAQPFYVNAPFGIMFAHNGNLTNWRELRESLYRVDRRHINTNSDSEVLLNVLAHELQSAASGVSLDDDTIFRAVSAVHQRVKGAYAVVAQISGYGMLAFRDPHGIRPLCIGRQETEEGVEWMAASESVALEGSGFAFVRDVEPGEAIFVDLDGRMTSRQCADNAQLVPCIFEYVYFARPDSLIDGVSVYDARLRMGEYLADKVARSMRLGDIDVVMPIPDSSRPAAMQLAHRLGLDYREGLIKNRYVGRTFIMPGQAVRRKSVRQKLNAIGMEFKGKNVLLVDDSIVRGTTSREIVDMARAAGANKVYFASAAPPVRFPNVYGIDMPTQKELIATGRTDDEIARTIGADALIYQDLQDMQQAVRDINPRLSRFEASCFDGEYVTGDITAEYLARLGQSRDSSAGDEEAGGLQFNMGYAANDA

SEQ ID NO: 30319 - DNA, 1461 bp, Prochlorococcus marinus subsp. pastoris str. CCMP1986
  CDS (1)..(1461): transl_table=11
atgtgtggaattgttggaattgtttcttgtgatgatgtaaatcaacagatttatgacagtcttttgctacttcagcatagaggtcaagattcaactggaatagctacaatggaaaatactgtttttcatatacataaagctaaaggacaagtaaatactgcttatagaacaagagatatgagaaatttaataggaaaaattggtttagggcatgttaggtacgcaactaaaggttcagcagaaagtgttgaagaagcacaacctttctatgttaatgctccttatggaatagttttgattcataatggaaaccttactaatacaagagacctagagaaacaattatttaatgtagataaacgccatactaattcttcaagtgatactgaaatgttgttaaacatattcgccactgaattacaagaacagatccataatcaagatctagagccagatataatttttaatgcagttaaaaatttacataaaagaattcaaggttcatatgcttcaattgctttaatttcagggcatggtttattagcttttagagatccttttggtataaggcctttagtaattggaaaaagaatttctcttattactcaaaaggaagagtggatggtagctagtgagtctttagtattagaaaataatgattatcatgttgttagagatgtggaacctggcgaggcaatttttataaccaataatggtgaatttttttcaaagcaatgctcagaaaacccaaggttatttccttgtgcttttgaatatgtttatttagctagaccagattcagtgatgaatggaatttcagtttatcaagcacgtttgaaaatgggtgattatttagctgaaacaattaagcaatcaatacagtgtggggatgtcgatgtggtaatgcctattcctgattcttcacgtcctgcggcaatgcaagttgctaggcagttggggatagagtatagagaaggtttttttaaaaatagatacgttggaagaactttcataatgcctggccatcaaaaacgtaaacaatctgtaaggcaaaagttgaatgctatgagtacagaatttaaaaataaaaatgtactaatagtcgatgattctatagtgagaggaactacatcaaaacaaatagtgcaaatggcaaaagatgctggtgcaaataaagttttttttacttcagcagctcctccagttagatatcctcatgtttatggaattaatatgcctaatagagatgaattaattgctcatgatagatcaataattgaaatagcagaaaagcttgaaatagatcatcttgtatatcaaagtgttgaaaatttgagaaaatctataattaatgattctcccattcaagaattagaaatgagttgttttactggttcttatgttactgggacggtaaatcaagaatatttaaaatgggttgaaaatgaatataattcttaa

SEQ ID NO: 30320 - protein, 486 aa, Prochlorococcus marinus subsp. pastoris str. CCMP1986
MCGIVGIVSCDDVNQQIYDSLLLLQHRGQDSTGIATMENTVFHIHKAKGQVNTAYRTRDMRNLIGKIGLGHVRYATKGSAESVEEAQPFYVNAPYGIVLIHNGNLTNTRDLEKQLFNVDKRHTNSSSDTEMLLNIFATELQEQIHNQDLEPDIIFNAVKNLHKRIQGSYASIALISGHGLLAFRDPFGIRPLVIGKRISLITQKEEWMVASESLVLENNDYHVVRDVEPGEAIFITNNGEFFSKQCSENPRLFPCAFEYVYLARPDSVMNGISVYQARLKMGDYLAETIKQSIQCGDVDVVMPIPDSSRPAAMQVARQLGIEYREGFFKNRYVGRTFIMPGHQKRKQSVRQKLNAMSTEFKNKNVLIVDDSIVRGTTSKQIVQMAKDAGANKVFFTSAAPPVRYPHVYGINMPNRDELIAHDRSIIEIAEKLEIDHLVYQSVENLRKSIINDSPIQELEMSCFTGSYVTGTVNQEYLKWVENEYNS

SEQ ID NO: 30321 - DNA, 1458 bp, Prochlorococcus marinus str. MIT 9313
  CDS (1)..(1458): transl_table=11
atgtgtggcattgttggcattgtttctactgcgctggtcaatcagcagatctatgacagcttgctgcttctacagcatcggggtcaggactctactggcatagccaccatggatggcagtgtttttcacttgcacaaggcaagggggcaagtgcgggaggcctatcgcacacgtgatatgcgttccttaatcggtaatattggtcttggtcatgttagatatgcaacaaagggtgcagctgagcgagaagaagaagcacaaccattttatgtgaatgctccttacggaatcattcttattcataacggtaaccttactaatactcgagagcttgatcgcgacttgttcaatattgatcgtcgccacacaaattcaaagagtgatacggagatgttgcttaatgttctagctactgaattgcaattgaaaatttatggcagtgatcttactccagatcaggtatttgatgctgttacatctgtacatcaacgagtagaaggttcttatacatctattgctttgattgcagggcacggtcttcttgcctttcgtgatccgtttggcattaggccattggtacttggtaaacgtaagtctttagaaggtgctgatgagtggattgtcgctagtgagtcattggtattagagaatggtgattatgagattgttagggatgttgatcctggtgaggcgattttcattactcaaaatggcgagctttattcacgtcagtgtgcgaagaatccgcgtcttgtgccatgttcatttgagtatgtttatcttgctcgacctgattcagtgatgagtggaatctcggtttatgaggctcgattaaggatgggggatcgtcttgcagaaactattgaaaagtacacgccatctggagatatagatgttgtgatgccaattcctgactcttcacggcctgctgctatgcaagtggctagacagcttgggattgaatatcgtgagggcttttttaaaaatcgttatgtaggccgtacatttatcatgcctggacaagctcaacgtaagaaatctgttagacaaaagttaaatgctatgggaacagaatttaaaggtaagaatgttttaattgtggatgattcaattgtacgtggtacgacttcgaaggagatagtacaaatggctcgagttgctggtgcgaataaagtcacgtttacctctgcagcaccaccagtgcggtattcacatgtttatggtataaatatgccaaatcgtcatgagctgattgcttataatcgcactattcctgaaatctcttctgaactttcaacggatcacatggtctatcaagaggttgctgatctagaagcagcaattgttgaaggttcaggtgtttctgaacttgagctttcttgttttaccggagagtatattacagggacagttacttctgaatatctcgattggatagaacgcacacaattgtcttga

SEQ ID NO: 30322 - protein, 485 aa, Prochlorococcus marinus str. MIT 9313
MCGIVGIVSTALVNQQIYDSLLLLQHRGQDSTGIATMDGSVFHLHKARGQVREAYRTRDMRSLIGNIGLGHVRYATKGAAEREEEAQPFYVNAPYGIILIHNGNLTNTRELDRDLFNIDRRHTNSKSDTEMLLNVLATELQLKIYGSDLTPDQVFDAVTSVHQRVEGSYTSIALIAGHGLLAFRDPFGIRPLVLGKRKSLEGADEWIVASESLVLENGDYEIVRDVDPGEAIFITQNGELYSRQCAKNPRLVPCSFEYVYLARPDSVMSGISVYEARLRMGDRLAETIEKYTPSGDIDVVMPIPDSSRPAAMQVARQLGIEYREGFFKNRYVGRTFIMPGQAQRKKSVRQKLNAMGTEFKGKNVLIVDDSIVRGTTSKEIVQMARVAGANKVTFTSAAPPVRYSHVYGINMPNRHELIAYNRTIPEISSELSTDHMVYQEVADLEAAIVEGSGVSELELSCFTGEYITGTVTSEYLDWIERTQLS

SEQ ID NO: 30323 - DNA, 1506 bp, Synechococcus sp. WH 8102
  CDS (1)..(1506): transl_table=11
gtgaggcagaatcctgaaggaagtctgaagtcgaggcgctcagtgcatgtgctgaaggcagagcgtcccgatcggatggaagaggcctgcggtgtcttcgccgttctggccggggaacaaccggtggcgaacctggcttatttcggtctgtatgccctgcagcatcgaggccaggaatcggctggcatcgcggtgttcaacgaaggcaaggttcgccttcataaggacatgggcctggtcagccaggtgtttgaccaggacgtgctggcccgcatgcctggagacctggccatcggccacaaccgctactccaccacgggcagcagccgggtgtgcaatgcccagcctgtggtgttgatgacgcggctgggggcctttgctttggcccacaacggcaacctggtgaatgcccgcgaattgcgggagttggtggacgacggacaggcggagttcacctcaacaacggattcggaactgatcgccttcgctgtgcagcaggcggtggatcgtgggctcgactggtcagatgccatagaggccgcgctcaagctgtgtcggggtgcgttcagccttgccatcggaacgccggatggtctgtttgctgtacgcgacggtcatggcatccgtcctttggtgttcggcacgctgggggatccagccactggtcattgggtggtgagcagtgagacctgtggcttggagatcatcggcgcccgctatgtcgatgatgtccagcccggtgaattggtccggtttgaactcggatcagcagagcctcagcgtcggcgttggagtgaggaaccgaaccgcctgtgcgtgttcgagatgatttatttcgccaggccggacagtcagttcttcggcgagtccctctacagctaccgccagcgcattggacgaacccttgctcgcgagtcgtgcgtggaggctgatctggtgatcggtgtcccagattccggcattcctgcagccattggtttttctcaggaaagtggcatcccctacggcgatggtctgatcaagaaccgttatgtcggccgtactttcatccagcccacccaggcgatgcgggaagcgggcattcgggtgaaactcaaccctctgccggatgtgctggccggaaagcgcttgatcgtgattgatgactcgatcgtgcgtggcaccaccagccgcaaattggtggtggcgttacgggatgccggtgccactgaagtgcacatgcggatcagttcgcctccggtgacgcatccctgcttttacgggatcgacaccgacacccaggatcaactgatcgccgctcagatgacccttgagcagatcaaggatcacctcaaagtggattctctggcttacctcagcaaggaaggaatgctcgaggctgcgaaggctgagtccggccatttctgcagcgcctgttttgacgggcaatacccgatccccatggatcagacgttgctgtccagcaaattgatgatggagcctgcggggattgctgcgacgtcttga

SEQ ID NO: 30324 - protein, 501 aa, Synechococcus sp. WH 8102
MRQNPEGSLKSRRSVHVLKAERPDRMEEACGVFAVLAGEQPVANLAYFGLYALQHRGQESAGIAVFNEGKVRLHKDMGLVSQVFDQDVLARMPGDLAIGHNRYSTTGSSRVCNAQPVVLMTRLGAFALAHNGNLVNARELRELVDDGQAEFTSTTDSELIAFAVQQAVDRGLDWSDAIEAALKLCRGAFSLAIGTPDGLFAVRDGHGIRPLVFGTLGDPATGHWVVSSETCGLEIIGARYVDDVQPGELVRFELGSAEPQRRRWSEEPNRLCVFEMIYFARPDSQFFGESLYSYRQRIGRTLARESCVEADLVIGVPDSGIPAAIGFSQESGIPYGDGLIKNRYVGRTFIQPTQAMREAGIRVKLNPLPDVLAGKRLIVIDDSIVRGTTSRKLVVALRDAGATEVHMRISSPPVTHPCFYGIDTDTQDQLIAAQMTLEQIKDHLKVDSLAYLSKEGMLEAAKAESGHFCSACFDGQYPIPMDQTLLSSKLMMEPAGIAATS

SEQ ID NO: 30325 - DNA, 1377 bp, Wolinella succinogenes DSM 1740
  CDS (1)..(1377): transl_table=11
gtggaaacattgagagattggaacgaagagtgcgcggttgtaggggtttataacgctgatacagcggcgagtgtggcctactattcactattttcaatgcagcatcgagggcaggaggcgagcggaattagcagctctacaggtgagaaactcatcaccatcaaggatcgagggctggtgacggcagtttttggagatgataagctcaaaaaactcaaagggcgatcggccgtaggtcacaaccgctactccacggcgggagaagattctattttggatgcccagcctgtatttgcgcgatatgatttgggtgaaatcgcgattgtgcataatggcaatctgaccaatgccaagcagattcgagaggatttgatccaaaaaggggcaatcttccagagctttatggatacggagaatctcatccatctcatcgctaaaagccaaaaagagaagctcattgatcgaatcattgacgcggtgcacaaaatagagggggcctactctctgatctttttaagtcgcaaaaagatgttcgcgattagagatccacatggttttaggcctttgagtttagggcgtatcaaaaacagcgatggtagttttggctatatggtcgcgagtgaaacctgcgcctttgatcttgtgggggcagagtatattcgagatgttgagccaggcgaaatgctcgtgtttgaggcagaaggagagccaagaagctacaaaatttttgaaaaacaacctcgtccctgtatttttgaatttgtctattttgctagacccgatagccgtgtgtttggacacaatgtctatgaggtacgcaaaaacatgggacaagagctcgctagagagaaacccattgaagcagacatggtgattcctgtgcctgatagcggggtggctgcagccattggatatgcaagagagagcgggattccttttgagcttggaattgttcgtaaccattatgtgggaagaacctttattgagcccacgcaacagagccgagagctaaaagtcaaactcaaactcaaccccattaaggagctcatccagggcaagcgtctcattgtgattgatgatagcatcgtgagagggacaactagtcggcagatcgtgagaatcttgcgtgcagcgggcgctaaagaggttcatatgaagatcagctcccctcccactatctccccttgctactatggggtcgatacgcctgataaatctcagctcatctgcgccaatatgacgctagaggagacctgccgctttatcgaagccgattctctctctttcctctctcttgaggggcttagacgcagtattcaatgcgatgagcgagagcttttttgtcaagcatgctttgacggaaaatatatagtctaa

SEQ ID NO: 30326 - protein, 458 aa, Wolinella succinogenes DSM 1740
METLRDWNEECAVVGVYNADTAASVAYYSLFSMQHRGQEASGISSSTGEKLITIKDRGLVTAVFGDDKLKKLKGRSAVGHNRYSTAGEDSILDAQPVFARYDLGEIAIVHNGNLTNAKQIREDLIQKGAIFQSFMDTENLIHLIAKSQKEKLIDRIIDAVHKIEGAYSLIFLSRKKMFAIRDPHGFRPLSLGRIKNSDGSFGYMVASETCAFDLVGAEYIRDVEPGEMLVFEAEGEPRSYKIFEKQPRPCIFEFVYFARPDSRVFGHNVYEVRKNMGQELAREKPIEADMVIPVPDSGVAAAIGYARESGIPFELGIVRNHYVGRTFIEPTQQSRELKVKLKLNPIKELIQGKRLIVIDDSIVRGTTSRQIVRILRAAGAKEVHMKISSPPTISPCYYGVDTPDKSQLICANMTLEETCRFIEADSLSFLSLEGLRRSIQCDERELFCQACFDGKYIV

SEQ ID NO: 30327 - DNA, 1437 bp, Gloeobacter violaceus PCC 7421
  CDS (1)..(1437): transl_table=11
atgacctacgctgcaccctctgctcccgacaagcctgaggaggcttgcggggtcttcggcatcctggcgccgggcgaagccgtcgccaaattgacctacttcggtctgttcgcgctccagcatcgcggccaggagtccgcggggatcgctgtgctcgacggcgaccgtctaacgatgcacaaggacatgggtctggtctcccaggtctttgacgaggcactgctaaacgagctgcaggggcaattggccgtgggccacacccgctactcgaccaccggctccagccgcaaggtaaacgcccagccggtcgtctcccgcacgcgcctcggtccggtcgtcctcgcccacaacggcaacctggtcaacgccgcccagttgcgcgaagagttgctcgcccgcgagcacaccctgctggccaccaccgattccgaagagattgtccacgccatcggcgaggcggtcgacgacggcaagggttgggtcgaggggaccgttcacgccctcaagcgctgccgcggcgccttcagcctggtgatcggcaccccggcggggctgatgggcacccgcgacgccaacggcgtgcgtccgctggtcatcggcaccctcaagggccgctacgtgctcgcgagtgagacctgcgccctcagcatcatcggtgcgaaatacctgcgcgacgtcgagcccggcgaactggtgttcatcaccgaatcgggcctggagtcccaccactgggcgaaacccgaaccgcggatgtgcatctttgagatgatctattttgcccgccccgattcgcgcgtgaacgccgagagcctctacacctaccgcgagcgcctgggcgagatcctcgctcaggaggcccctgtggaggcggacgtcgtcatcccggtccccgactcgggtacccccgccgccatcggctacgcccgcgcctccggcattctcttccagcaaggtctcatcaagaatcactacgtaggccgcacgttcatccaacccacccagacgatgcgcgaggcgggcatcaagatgaagctcaatccgttgcccgacgtcatcgaaggcaagcggatcgtaatcgtcgacgattcgatcgtgcgcggcaccaccagccgcaagattgtccaggccctgcgcgacagcggtgcgcgcgaggtgcacatgcgtatctcctcgcccccggtcacccatccctgtttctacggcatcgacaccgactcgcaggaccagttgattgccgccaccaagagcgtggatgaaattgcccggcacatcgaggtggacagccttgcctacttgagtgtcgaagggatgctcaaggcgacccgcaccgacggccagggcttttgcaccgcctgcttcaccggcgattacccgattccgattcctgatgcgatccgccgcaccaaactggtgctcgaaaaaaccgcagccagctga

SEQ ID NO: 30328 - protein, 478 aa, Gloeobacter violaceus PCC 7421
MTYAAPSAPDKPEEACGVFGILAPGEAVAKLTYFGLFALQHRGQESAGIAVLDGDRLTMHKDMGLVSQVFDEALLNELQGQLAVGHTRYSTTGSSRKVNAQPVVSRTRLGPVVLAHNGNLVNAAQLREELLAREHTLLATTDSEEIVHAIGEAVDDGKGWVEGTVHALKRCRGAFSLVIGTPAGLMGTRDANGVRPLVIGTLKGRYVLASETCALSIIGAKYLRDVEPGELVFITESGLESHHWAKPEPRMCIFEMIYFARPDSRVNAESLYTYRERLGEILAQEAPVEADVVIPVPDSGTPAAIGYARASGILFQQGLIKNHYVGRTFIQPTQTMREAGIKMKLNPLPDVIEGKRIVIVDDSIVRGTTSRKIVQALRDSGAREVHMRISSPPVTHPCFYGIDTDSQDQLIAATKSVDEIARHIEVDSLAYLSVEGMLKATRTDGQGFCTACFTGDYPIPIPDAIRRTKLVLEKTAAS

SEQ ID NO: 30329 - DNA, 1518 bp, Photorhabdus luminescens subsp. laumondii TTO1
  CDS (1)..(1518): transl_table=11
atgtgcggtattgttggtatcgtcggttttacaccggttaaccagtcgatttatgatgcgttgacggtgcttcagcaccgtgggcaagatgctgcgggcattgctactattgatggtaacaatggatttcgtttacgcaaagccaatggcttagtgagagacgtgtttgaagcccggcatatgctgcgtttacagggaacgattgggattggtcatgttcgctatccgacagcgggcagttccagtgcatcggaagctcaaccgttttatgtgaactctccatttggtattacattgacacacaatggtaatttgacgaatgctcatgagttgaagaaaaagttgtttgagaatgcccgtcgccatgtgaatactacgtcagattctgagattttgctcaacgtttttgccagtgaactggattgctcccagcattatccattggtgcctgacaatatttttgcggcagtagcggcaatgcataaacaggtgagtggtgcttatgcctgcattgcgatgattattggtcatgggttagttgctttccgtgatccgcatggtattcgtccgttggttttaggtaagcgcactttggatgatggccgtaatgagtatatggtcgcttctgaaagcgttgcattagatacgctaggctttgaattcctgcgggatgttgcatcaggtgaagcgatttatattactgaacaaggtcagttatttactcgtcaatgtgctgaaaatccttctctgactccctgtttatttgaatttgtctatttggctcgcccagattcctttattgataaaatttcggtttataacgcccgcatacggatggggcataagctaggggcgaaaattgcccgcgaatgggaagacttacatattgatgtggttattccaatccccgaaacatcttgcgatgttgcgttagaaattgcgcgcatactcggtaaaccctatcgtcagggatttgtgaaaaaccgttatgttggccggacatttatcatgcctgggcaacaggaacgccggaaatcagtccgccgtaaattgaatgctaatcgcgcagaattccgtgataaaaatgtgctattggtggatgattctattgtgcgtggtacaacgtcagaacagattgtcgatatggctcgtgaagccggcgcgaagagagtttatcttgcttcggcagcaccggaagtacgtttcccgaatgtttatggcattgatatgcccaatgcaaatgaactgattgctcatgggcgtgaagtggatgaaattcgccaacttattggtgcagatgcattgatatttcaggatttaactgatctgatcgacgctgttcgtgaagaaaacccggatgttgacgggtttgagagttcagtattcaatggtgtttatgttaccaaagacgttgaccagacttatctctattatctggagaatctgcgtaaagacgatgaagtaaaactgaataatcagaatgaagttgaaaatctggatatctataatgaaggttga

SEQ ID NO: 30330 - protein, 505 aa, Photorhabdus luminescens subsp. laumondii TTO1
MCGIVGIVGFTPVNQSIYDALTVLQHRGQDAAGIATIDGNNGFRLRKANGLVRDVFEARHMLRLQGTIGIGHVRYPTAGSSSASEAQPFYVNSPFGITLTHNGNLTNAHELKKKLFENARRHVNTTSDSEILLNVFASELDCSQHYPLVPDNIFAAVAAMHKQVSGAYACIAMIIGHGLVAFRDPHGIRPLVLGKRTLDDGRNEYMVASESVALDTLGFEFLRDVASGEAIYITEQGQLFTRQCAENPSLTPCLFEFVYLARPDSFIDKISVYNARIRMGHKLGAKIAREWEDLHIDVVIPIPETSCDVALEIARILGKPYRQGFVKNRYVGRTFIMPGQQERRKSVRRKLNANRAEFRDKNVLLVDDSIVRGTTSEQIVDMAREAGAKRVYLASAAPEVRFPNVYGIDMPNANELIAHGREVDEIRQLIGADALIFQDLTDLIDAVREENPDVDGFESSVFNGVYVTKDVDQTYLYYLENLRKDDEVKLNNQNEVENLDIYNEG

SEQ ID NO: 30331 - DNA, 1515 bp, Vibrio vulnificus YJ016
  CDS (1)..(1515): transl_table=11
atgtgtggtattgttggaatcgtgggcacaacccctgtaaaccagtcaatttatgacgcgttaacagtgttacagcatcgtggccaagatgccgctggtatttgtaccatagaaagcaatcgttttcgtctgcgtaaggcaaacggtctggtcaaagatgtgtttgaagcaaaacacatgcaacgtcttcaaggcaacgtcggcattggtcatgtacgctatccaacggccggtagttcaagtgcttcagaagcacagcctttctacgttaactcgccatttggcattagcttagcgcacaacggcaacctgactaacgcgcatgaagttcgtcagaaattgttcgaaaaagatcgccgccatgtgaataccacctcagactccgaagttcttcttaacgttcttgctcatgaaattgatacagtaaaaggcaacgttactgccgatgatgtcttccgagccatcgccaatgtccatcgtaccattcgtggtgcttacgccgttacagcgatgatcatcggtcacggtatgattgcctttcgcgacccacatggtattcgtccactttgcttaggtaagcgcgaagagaacggacaaacggaatacatggtggcgtcagaatcagtagcgctggatgcggttggctttgattttgtgcgtgacgtcgcaccaggtgaagcgatttacgcgacttttgacggtgaactctttaccaagcagtgtgctgacaatccaaaactcaacccgtgcatttttgagttcgtttactttgcacgccctgattcgtttatcgacaaaatttctgtctatagtgcgcgagtcgaaatgggtaaaaagttgggtgagcgtattaaagaagagtacgccgatcttgatattgacgttgtcattcccattccagagacctcttgtgatatcgcactgcaaatcgctcaagcgattgataagccgtaccgccaagggtttgttaaaaaccgctatgttggccgtacctttatcatgccgggccagcaattgcgtaaaaaatcggtacgtcgcaagctcaatgccattcgctctgaattcaaagataagaatgtactgttagtggacgactcaattgtacgtggcaccacttctgagcaaattatcgaaatggcgagagactcaggcgcgaagaaagtgtttattgtctctgctgcacccgaggtgcgtttcccgaacgtttacggcattgatatgccaagcgcaactgagcttattgctcatggacgagataacgagacgatctgtaagctgattggtgctgacgcgctgattttccaaaaactggaagatttagtggatgcggtgggcttgggtaaccttgatattaccaagtttgatacttcggtgtttaacggcgaatacgtgacgggtgatattgatcagcaatacctcgatttcctagattcgatgcgtaacgatgatgcaaaggttcagcgcgagattcaacaagatctggctaacctagagttgcataacgaaggtgcgtaa

SEQ ID NO: 30332 - protein, 504 aa, Vibrio vulnificus YJ016
MCGIVGIVGTTPVNQSIYDALTVLQHRGQDAAGICTIESNRFRLRKANGLVKDVFEAKHMQRLQGNVGIGHVRYPTAGSSSASEAQPFYVNSPFGISLAHNGNLTNAHEVRQKLFEKDRRHVNTTSDSEVLLNVLAHEIDTVKGNVTADDVFRAIANVHRTIRGAYAVTAMIIGHGMIAFRDPHGIRPLCLGKREENGQTEYMVASESVALDAVGFDFVRDVAPGEAIYATFDGELFTKQCADNPKLNPCIFEFVYFARPDSFIDKISVYSARVEMGKKLGERIKEEYADLDIDVVIPIPETSCDIALQIAQAIDKPYRQGFVKNRYVGRTFIMPGQQLRKKSVRRKLNAIRSEFKDKNVLLVDDSIVRGTTSEQIIEMARDSGAKKVFIVSAAPEVRFPNVYGIDMPSATELIAHGRDNETICKLIGADALIFQKLEDLVDAVGLGNLDITKFDTSVFNGEYVTGDIDQQYLDFLDSMRNDDAKVQREIQQDLANLELHNEGA

SEQ ID NO: 30333 - DNA, 1482 bp, Corynebacterium diphtheriae NCTC 13129
  CDS (1)..(1482): transl_table=11
ttgacagaccttgacgaccgcggcgaacagtctccgcgcgaggaatgtggcgtttttggtgtgtgggctccaggcgaagaagtatccaagctcacctattttggacttttcgccctgcagcaccgtggacaagaagctgcgggaatcgccgtaggtgacggcgatcaagtcgtggtatttaaagacttggggcttgtgtcccaggtgtttgacgaacctaccttggaatccctcagcggagacgtggccatcggccacacccgctattccaccgcaggtggagtgatgtgggaaaactcccaaccaatgttccgtgtaaccccagaaggaaccgatgtggcgctgtgccacaacggcaatctggtgaactacctcgagctcatggcagaagccgccgagcacgatttggtaaaacctgacactgagccctccgattccgatgtgatgacagccctgctggcacacggagtatcggagggtacatctttgcttgattccgcccgagcactcctgccgcgtatgcgtggtgcgttctgcttgacctttaccgatggtcacaccatgtatgctgctcgtgacccatggggcgttcgccctctcgtactgggtcgtctcgagcgcggctgggtggttgcctcagaaacgtgtgcactcgacatcgtgggtgcgtcgtttgttcgcgagatcgagccaggtgagctcgttgctatcgacggcgccggcatccgtagcgaacgttttgcacaaccgcaacgcaaaacctgtgtttttgagtatgtgtaccttgctcgcccagactccacaatccacggccgcaacgtcaacgcaacccgtatggagatcggacgaaggctagcacaggaatcgcctatcgacggcgaccttgtcatcccagtcccagaatccggcaaccccgctgcggtgggttacgcccaagaatcgaagattcctttcggtcaaggattggtgaaaaacgcctacgttggccgcacctttattcagccgtcgcaaaccctgcgccagctgggtattcgcctcaagctcaacccgctgcgtgaggtaatccaaggaaagcgcctgatcgttgtagatgattccattgtgcgtggcaacacccagcgagccctgatccgcatgctgcgtgaagccggtgccgccgaggttcacgtgcgtatcgcctcgccacctgtgaagtggccatgcttctacggcatcgactttgcaagccccggcgaactgatcgccaacgctgtcaccggcgataacgaagccgaggttgtacagtcagtctgtaccgcccttggcgcagattctttgggatacgcctctaccgacgccatgatcgaagccactcagcagtcccgcgccgaactatgttgtgcatgtttcgacggcgaataccccatcggtatgcctgccggaaacaagaacgcagagcttgtttctgcgatgaaacgcagctcgtgcgcaagcctcgactaa

SEQ ID NO: 30334 - protein, 493 aa, Corynebacterium diphtheriae NCTC 13129
MTDLDDRGEQSPREECGVFGVWAPGEEVSKLTYFGLFALQHRGQEAAGIAVGDGDQVVVFKDLGLVSQVFDEPTLESLSGDVAIGHTRYSTAGGVMWENSQPMFRVTPEGTDVALCHNGNLVNYLELMAEAAEHDLVKPDTEPSDSDVMTALLAHGVSEGTSLLDSARALLPRMRGAFCLTFTDGHTMYAARDPWGVRPLVLGRLERGWVVASETCALDIVGASFVREIEPGELVAIDGAGIRSERFAQPQRKTCVFEYVYLARPDSTIHGRNVNATRMEIGRRLAQESPIDGDLVIPVPESGNPAAVGYAQESKIPFGQGLVKNAYVGRTFIQPSQTLRQLGIRLKLNPLREVIQGKRLIVVDDSIVRGNTQRALIRMLREAGAAEVHVRIASPPVKWPCFYGIDFASPGELIANAVTGDNEAEVVQSVCTALGADSLGYASTDAMIEATQQSRAELCCACFDGEYPIGMPAGNKNAELVSAMKRSSCASLD

SEQ ID NO: 30335 - DNA, 1530 bp, Rhodopseudomonas palustris CGA009
  CDS (1)..(1530): transl_table=11
atggacgcgatgctcagctcttccgacgacgccgcaacgcccgcttcggacgctcgcgaccaacacatcctcgacgataccgttttcgataccgatggtgacacgctgcgcgaagagtgcggcgtgttcggcattttcggacaccccgatgccgccgcgatcaccgcgctcggcctgcacgccctgcagcaccgcggtcaggaagccgccggcatcgtctcgttcgacaacggccggtttcattccgagcgccgcctcggcctggtcggcgacaccttctcccgcgccgacgtaatcgcgcggctgccgggcaattcggcgatcggccacgtccgctattcgaccaccggcgagaccattctgcgcaacgtgcagccgctgttcgccgagctcaatgccggcggcttcgcggtcggtcacaacggcaacctcaccaacggcctcaccctgcgccgtgagctgatccgcagcggcgcgatcatgcagtcgaccaccgacaccgaagtgatcctgcatctggtcgcgcactccaagaagacccgcttcatcgagcgcttcatcgagtcgctccgcgctctggaaggcgcctactcgctggtgtcgctgaccaacaagaagctggtcggcgcccgcgatccgctcggcatccgcccgcttgtgctcggcgaactcgacggctgcccgatcctggcgtcggagacctgtgcgctcgacatcatcggcgcgcattacgtccgcgacgtcgaacccggcgaagtcatcgtgttcgaccgacacggcgtcaccagccacaagccgttcccgccgcagccgccccgcccctgcatcttcgagtacatctacttcgcgcgcccggattcggtggtcggcggccgttcggtgtacgacgtccgcaaggcgttcggcgcccagctcgcgctcgagagccacgtcgaatccgacgttgtcgtcccggtgccggattccggcgttccggcggcgatcggctattcgcggcagtcgggcgtgccgttcgaactcggcatcatccgcaaccactatgtcggccgcaccttcattcagccgacccagagcgtgcgcgaactcggcgtgcggatgaagcactcggcgaaccgcgccgcgatcgaaggcaagcggatcgtgctgatcgacgacagcctcgtccgcggcacgacctcgaagaagatcgtgaagatgatgcgcgatgccggcgcccgcgaggtgcatttccgcatcgcctcgccgccgatcacccacccggactactacggcatcgacaccccggaccgcgccggcctgctggccgcgacgcattcgctcgaagagatgcgcgacctgatcggcgccgacacgctcgccttcctgtcggtcgatggcatctatcgcgcgatgggcgaaccgggccgcgatccggcgttgccgaagttcaccgaccactgctttaccggtgactatccgaccggcctcaccgatctcaatcagaccgagtcggcgccgcggcaattgtcgctgctggccgaggcgagctga

SEQ ID NO: 30336 - protein, 509 aa, Rhodopseudomonas palustris CGA009
MDAMLSSSDDAATPASDARDQHILDDTVFDTDGDTLREECGVFGIFGHPDAAAITALGLHALQHRGQEAAGIVSFDNGRFHSERRLGLVGDTFSRADVIARLPGNSAIGHVRYSTTGETILRNVQPLFAELNAGGFAVGHNGNLTNGLTLRRELIRSGAIMQSTTDTEVILHLVAHSKKTRFIERFIESLRALEGAYSLVSLTNKKLVGARDPLGIRPLVLGELDGCPILASETCALDIIGAHYVRDVEPGEVIVFDRHGVTSHKPFPPQPPRPCIFEYIYFARPDSVVGGRSVYDVRKAFGAQLALESHVESDVVVPVPDSGVPAAIGYSRQSGVPFELGIIRNHYVGRTFIQPTQSVRELGVRMKHSANRAAIEGKRIVLIDDSLVRGTTSKKIVKMMRDAGAREVHFRIASPPITHPDYYGIDTPDRAGLLAATHSLEEMRDLIGADTLAFLSVDGIYRAMGEPGRDPALPKFTDHCFTGDYPTGLTDLNQTESAPRQLSLLAEAS

SEQ ID NO: 30337 - DNA, 1404 bp, Geobacter sulfurreducens PCA
  CDS (1)..(1404): transl_table=11
atgatgaagctctacagaccaacggaagagtgcggcattttcggtatctacggccaccctgaggcggccaatctgacgtacctgggcctttacgcccttcagcaccggggacaggaagcctgcggcatcgtctcctcggacggccgcagcctctacacccaccggagcatggggcttgtggcggatgtcttcggcaatcaggaaatcttcggcaatcttcccggtgaatccgccatcgggcacgtgcgctactccaccaccggcgactcggtcctcaagaacgtgcagcccatcaaggtcgactactccaggggctccattgccattgcccacaacggcaacctggtgaacgcccagtacatcaaggacgagttggaggcctggggttccattttccagaccactatggacacggaggtgatcctccacctgctggccacttccaagcatagttccctggaggaccggatcatcgatgccctcgggcggatcaagggggcctactgtcttctgttcctgacggaaacccgcatggtggctgcccgcgatccccacggcttccgccccctctgtctcggcaagctcggcgatgcctgggtggttgcgtccgagagctgtgccttggacctgatcgaggccgaatttgtcagggagatcgagccgggcgagatcgtggtcattaccaaggacgggctcacctcccattttccgcataagaagatcgaaccggctccttgtattttcgagttcgtctacttcgctcgcccagattcgtacatcttcggcaagaacgtctaccaggtacgcaaggacttcgggcgccaactctgccgcgagcaccgcatcgatgccgatatcgtcatcccggttcccgattcgggtgttcccgcagccctgggttatgcccaggaggcgggtattccctttgagctcgggcttatccgcaaccattacgtgggccgtaccttcattgagccccagcagtcgatccggcattttggtgtcaagatcaagctcaatccggtgcgggaggtgctgaagggaaagcgggtggtggtcatcgacgactctatcgtcagaggcaccacgtcccgcaagatcgtgaaaatggtacgcaacgccggcgcatccgaggttcacgttcgcatctcgtcgccccccacgagctatccatgctactacggcattgacacccccacccgcaaagaacttatctcctcgtcccataccatcgaggaaatccgcaagtacataaccgccgattcactgggctacctttcggaggaagggctgctccaggccgtgggcgccggcagcaatcccttctgcaaagcctgtttctccggcggctacccgatcacattcccgcgcctcatggccgaaccccaactggatcttttctga

SEQ ID NO: 30338 - protein, 467 aa, Geobacter sulfurreducens PCA
MMKLYRPTEECGIFGIYGHPEAANLTYLGLYALQHRGQEACGIVSSDGRSLYTHRSMGLVADVFGNQEIFGNLPGESAIGHVRYSTTGDSVLKNVQPIKVDYSRGSIAIAHNGNLVNAQYIKDELEAWGSIFQTTMDTEVILHLLATSKHSSLEDRIIDALGRIKGAYCLLFLTETRMVAARDPHGFRPLCLGKLGDAWVVASESCALDLIEAEFVREIEPGEIVVITKDGLTSHFPHKKIEPAPCIFEFVYFARPDSYIFGKNVYQVRKDFGRQLCREHRIDADIVIPVPDSGVPAALGYAQEAGIPFELGLIRNHYVGRTFIEPQQSIRHFGVKIKLNPVREVLKGKRVVVIDDSIVRGTTSRKIVKMVRNAGASEVHVRISSPPTSYPCYYGIDTPTRKELISSSHTIEEIRKYITADSLGYLSEEGLLQAVGAGSNPFCKACFSGGYPITFPRLMAEPQLDLF

SEQ ID NO: 30339 - DNA, 1656 bp, Mycobacterium avium subsp. paratuberculosis K-10
  CDS (1)..(1656): transl_table=11
ctgaagtgcaggtttaccccggcgggccgggatttcgccggtcaacacgcccggcggattcggcggcgcggccgcgctgcccgtagactccgttacgtcaccaaccgttccccggggagccgcccaatcgtgaccgtcgccgaacccgagcaggacttcaacgcaccccgcgaggaatgcggtgtattcggggtctgggccccgggcgaggaagtcgccaaactcacctactacggcctctacgcgctgcagcatcgcgggcaggaggccgccggcatcgccgtcgccgacggatcccaagtgctggtgttcaaggacctgggcctggtcagccaggtgttcgacgagcagacgctggccgcgatgcagggccacgtcgccatcgggcactgccgctactccaccaccggcgacaccacctgggagaacgcccagccggtgttccgcaacaccgccgcgggcaccggggttgccttggggcacaacggaaatctggtcaacaccgccgagctggccgcgcgggcccgcgacgcggggctgatcgccaagcgcgcgccggccccggcgaccaccgactccgacatcctgggcgcgctgctggcgcacggcgccgccgactccacgttggagcaggccgcgctggacctgctgccgacggtgcgcggcgccttctgtctgaccttcatggacgagaacacgctctatgcgtgccgcgatccgcatggggtgcggccactttcgctgggacggctggaccgcggctgggtggtggcctccgagaccgccgcgctcgacatcgtcggcgcctcgttcgtgcgcgacatcgaaccgggcgaactgctggcgatcgacgccgacggggtgcgctccacccggttcgccaatcccacccccaagggctgcgtcttcgagtacgtctatttggcgagaccggacagcaccatcgccggccggtccgtgcacgccacccgggtcgagatcggccggcggctggcccgggaacgccccgtcgaggccgacctggtgatcggggtgcccgagtcgggcacccccgccgccgtcggctacgcccaggaatccggcatcccctacgggcaggggctgatgaagaacgcctacgtggggcgcaccttcatccagccgtcgcagaccatccgtcaactcggtatccggctcaagctcaacccacttcgcgaggtgatccgcggcaaacggctcatcgtcgtcgacgactccatcgtgcgcggcaacactcagcgggcgctgctgcggatgctgcgcgaggccggcgccgtcgaggtgcacgtgcgcatcgcgtcaccgccggtcaaatggccctgcttctacggcatcgacttcccgtcgccggccgaactgatcgccaacgcggtcgaggacaaacacgagatgctcgaggcggtgcggcacgccatcggcgccgactcgctgggctacatctcgctgcgtggcctgatcgcagcctccgagcagccggcgtcgcggctgtgcaccgcctgcttcgacggccagtacccgatcgaactgcccggcgagacggcgttgggcaagaacgtcatcgagcacatgctcgccaacgcggcccggggcgccgggctcgacgacctggcggccgacgaagtgcccgtcgtccactga

SEQ ID NO: 30340 - protein, 551 aa, Mycobacterium avium subsp. paratuberculosis K-10
MKCRFTPAGRDFAGQHARRIRRRGRAARRLRYVTNRSPGSRPIVTVAEPEQDFNAPREECGVFGVWAPGEEVAKLTYYGLYALQHRGQEAAGIAVADGSQVLVFKDLGLVSQVFDEQTLAAMQGHVAIGHCRYSTTGDTTWENAQPVFRNTAAGTGVALGHNGNLVNTAELAARARDAGLIAKRAPAPATTDSDILGALLAHGAADSTLEQAALDLLPTVRGAFCLTFMDENTLYACRDPHGVRPLSLGRLDRGWVVASETAALDIVGASFVRDIEPGELLAIDADGVRSTRFANPTPKGCVFEYVYLARPDSTIAGRSVHATRVEIGRRLARERPVEADLVIGVPESGTPAAVGYAQESGIPYGQGLMKNAYVGRTFIQPSQTIRQLGIRLKLNPLREVIRGKRLIVVDDSIVRGNTQRALLRMLREAGAVEVHVRIASPPVKWPCFYGIDFPSPAELIANAVEDKHEMLEAVRHAIGADSLGYISLRGLIAASEQPASRLCTACFDGQYPIELPGETALGKNVIEHMLANAARGAGLDDLAADEVPVVH

SEQ ID NO: 30341 - DNA, 1386 bp, Wolbachia endosymbiont of Drosophila melanogaster
  CDS (1)..(1386): transl_table=11
atgctagatgaaatgcgtgaggaatgtggggtatttggcataagttgcaaccaaagtgctgcttttaactctatacttgctctccacgctttgcagcatagaggtcaagagtcttttggcgtagtaaccagtaacaacgataagctgcactcttatcactttcaaggtcaagtgagcagcgtatttgatgatatagatgaaataaagaaatccttacctggagattgtgcaataggtcatgttcgatactcaacaagtggtaataagtttggagtgcagcccatgtttagcaaaagtggcaaatttggggatttcgccatagcacataatggtaatttaattaatatttctccgatacgcgaacaattgattaaacaagagtgcgtttttcagtcagatattgatacagaagtagtagtgcatctgacagcaagcggtgaaaaagatagctttttagagagttttatatatgcattaaagcaaatacaaggtgcttattcttttgttgcaatcaatcaagaagtagttattggagtacgtgattcatctggaatcaggcctcttgttttaggaaagttaaacggttcttacgttcttgcatctgaaacttgtgctcttgatataataaatgcagagtttgttagagaaatagaaccaggcgaattagttaccatcagttcgggtagtaagctagcctcaatgtttcctttcccacagcaaaaatcaagtttttgtatttttgaatacgtttatttttcaagaccagacagcataatggagaataggtctatatacgatacaagaaaagaaataggaagaatacttgcagaagagagcccaccaaaaaacaatgtagatatggttgtaccaatacctgattctggaatacctgcagctattggatatgcaaagcattcaggattacctatggaactgggaataattcgtaatcattacataggaagaacttttatacaaccaaccgctgaagtacgtaaagttagaataaaattaaaattcaatgctaataagcacactttgaaaggtaaaaacataattttaatagatgatagtatagtgcgtggtagtacgttaacaaatataatagttatgctaaaggatgcaggagtaaaagagattcacctcaaaatttcaagcccaccaattaagcattcttgtttttatggaatagatacgccagagtgcaaagatttaattgctgcaaataaatctgtagaggaaattaaggaagttataggagtagatagcctagccttcttgagtattgatggattatatcaggctgttaaaggagaagtgcgtaacaatgctacaccacaatattgtgatgcttgtttcactggtgattatccaattggcaaatag

SEQ ID NO: 30342 - protein, 461 aa, Wolbachia endosymbiont of Drosophila melanogaster
MLDEMREECGVFGISCNQSAAFNSILALHALQHRGQESFGVVTSNNDKLHSYHFQGQVSSVFDDIDEIKKSLPGDCAIGHVRYSTSGNKFGVQPMFSKSGKFGDFAIAHNGNLINISPIREQLIKQECVFQSDIDTEVVVHLTASGEKDSFLESFIYALKQIQGAYSFVAINQEVVIGVRDSSGIRPLVLGKLNGSYVLASETCALDIINAEFVREIEPGELVTISSGSKLASMFPFPQQKSSFCIFEYVYFSRPDSIMENRSIYDTRKEIGRILAEESPPKNNVDMVVPIPDSGIPAAIGYAKHSGLPMELGIIRNHYIGRTFIQPTAEVRKVRIKLKFNANKHTLKGKNIILIDDSIVRGSTLTNIIVMLKDAGVKEIHLKISSPPIKHSCFYGIDTPECKDLIAANKSVEEIKEVIGVDSLAFLSIDGLYQAVKGEVRNNATPQYCDACFTGDYPIGK

SEQ ID NO: 30343 - DNA, 1464 bp, Treponema denticola ATCC 35405
  CDS (1)..(1464): transl_table=11
atgagcaaggatgatatttttaaatcgagtttaggggaagaatgcgggatcgcagctgtctgggattcaaactcctataagacggaaaatcccgaaaggctgcctttcaggccggatgacgctgcccgctcggttttttatgctcttttttctcttcaacacaggggacaagaagcggccggaatggctgtttcaaacggaaaacatatccgagtcttcaaaaaaccgggccttgtttccaacatttttaccgaacacgatatatcgaatctccaaggttatgctgccatcggccacacccgctactcgactaccggttcttcttcttttggaaatatccagcccttttatatagaaacaatgtacgggcctatagcccttgctcataacggaaaccttgtaaacgccccgcatttaaggcaaaaacttttggaaagaggggtggggctttcttctacctccgataccgaagttatgattatgatgcttgccgctgccaaaggcgattcttgggcggagcgtatagcttcatgtatgagagaatgggaaggagctttttcgattgccgttttaacggttgaaggaatttacatagccagagacccttggggcttcagacctctttgtgtcggaagttttcaggaaggggtatcggttgcggcaagcgaatcttgtgctcttttaacattgggctgtagggatgttactgaggtaaaagccggtgagattctaaagcttgtcgataacggagccgagctttgtatgcgcattccgcctaaggagcctctttctccatgtatttttgagtatgtctattttgcccgccccgactcggtttggaacaatgcttcggttcacgtatcccgtgtaaatttcggcaaggagcttgcaaaaagctccccagttgaggccgacatagttatagctattcccgattcgtcccgttcggcagccataggctactctcaagaatcgggcattccctatgatgagggtttttcaaaaaaccgctacataggacgcacctttattcagcctacccaaaaattgcgtgaccaaggcgttgcgatgaaattcaatgttctctctgaagctgtcgaaggaaaacgcatcgtagtggtcgatgacagtattgtccgcggaagcaccatgggacccttaatcaaaatgcttaggggagcaggtgcaaaagaagttcatatcagaatatcttctcctccggtacgatactcctgttttatgggtgtagatatgggagaccctgaaaacctcatcgcccacaaaaaatcggttgaagaaatcagggaacacatcggtgcagactccttagtctatctatcccaagaaagtatgctcaaggcgatgaaggatgccggagcaaacacccacttttgctgtgcctgctttgacggaaagtaccccgtcgatgtcagcggcgccgccgataaaaacagctttgagtaa

SEQ ID NO: 30344 - protein, 487 aa, Treponema denticola ATCC 35405
MSKDDIFKSSLGEECGIAAVWDSNSYKTENPERLPFRPDDAARSVFYALFSLQHRGQEAAGMAVSNGKHIRVFKKPGLVSNIFTEHDISNLQGYAAIGHTRYSTTGSSSFGNIQPFYIETMYGPIALAHNGNLVNAPHLRQKLLERGVGLSSTSDTEVMIMMLAAAKGDSWAERIASCMREWEGAFSIAVLTVEGIYIARDPWGFRPLCVGSFQEGVSVAASESCALLTLGCRDVTEVKAGEILKLVDNGAELCMRIPPKEPLSPCIFEYVYFARPDSVWNNASVHVSRVNFGKELAKSSPVEADIVIAIPDSSRSAAIGYSQESGIPYDEGFSKNRYIGRTFIQPTQKLRDQGVAMKFNVLSEAVEGKRIVVVDDSIVRGSTMGPLIKMLRGAGAKEVHIRISSPPVRYSCFMGVDMGDPENLIAHKKSVEEIREHIGADSLVYLSQESMLKAMKDAGANTHFCCACFDGKYPVDVSGAADKNSFE

SEQ ID NO: 30345 - DNA, 1416 bp, Bacillus cereus ATCC 10987
  CDS (1)..(1416): transl_table=11
atgcttgctgaaataaaggggttaaacgaagaatgtggcgttttcggaatttgggggcatgaaaatgcggcacaagtttcatattacggattgcacagtttacagcaccgtgggcaagaaggcgcaggcattgtcgtaaataatggagaaaaaatcgtcggtcacaaggggttaggtttaatatcggaagtgttttcaagaggagagctagaaggattgaacgggaaatcagcaatcggacacgtacgatacgcgacggctggtggaagtgaagtggctaacgttcaaccattactattccgtttttctgatcatagtatggcattagctcataacgggaatttaattaatgcaaaaatgcttcgccgcgaattagaggcagagggaagtatttttcaaacaagttcagatacagaagtacttttacaccttattaaacgtagtacgaaaggttcgttaattgaaagtgtaaaagaagctctaaataaagtgaaaggtgcgtttgcatatcttttactaactggaaatgaaatgattgttgcgctagatccaaatggattccgtcccctttcaattggaaagatgggagatgcttacgttgtagcatcagaaacatgtgcttttgatgtagtaggtgcaacatacattcgtgatgtagaaccgggtgaattacttatcattaatgatgatggaattcacgtagatcgttttacaaatgatgtagaacatgcaatttgcagtatggaatacatttacttcgcacgcccagattcaaatatcgctggtgttaacgtccatgcagcacgtaaaaacatggggaaacgtttggcggcagaagctcctattgaagctgatgttgttactggtgtaccagactctagcatttcagcagcaattggttatgcggaggcgacaggtattccatatgagttaggattaattaaaaatcgttacgttggacgtacgtttattcaaccttctcaggaactgcgagagcaaggggttaagatgaagctttcagcagtaagaggtgtagttgaaggaaaacgagttgttatgattgatgattctatcgtacgaggaacaacgagtaaacgaattgttcgtatgcttcgcgaggctggagcgacagaagttcacgtaagaatagcttcaccacctttgaaatatccatgtttctatggcattgatattcaaacgagaaaagaattaattgcagcaaatcatacggtagaagaaattcgtgaaatgatcggtgcagactcattaacatttttaagtgaagatggattagtagatgcaattggacgtccatatgaagggaaatacggtggcctatgtatggcgtacttcaatggagattatccaacagctctttatgattatgagcaagagcttttagaaagtatgaaataa

SEQ ID NO: 30346 - protein, 471 aa, Bacillus cereus ATCC 10987
MLAEIKGLNEECGVFGIWGHENAAQVSYYGLHSLQHRGQEGAGIVVNNGEKIVGHKGLGLISEVFSRGELEGLNGKSAIGHVRYATAGGSEVANVQPLLFRFSDHSMALAHNGNLINAKMLRRELEAEGSIFQTSSDTEVLLHLIKRSTKGSLIESVKEALNKVKGAFAYLLLTGNEMIVALDPNGFRPLSIGKMGDAYVVASETCAFDVVGATYIRDVEPGELLIINDDGIHVDRFTNDVEHAICSMEYIYFARPDSNIAGVNVHAARKNMGKRLAAEAPIEADVVTGVPDSSISAAIGYAEATGIPYELGLIKNRYVGRTFIQPSQELREQGVKMKLSAVRGVVEGKRVVMIDDSIVRGTTSKRIVRMLREAGATEVHVRIASPPLKYPCFYGIDIQTRKELIAANHTVEEIREMIGADSLTFLSEDGLVDAIGRPYEGKYGGLCMAYFNGDYPTALYDYEQELLESMK

SEQ ID NO: 30347 - DNA, 1533 bp, Eremothecium gossypii
  CDS (1)..(1533)
atgtgtggcatattaggcgttgtgctagccgatcagtcgaaggtggtcgcccctgagttgtttgatggctcactgttcttacagcatcgcggtcaagatgctgccgggattgctacgtgcggccccggtgggcgcttgtaccaatgtaagggcaatggtatggcacgggacgtgttcacgcaagctcggatgtcagggttggttggctctatggggattgcacacctgagatatcccactgcaggctccagtgcgaactcagaagcgcagccattctatgtgaatagtccctacggaatttgcatgagtcataatggtaatctggtgaacacgatgtctctacgtagatatcttgatgaagacgttcaccgtcatattaacacggacagcgattctgagctactgcttaatatatttgccgcggagctggaaaagtacaacaaatatcgtgtgaacaacgatgatatattttgtgctctagagggtgtttacaaacgttgtcgcggtggctatgcttgtgttggcatgttggcgggatatggattgtttggtttccgggaccccaatgggatcaggccgctattgtttggtgagcgcgtcaacgatgacggcaccatggactacatgctagcgtccgaaagtgtcgttcttaaggcccaccgcttccaaaacatacgtgatattcttcccggccaagccgtcattatccctaaaacgtgcggctccagtccaccagagttccggcaggtagtgccaattgaggcctacaaaccggacttgtttgagtacgtgtatttcgctcgtgctgacagcgttctggacggtatttccgtttaccatacacgcctgttgatgggtatcaaacttgccgagaacatcaaaaaacagatcgatctggacgaaattgacgttgttgtatctgttcctgacactgcacgtacctgtgcattggagtgtgccaaccatttaaacaaaccttatcgcgaaggatttgtcaagaacagatatgttggaagaacatttatcatgccaaaccaaaaagagcgagtatcttctgtgcgccgcaagttgaacccaatgaactcagaatttaaagacaagcgcgtgctgattgtcgatgattccattgtgcgaggtaccacttccaaagagattgttaacatggcgaaggaatccggtgctgccaaggtctactttgcctctgcagcgccagcaattcgtttcaatcacatctacgggattgacctagcagatactaagcagcttgtcgcctacaacagaactgttgaagaaatcactgcggagctgggctgtgaccgcgtcatctatcaatctttggatgacctcatcgactgttgcaagacagacatcatctcagaatttgaagttggagttttcactggtaactacgttacaggtgttgaggatgtgtacttgcaggaattagaacgttgccgcgctcttaataactcgaataagggtgaagcgaaggccgaggttgatattggtctctacaattctgccgactattag

SEQ ID NO: 30348 - protein, 510 aa, Eremothecium gossypii
MCGILGVVLADQSKVVAPELFDGSLFLQHRGQDAAGIATCGPGGRLYQCKGNGMARDVFTQARMSGLVGSMGIAHLRYPTAGSSANSEAQPFYVNSPYGICMSHNGNLVNTMSLRRYLDEDVHRHINTDSDSELLLNIFAAELEKYNKYRVNNDDIFCALEGVYKRCRGGYACVGMLAGYGLFGFRDPNGIRPLLFGERVNDDGTMDYMLASESVVLKAHRFQNIRDILPGQAVIIPKTCGSSPPEFRQVVPIEAYKPDLFEYVYFARADSVLDGISVYHTRLLMGIKLAENIKKQIDLDEIDVVVSVPDTARTCALECANHLNKPYREGFVKNRYVGRTFIMPNQKERVSSVRRKLNPMNSEFKDKRVLIVDDSIVRGTTSKEIVNMAKESGAAKVYFASAAPAIRFNHIYGIDLADTKQLVAYNRTVEEITAELGCDRVIYQSLDDLIDCCKTDIISEFEVGVFTGNYVTGVEDVYLQELERCRALNNSNKGEAKAEVDIGLYNSADY

SEQ ID NO: 30349 - DNA, 1380 bp, Methanococcus maripaludis S2
  CDS (1)..(1380): transl_table=11
atgtgtggtatctttggaatttattctcatgaaaaaagtaacattgtaaaaaaagtgtactatggtctttacgcacttcaacacagggggcaagagggtgctggaattgctgttgggaacggtaaagaaataggattctataagggattgggattggttccagaagtattttcaaacaaggaattacaaaatttgtacggacacattggcgttggccatgtaaggtactctacaaccggcagaaatacaattgaaaactgtcagccatttgttgtaaacagttcttttggaaaaattgcaattactcacaatggggatattgtaaattcaaaagaattaaaacatgaactcgaaaaaaagggacatatctttgtttctacaacagattccgaagttattgctcaacttttggttcgagaacttttaaaaaatgatgacattattactgcagttacaaacgtgacgcaaaaattaaatggtgcttactctcttttaattatctatgacgatacattgattgcaataagggatccaaacggatttaagccgttatgcattggaaaagatgacggagcatactattttagttccgaaagctgtgctcttgacattgttgatgttgaatttgaaagggacgttgctcctggagaaatggttgtcgtagataaaaatggacttaacacctacaaactaccaaatgcaaaagaaaaagcatcttcctgcatgtttgaatacgtttattttgcaagacctgattcagtaattgatggagtaagcgtttacgaagtaagaagaaacattggaaaaattttagcaagggaagctcctgaagaagttgatattgtatccccagttcctgattctggaattattttttcgcaaggatacaccgaagaagcagaagttccttactacgaagctttaattaaaaataggtatattggaagaacatttatccttccaacgcaggaagaacgagatcttgcggtaagattgaagttaaaccctgtaaaataccttttaaaagataaaaaggtcatgttgattgatgacagtattgttcgtggaactacatctggaaaaataatgaagatggctaaaaaagcgggtgcaaaaaaggttcacttaagaatcggatccccaagaattatttcaccatgtttttatggaatagacatggctacaacaaaggaattaattgcaaactcaaaaactgacgaagaaatagctgaaatgatcggtgcagattcagttgcatatttaagtattgaaggattagtcgaagcaattggaagagatgacctttgtttagcatgtttaaacgaagaatatccaacagacgtttcctgtaaatttgaatgcggaaattgcaaaaaataa

SEQ ID NO: 30350 - protein, 459 aa, Methanococcus maripaludis S2
MCGIFGIYSHEKSNIVKKVYYGLYALQHRGQEGAGIAVGNGKEIGFYKGLGLVPEVFSNKELQNLYGHIGVGHVRYSTTGRNTIENCQPFVVNSSFGKIAITHNGDIVNSKELKHELEKKGHIFVSTTDSEVIAQLLVRELLKNDDIITAVTNVTQKLNGAYSLLIIYDDTLIAIRDPNGFKPLCIGKDDGAYYFSSESCALDIVDVEFERDVAPGEMVVVDKNGLNTYKLPNAKEKASSCMFEYVYFARPDSVIDGVSVYEVRRNIGKILAREAPEEVDIVSPVPDSGIIFSQGYTEEAEVPYYEALIKNRYIGRTFILPTQEERDLAVRLKLNPVKYLLKDKKVMLIDDSIVRGTTSGKIMKMAKKAGAKKVHLRIGSPRIISPCFYGIDMATTKELIANSKTDEEIAEMIGADSVAYLSIEGLVEAIGRDDLCLACLNEEYPTDVSCKFECGNCKK

SEQ ID NO: 30351 - DNA, 1527 bp, Xenopus tropicalis
  CDS (1)..(1527)
atggagtttgaggagctggggatacgggaggagtgcggtgtgttcggctgcatagcggcggggagctggcctacccagctggatgtgccccatgtcatcaccctgggattggttggactgcagcacaggggacaagagagtgctggcattgtaacaagtgatgggagctcggtgccaacatataaaatgcacaagggcatgggtatggttaaccacgtgttcagtgaagagagtctgaagaaattgcacatgagtaacctgggtattggccacaccagatactccaccagtgggaattctgccttagaaaactgccagccctttgtggttgaaacgttacatggaaagattgctgtagcacataatggggagctggtcaatgctgctcggctcaagcgaaaggtcatgcgtcacggcgtgggcctctccaccagttcagacagtgagctgatcacacagctgctggccttcactccgccacaggaggaagatcacactgctgattggattgcacgcattagaaacttaatgaatgagacaccgacatcatactcgctgcttgtcatgcataatgacgtcatatatgccatacgtgatccttatgggaaccggcctctctgcattgggcgcctgatgcctgtcaacaatgaaggaagaggaaagcgctctgctgagactgagggctgggtggtgtcatccgaatcctgcagctttttatctattggtgctgagtattaccgggaaatcctgccaggagaaatcgtaaagatttcaagagaaggagttcagaccctggatattgtgccgagaacaaatggagacccatctgccttctgcatctttgaatatgtctattttgcacgacctgattcaatttttgaagggcagatggtgtattcggtgagacggagatgtgggcagcagctagccatagaagctccagtagaagctgatctggtcagcacagtgccagaatctgcaaccccagcagcattaggctatgcagaaaagtgtggtcttcagtatgtggaggtgctgtgtaagaatcgctatgtaggacgaacgtttatccagcccaatatgaggttacggcagctgggagtggccaaaaagtttggagtcctctcagataactttgttggcaagcgagtggttctgattgatgattctattgtgagagggaatacgatctcccctatcataaagctgctcagggactctggagccaaagaggttcacattcgagtagcatcgccacctataaaatatccatgttacatgggaataaatattcccacaaaagaggagttgatagcaaatagaccagagtttaatgacttggctggttatattggtgcagacagtgttgtttacctctcagtggagggacttacggcggcggtccgggagggtgtcaaggccttcaaggatgagcagaatggaataaacggcaaaacaaaatcatcatctcatggtcactgcaccgcctgtctcacaggagaatatccagtggagctggagtggtga

SEQ ID NO: 30352 - protein, 508 aa, Xenopus tropicalis
MEFEELGIREECGVFGCIAAGSWPTQLDVPHVITLGLVGLQHRGQESAGIVTSDGSSVPTYKMHKGMGMVNHVFSEESLKKLHMSNLGIGHTRYSTSGNSALENCQPFVVETLHGKIAVAHNGELVNAARLKRKVMRHGVGLSTSSDSELITQLLAFTPPQEEDHTADWIARIRNLMNETPTSYSLLVMHNDVIYAIRDPYGNRPLCIGRLMPVNNEGRGKRSAETEGWVVSSESCSFLSIGAEYYREILPGEIVKISREGVQTLDIVPRTNGDPSAFCIFEYVYFARPDSIFEGQMVYSVRRRCGQQLAIEAPVEADLVSTVPESATPAALGYAEKCGLQYVEVLCKNRYVGRTFIQPNMRLRQLGVAKKFGVLSDNFVGKRVVLIDDSIVRGNTISPIIKLLRDSGAKEVHIRVASPPIKYPCYMGINIPTKEELIANRPEFNDLAGYIGADSVVYLSVEGLTAAVREGVKAFKDEQNGINGKTKSSSHGHCTACLTGEYPVELEW

SEQ ID NO: 30353 - DNA, 1641 bp, Neurospora crassa
  CDS (1)..(1641)
atgtgtggtattctcgcccttatcctcgcggataccgatgcgtcggacgcctctgccgatttgcacgagagcttgtactatcttcaacaccgtggtcaagatgcctgtggtatcgcgacctgtggttctggaggtagaatctttcagtgcaagggcaatggcatggcctccaaggtctttgacgacggcaagcgcacggtagaccttcccggctacatgggcattgcccatcttcgttacccgactgccggaactagctctagcgccgagagtcagcctttttacgtcaactcgccctacggcatctgcttcgcgcacaacggtaacctcatcaacgctcccgccctgcgcagctatctcgaccaagaggcccatcgtcatgtgaacaccgactcggacagcgagctgatgctcaacgtctttgccaacgccctgaacgagaccggcaaggcccgtgtcaacaccgacgacatcttcagtgccctcaagaagacgtacgagaggtgccaaggtggctgggccgtcactgctatgattgctggcttcggtatcttcgccttccgtgatcaatacggcatccgccccctcattatgggatcgcgtccctccagcaccctcgaaggcggtatcgactacatgttcgcttccgagagcattgctcttcgtcagctgggcttcagcaacttccaggatatcctcccgggacaagccgtgttcatccaaaagaacgggcagcctcaattccaccaggttgttgagcaaaaggcttactcccccgatatcttcgagtacgtttacttcgcccgcccggataccatcatggatggaatctccgtgcaccgcagcaggcagaacatgggcgtgaagcttgccaacaaggtcaaggagatcctcggagaggagggtgtcaaggagattgatgtgatcattcccgtcccggagaccagtaatactgccgctgccgtggtatcagagcagcttcggaaacccttctctaacggtttcgtcaagaaccgttacgtctaccgcaccttcatcttgcccggtcagaaggccaggcaaaagagcgtccggagaaagctcagcgccatggagtccgagttcaaggaccgtgtcgtcctgctcgtggacgactccattgtccgtggcaccaccagtagggagattgtgagcatggctcgtgaggctggtgcccgcaaggttatctttgctagctgtgctcctcccatcatctacccccacatttacggtatcgatctcgcttctccacaggagctcatcgcccacgagaagacaagaagcgacatcgccaagcacatcaatgccgatgatgtcatttaccaggaccttgccgaccttaaggcggcctgtactgaggcctctcctgatcaccagaagatcaccgactttgaagtgggtgtgttctgcggcaaataccagaccgacatccctgaaggttacttcgaccacctgaacgagagccgtggcacgaagcggaaggccgccgttgtgaacggcaccaacaaggtcttggtcgccaatagcggcccggtcaatgtttttacacccgaaccccctgcgctcatggagaaccccgagaacaggcaggatatcagcatccacaacattgccaactcctaa

SEQ ID NO: 30354 - protein, 546 aa, Neurospora crassa
MCGILALILADTDASDASADLHESLYYLQHRGQDACGIATCGSGGRIFQCKGNGMASKVFDDGKRTVDLPGYMGIAHLRYPTAGTSSSAESQPFYVNSPYGICFAHNGNLINAPALRSYLDQEAHRHVNTDSDSELMLNVFANALNETGKARVNTDDIFSALKKTYERCQGGWAVTAMIAGFGIFAFRDQYGIRPLIMGSRPSSTLEGGIDYMFASESIALRQLGFSNFQDILPGQAVFIQKNGQPQFHQVVEQKAYSPDIFEYVYFARPDTIMDGISVHRSRQNMGVKLANKVKEILGEEGVKEIDVIIPVPETSNTAAAVVSEQLRKPFSNGFVKNRYVYRTFILPGQKARQKSVRRKLSAMESEFKDRVVLLVDDSIVRGTTSREIVSMAREAGARKVIFASCAPPIIYPHIYGIDLASPQELIAHEKTRSDIAKHINADDVIYQDLADLKAACTEASPDHQKITDFEVGVFCGKYQTDIPEGYFDHLNESRGTKRKAAVVNGTNKVLVANSGPVNVFTPEPPALMENPENRQDISIHNIANS

SEQ ID NO: 30355 - DNA, 1578 bp, Apis mellifera
  CDS (1)..(1578)
atgcaaacaaactcttgtaatcggataatatctcaggaaaataaaagagttaaagcattccaaaataaattgagagatgaaataataactggtcttacacatgaatgtggagtttttggatgtattgctgcaggtgattggccatctcaaattgatgttgctcaagtaatttgtttgggtttagtagcattacaacatagaggtcaagaaagtgcaggtattgttacaagtgagggtgtatgttcgaaatcttttcatgtccataagggcatgggtatgattaataacatttttaatgatgaaaacatgaaaaaactaaatggaaatcttggaattggtcatactagatatagtacaagtgcagcaagtgaagaagttaattgtcaaccatttgtggttcatacagcacatggagcattagcagttgctcacaatggagaattagtaaatacagaatcattgagaaaaatggtattaggacgtggagtaggtttatcaacatattcagattctgaattaataacacaagcactttgtttaaatcctcctgaaggtgaagttaatggtccagattggccagcacgaataaaacaccttatgcaattagcaccattatcatattcattagtaattatgcagagagacaagatatatggtgttagagatccttatggaaatcgcccattatgtcttggaaaaattgttcctattggtaatttgggaaatgaatcagatgatgatgatgaagctgaaggttgggttatatcatctgaatcatgtggctttttaagtattggagcacgatatgtgcgtgaagtatttcctggagagattgtagaattgacacgggagggtataaaaactattgatattgttgatagaccagataaaaagcctcaagcattctgcatttttgaatatgtttattttgcacgtagtgatagtatttttgaaggacaaatggtttattctgttcgaatgcaatgtggtcgagaacttgctttagaatctccaatagaagcagatatagttagttcagtacctgaatctggaactgcagcagcacatggatatgccagacagtctcaaataccgtttgcggaagtattatgcaaaaatagatatgttggtagaacatttattcaacctagtacacgactcagacaacttggtgtagcaaagaaatttggagctttatcagaaaatgtaaaaggaaaaaaattaattcttatagatgattcaattgttagaggaaatactattggacctattattaagttacttcgtgatgcaggagcaaaagaagttcatattaggatagcttctcctccattaaaatatccttgctatatgggaattaacattccaactagagaagagttaattgctaataaattggataatgtaaaattagcaaaacatgttggagctgatagcttaacatatctttcagtagatggacttgtaaaagctgtaagatttggtatggataatcgtgaaagcagttatattggtcattgtactgcttgtttaacaggagattatcctgatgaacttcctagtaatttagattggtaa

SEQ ID NO: 30356 - protein, 525 aa, Apis mellifera
MQTNSCNRIISQENKRVKAFQNKLRDEIITGLTHECGVFGCIAAGDWPSQIDVAQVICLGLVALQHRGQESAGIVTSEGVCSKSFHVHKGMGMINNIFNDENMKKLNGNLGIGHTRYSTSAASEEVNCQPFVVHTAHGALAVAHNGELVNTESLRKMVLGRGVGLSTYSDSELITQALCLNPPEGEVNGPDWPARIKHLMQLAPLSYSLVIMQRDKIYGVRDPYGNRPLCLGKIVPIGNLGNESDDDDEAEGWVISSESCGFLSIGARYVREVFPGEIVELTREGIKTIDIVDRPDKKPQAFCIFEYVYFARSDSIFEGQMVYSVRMQCGRELALESPIEADIVSSVPESGTAAAHGYARQSQIPFAEVLCKNRYVGRTFIQPSTRLRQLGVAKKFGALSENVKGKKLILIDDSIVRGNTIGPIIKLLRDAGAKEVHIRIASPPLKYPCYMGINIPTREELIANKLDNVKLAKHVGADSLTYLSVDGLVKAVRFGMDNRESSYIGHCTACLTGDYPDELPSNLDW

SEQ ID NO: 30357 - DNA, 1473 bp, Leptospira interrogans serovar Copenhageni str. Fiocruz L1-130
  CDS (1)..(1473): transl_table=11
atgagtcgaattcccgataaatccagaataagaagacaagcccaggatgacaaaccaaaagaggaatgtgcgatttttggtatatttaattcatcggaggcttctaatttcacctatttaggtctttactcgatgcaacatcgggggcaggaatcgagcggaatcgtttcttcggacggggaacacttatatcgttatgctggaatgggcttggtggctcatatctttacggaaaccaaattaaaggaactgcaaggaaatgcggctatcggccacaatcgatattctacaactggggcttcttttttaagaaatgctcagcctcttcgagtagaatcccacttaggagccgtttctttggctcataatggaaatttggttaattcttgggaacttagaagccaactcgaaaaagaaggaagtatctttcagactacgattgattccgaagtaattgttcatctaatggctcgttctggagaaacggactttctttctgctctttcttccgctcttaaaaaagtaagaggggcatattcacttgtaattcttacaaaaacccaattgattgcagtcagagatccaaatgggtttcgtcctttagtgatgggtcgtcgagaagacggatcgatcgtatttgcttcggaaacctgtgcgtttgatattacggatacgaaatatgaaagagatgtagaaccgggcgagatgatcgtagttgataagaatggaatgaattcttattatccgtttccaaaagcttccccgagtctttgtatttttgagtatatctatttcgcaagacccgattctagtatctttggagagtcggtttataaagttcgaaagaatttaggaagatttttagctagagaattacccgttccagcggatgtagtcattccagttccggactctgccaacatagctgcgttaggttatgcagaagaatctggaatttcttatcaatctggtttgatccgttctcattacatcggtagaacttttatagagccggatcagaaaattcgggattttggagctaagattaaatacaatgtagttcgaaacgtagtcgaaggaaaaagggtgatcgtagttgacgattcgattatgagaggaacgacgagtcgaaaaatcatcaaaatgattcgaaatgctggcgctaaagaaattcatcttagagtttctgcacctcctactatatcaccttgttattatggaatcgatattcctactcataacgaattgatcgcggcgactcacacgatcgaagaaattcgaaagtatttaagagtggatagtatcgcttatctttccgtcgagtctatgaaccgtgccgtaatggatcataaaggtggtgggttttgtaacgcgtgttttacggctcaatacccagtggagtttcagagcgagttaggaaaccagaaaagtctttttaaagaatatcaagtggaagaaagggtcgtttattga

SEQ ID NO: 30358 - protein, 490 aa, Leptospira interrogans serovar Copenhageni str. Fiocruz L1-130
MSRIPDKSRIRRQAQDDKPKEECAIFGIFNSSEASNFTYLGLYSMQHRGQESSGIVSSDGEHLYRYAGMGLVAHIFTETKLKELQGNAAIGHNRYSTTGASFLRNAQPLRVESHLGAVSLAHNGNLVNSWELRSQLEKEGSIFQTTIDSEVIVHLMARSGETDFLSALSSALKKVRGAYSLVILTKTQLIAVRDPNGFRPLVMGRREDGSIVFASETCAFDITDTKYERDVEPGEMIVVDKNGMNSYYPFPKASPSLCIFEYIYFARPDSSIFGESVYKVRKNLGRFLARELPVPADVVIPVPDSANIAALGYAEESGISYQSGLIRSHYIGRTFIEPDQKIRDFGAKIKYNVVRNVVEGKRVIVVDDSIMRGTTSRKIIKMIRNAGAKEIHLRVSAPPTISPCYYGIDIPTHNELIAATHTIEEIRKYLRVDSIAYLSVESMNRAVMDHKGGGFCNACFTAQYPVEFQSELGNQKSLFKEYQVEERVVY

SEQ ID NO: 30359 - DNA, 1392 bp, Thermus thermophilus HB27
  CDS (1)..(1392): transl_table=11
atggataagccccaggaggagtgcggcatcctcgggctttggagcgaaggccccgtggacgtggcggggcttctccacctcggcctcctcgccctgcagcacaggggccaggaggcggcggggatggcggtcacggacggcaaagcgttcctggtggaaaaggacctgggcctcgtgaaccaggtcttcaccgaggagcgcctggggaagctccgccttccggaggcccgcctgggcatcgcccacacccgctactccaccacgggctccaacctgcgcatcaacgcccagcccctcaccgcccgcaccgcccacggggtcttggccatcgcccacaacggcaacttcaccaacgccaagctcctccgcgaccggctcctcctggagggggccaccttccagagcacctcggacaccgaggtgatgctcctcctcctcgcccgcatgggccacctccccctccccgaggccgccgcccaggccatgcggctccttcagggggggtattccatcctcctcatgaaccgcaagaccctcctcgccctccgcgacccccacggggtgaggcccctcgtcctcggcaaggccccctggggctacgccttcgcctccgagcccccggccctcctcctcatgggggcggagtacgtgcgggacgtgcgccccggggaggtggtctgggtggaggagggaaggctccaaagcctccaggccctccccccagagcccgccccctgcgcttttgagtggatctacttcgcccggcccgacagcgtcctggacggcaccgaggcctacgaggcccgggtgaggatggggatggagctcttccgggaggcccccgcagaggccgacctcgtggtccccgtccccgactcgggcatcggggccgccgtgggctacgccaaggcgagcgggctccccctggagttcggcctctacaagaacccctacgccgggcgcaccttcatccagcccacccaggagctccgcgacctgaagacgaggctcaagctctcccccacgggggcggtgaagggcaagcgggtggtcctggtggacgactccatcgtccggggcaccacgagccgccgcatcgtgcgcatgctcaaggaggcgggggccctcgaggtccacttccgcgtctctagcccccccatccgcttcccctgctactacggcatagacaccgcggcccgcaaggagctcatcgccgcggagaagagcgtggaggagatccaggcctacatcggggcggactctttggccttcctctcggaggagggggtcaagcgggccatcgggcggcccgtctgcctcgcctgcttcaacgggcgctacccggcgggggtgcccgaggagggggaaaagctcgccctagagcttctctag

SEQ ID NO: 30360 - protein, 463 aa, Thermus thermophilus HB27
MDKPQEECGILGLWSEGPVDVAGLLHLGLLALQHRGQEAAGMAVTDGKAFLVEKDLGLVNQVFTEERLGKLRLPEARLGIAHTRYSTTGSNLRINAQPLTARTAHGVLAIAHNGNFTNAKLLRDRLLLEGATFQSTSDTEVMLLLLARMGHLPLPEAAAQAMRLLQGGYSILLMNRKTLLALRDPHGVRPLVLGKAPWGYAFASEPPALLLMGAEYVRDVRPGEVVWVEEGRLQSLQALPPEPAPCAFEWIYFARPDSVLDGTEAYEARVRMGMELFREAPAEADLVVPVPDSGIGAAVGYAKASGLPLEFGLYKNPYAGRTFIQPTQELRDLKTRLKLSPTGAVKGKRVVLVDDSIVRGTTSRRIVRMLKEAGALEVHFRVSSPPIRFPCYYGIDTAARKELIAAEKSVEEIQAYIGADSLAFLSEEGVKRAIGRPVCLACFNGRYPAGVPEEGEKLALELL

SEQ ID NO: 30361 - DNA, 1389 bp, Desulfovibrio vulgaris subsp. vulgaris str. Hildenborough
  CDS (1)..(1389): transl_table=11
atgatccggcattactgcggcatcttcggcatctacaaccatgccgaggccgcccgtctttcctacttcggcctctacgccctgcaacaccgcgggcaggagagcgccggcatcgtgacgtgggacggacagaaactgcgtgaacaccgcggcatgggtctcgtgcccgaggtcttcaacgaacgccacctcggcaaggaactcaagggcgacatcgccatcgggcatatccggtactccaccacgggcgcgtcgctcatccgcaacgcgcagccgttcatcgtgcgctacaagggtctcgagatcgccatcgcgcacaacggcaacctcgtgaacacgctggaattgcggcgcgaactggaggaacagggctccatcttccagacctccatcgacagcgaggtgttcgtgcacctcatcgcccgcaacctcaacgggcatacgctcgaagaggccgtcatggcggcatgccgcaaggtgaaaggggcctacgccctgctcatcctcgccaacaacaagctcatcgccgtacgcgacccgcacgggttccgtccgctggcgctgggccgcgtggcgggtgcgcatgtgttcgcgtccgagacgtgcgccttcgacctgctggaagcagagttcatacgctcgctcgacccgggcgagatggtggtcatcgaagatacgaaggtgcaaagctacaagattgagaccgaagcccccacacgccagtgcatcttcgagctcatctacttcgcacggcccgactcgctggtcttcggtgaagacgtgtaccagtgccgcaagcgcatggggcaggaactggcccgcgaatcggcccccgatgtggacttcgtgatgcccttcccggactcgggggtctacagcgccgtcggcttcgcgcaggagtcggggctgccctacgaacacgccatgatccgcaaccactatgtggggcgcaccttcatccagccctcgcaggacatgcgcgacttcagcgtccgggtgaagatcaacccggtgaagagcatgatcaagggcaagcgcatctgcatcgtggacgactccatcgtgcgcggaaccaccatccggacgcgcgtgaagaaactgcgagaactgggtgcgcgtgaagtccacttcagggtgagctgcccgcccatcaagttcccgtgcttctacggcatcgacttcgcctccaagggcgaactcatcgccgccaatcatagcgtatccgaaatcgaacgcttcatcggcatcgattcgctgcactacatcaccatcgaagggctgctgcgctcggtctcgcatcccgagaactactgtctcgcgtgcttcaccggcgactatcccatcccttgcgccggtggcggcaaactctgccttgaatgcggctgctag

SEQ ID NO: 30362 - protein, 462 aa, Desulfovibrio vulgaris subsp. vulgaris str. Hildenborough
MIRHYCGIFGIYNHAEAARLSYFGLYALQHRGQESAGIVTWDGQKLREHRGMGLVPEVFNERHLGKELKGDIAIGHIRYSTTGASLIRNAQPFIVRYKGLEIAIAHNGNLVNTLELRRELEEQGSIFQTSIDSEVFVHLIARNLNGHTLEEAVMAACRKVKGAYALLILANNKLIAVRDPHGFRPLALGRVAGAHVFASETCAFDLLEAEFIRSLDPGEMVVIEDTKVQSYKIETEAPTRQCIFELIYFARPDSLVFGEDVYQCRKRMGQELARESAPDVDFVMPFPDSGVYSAVGFAQESGLPYEHAMIRNHYVGRTFIQPSQDMRDFSVRVKINPVKSMIKGKRICIVDDSIVRGTTIRTRVKKLRELGAREVHFRVSCPPIKFPCFYGIDFASKGELIAANHSVSEIERFIGIDSLHYITIEGLLRSVSHPENYCLACFTGDYPIPCAGGGKLCLECGC

SEQ ID NO: 30363 - DNA, 1428 bp, Listeria monocytogenes str. 4b F2365
  CDS (1)..(1428): transl_table=11
atgcttgctgaagtaaaaggacttaacgaagaatgtggtatttttggtatttgggatcatcctaatgcagcggaaatcacctattatgggttgcatagtttacaacatcgcggtcaagaaggtgccggaattgtttcgacagacggtgaaacactaaaaggtcaccgaaatctcggccttttagcagatgtatttaagcatggtgaactagacgatttaaaaggtaaagcagccattggccacgttcgatatgcgacagctggtcaaaaaaacttagggaacgtacaaccatttttatttcactttcatagttcttctttagcacttgcgcataatggaaatttggttaatgcgaaaagtttacgccgtgaactagaagaagaaggcgctatttttcaaacgagttcggatacagaagtgttagcgcatttaattaaacgtagccatacaggtgattttgtggaagatttaaaagtggctttgaacaaggttaagggtggctttgcgtacatgcttctgacggaagacacgatgtatgcggcgcttgacccgaatggttttagaccgctttcgataggtcgcattggtgattcttacgtagttgcttcggaaacatgtgcctttgaaacggttggcgctgagtttgtccgcgatgtggagccaggtgaactaattattattaatgatgacgggcttcgaattgaaaaattcacggaaaatgtgacgcattcgatttgcagtatggaatacatttattttgcgcgacctgactctaatattgctggaattaatgtccactcggcaagaaaacgttctgggaaaagattagcaaaagaggcttttattgatgcagatgtggttacaggtgtaccagattccagtatttctgcagcgattggttatgcggaggaagctggtcttccttacgaacttggtctcatcaaaaatagatatgtggcaagaacttttatccagccatcacaagaacttagggaacaaggcgttagaatgaaactttctgccgtgcgcggggttgtggaaggaaaacgcgttgtcatgattgatgattcgattgttcgcgggacgacaagtaaacgcattgtccagcttttacgtgaagcaggagcggcggaagttcatgtaagaatcgcttctccaccacttgcttatccttgtttttatggaattgatatccaaacgcgaaatgaattaatcgcttctaattattctgttgatgaaatttgtcggattattggggctgattctttagagtatttgagtgaagaaggtttagtagattccattggcagaccttatccgaacgaaccttacgggggactttgtatggcttatttcaacggcgattacccaacccctttatatgattatgaagcggaatatttagcgagcttagaagcagaaaaataa

SEQ ID NO: 30364 - protein, 475 aa, Listeria monocytogenes str. 4b F2365
MLAEVKGLNEECGIFGIWDHPNAAEITYYGLHSLQHRGQEGAGIVSTDGETLKGHRNLGLLADVFKHGELDDLKGKAAIGHVRYATAGQKNLGNVQPFLFHFHSSSLALAHNGNLVNAKSLRRELEEEGAIFQTSSDTEVLAHLIKRSHTGDFVEDLKVALNKVKGGFAYMLLTEDTMYAALDPNGFRPLSIGRIGDSYVVASETCAFETVGAEFVRDVEPGELIIINDDGLRIEKFTENVTHSICSMEYIYFARPDSNIAGINVHSARKRSGKRLAKEAFIDADVVTGVPDSSISAAIGYAEEAGLPYELGLIKNRYVARTFIQPSQELREQGVRMKLSAVRGVVEGKRVVMIDDSIVRGTTSKRIVQLLREAGAAEVHVRIASPPLAYPCFYGIDIQTRNELIASNYSVDEICRIIGADSLEYLSEEGLVDSIGRPYPNEPYGGLCMAYFNGDYPTPLYDYEAEYLASLEAEK

SEQ ID NO: 30365 - DNA, 1383 bp, Picrophilus torridus DSM 9790
  CDS (1)..(1383): transl_table=11
gtggattcccagccccaagaatcagacattacaactgggcaaaaagtaaatgaggattgtgccgtcatcggcttttccggcggcggcgtatattcaagtattatagccggtctcaggtcattgcagcatcgcggccaggagagctctggaataataacatacgatggaaagatccacgttaaaaagggtatgggtcttgtcagtgaggtttttaaaaatgccgatccaatgcctggaattgttggtataggccataacaggtattcaacctcgggatcaaagggcatagaaaatgcaggtccttttgttatatcatgctcccttggatacataggcataacacataatggtgagataacaaatgagcatgaactaagggaggaattaaagcatgatggatacatcttcacaagctccagtgatacagaggtaatgttaatagaatttgtcaaggagatatcaagatatggaatcaatgagggtattaaaaggggcatggagcgtttaaagggcgcatatgctgcagtattaatgataaatgacaggctttatgccataagggataagtttggttttaggcccctggtccttggcagaacatttaatggttatataatagcatcagagacctgtgccattgatgcattatctggagagacaataaaaaatgttgaacccggtgaggttatagaggtttttaacaattcttacaaaaccatttttaaattagatggtgacgtctcacactgcatgtttgaatacgtttactttgccagacctgacagtataatagacaatatagaggtctttcaggccagggtcaggatgggcatgaggcttgccgttgaatcgcctgttgatgccgatgtcgttgttcctgttccggactctggaagggcccaggcgcttggcttttcaaaggccacgggaataccatacagcgagggtcttataaagaacagatattcagaaaggacatttataatgcccgatcaaaaaagcaggcttgcagcaataaagataaaattgaatgcaataaaatcagaaatatcaaataaaaggatagtccttgttgatgacagcatagtacgtggaaatacaatgaaatacatagttaaaattgtcagggatgccggggccagtgaggttcatgttagaataagctctccaccgataaccgcaccatgcttctatggtgttgatatgaagacaaagaatgaattcatagctgcaaataaaacaatagaaagtataaaaaatgagataggtgcggattccctggcgtacctgtcaatagatggtcttaaacaggccataggaataaaaagcatatgcattagctgtttaacaggtatctatccagagtatgttccattatcttaa

SEQ ID NO: 30366 - protein, 460 aa, Picrophilus torridus DSM 9790
MDSQPQESDITTGQKVNEDCAVIGFSGGGVYSSIIAGLRSLQHRGQESSGIITYDGKIHVKKGMGLVSEVFKNADPMPGIVGIGHNRYSTSGSKGIENAGPFVISCSLGYIGITHNGEITNEHELREELKHDGYIFTSSSDTEVMLIEFVKEISRYGINEGIKRGMERLKGAYAAVLMINDRLYAIRDKFGFRPLVLGRTFNGYIIASETCAIDALSGETIKNVEPGEVIEVFNNSYKTIFKLDGDVSHCMFEYVYFARPDSIIDNIEVFQARVRMGMRLAVESPVDADVVVPVPDSGRAQALGFSKATGIPYSEGLIKNRYSERTFIMPDQKSRLAAIKIKLNAIKSEISNKRIVLVDDSIVRGNTMKYIVKIVRDAGASEVHVRISSPPITAPCFYGVDMKTKNEFIAANKTIESIKNEIGADSLAYLSIDGLKQAIGIKSICISCLTGIYPEYVPLS

SEQ ID NO: 30367 - DNA, 1416 bp, Bacillus anthracis str. Sterne
  CDS (1)..(1416): transl_table=11
atgcttgctgaaataaaggggttaaacgaagaatgtggcgtattcggaatttgggggcatgaaaatgcggcacaagtttcatactacggattgcacagtttacagcaccgtgggcaagaaggcgcaggcattgtcgtaaataatggggaaaaaatcgtcggtcacaaggggttaggtttaatatcggaagtgttttcaagaggtgagctagaaggattgaatggaaaatcagcaatcgggcatgtacgatacgcgacggctggtggaagtgaagtagctaacgttcaaccattattattccgtttttctgatcatagtatggcattagctcacaacggaaatttaattaatgcaaaaatgcttcgccgcgaattagaggcagagggaagtatttttcaaacaagttcagatacagaagtacttttacatcttattaaacgtagtacgaaagattcgttaattgaaagtgtaaaagaggctttaaataaagtgaaaggtgcgtttgcgtatcttttactaactggaaatgaaatgatcgttgcgttagatccgaatggtttccgtcctctttcaattggaaagatgggtgatgcttacgttgtagcatcagaaacatgtgctttcgatgtagtaggtgcaacatacattcgtgatgtagaaccgggtgaattacttatcatcaatgatgaaggaattcacgtagatcgttttacaaatgaagtagatcatgcaatttgtagtatggaatacatttactttgcacgaccagattctaatattgctggtattaacgtccatgcagcacgtaaaaacatgggaaaacgtttggcggcagaagctcctattgaagctgatgttgttactggtgtgccagactctagtatttcggcagcaattggttatgcggaggcgacaggtattccatatgagttaggattaattaaaaatcgttacgttggacgtacatttattcaaccttctcaagaactgcgcgagcaaggggttaagatgaagctttcagcagtaagaggggtagttgaaggaaaacgagttgttatgattgacgattctatcgtaagaggaacaacaagtaaacgaattgttcgcatgcttcgcgaggctggagcgacagaagttcacgtaagaattgcttcaccacctctgaaatatccatgcttctatggtattgatattcaaacgagaaaagaattaattgcagcaaatcatacggtagaagaaattcgtgaaatgatcggtgcagactcattaacatttttaagtgaagatggattagtagatgcaattggacgtccatatgaagggaaatatggcggcctatgtatggcttactttaatggggactatccaacagctctttatgattatgagcaagagcttttagaaagtatgaaataa

SEQ ID NO: 30368 - protein, 471 aa, Bacillus anthracis str. Sterne
MLAEIKGLNEECGVFGIWGHENAAQVSYYGLHSLQHRGQEGAGIVVNNGEKIVGHKGLGLISEVFSRGELEGLNGKSAIGHVRYATAGGSEVANVQPLLFRFSDHSMALAHNGNLINAKMLRRELEAEGSIFQTSSDTEVLLHLIKRSTKDSLIESVKEALNKVKGAFAYLLLTGNEMIVALDPNGFRPLSIGKMGDAYVVASETCAFDVVGATYIRDVEPGELLIINDEGIHVDRFTNEVDHAICSMEYIYFARPDSNIAGINVHAARKNMGKRLAAEAPIEADVVTGVPDSSISAAIGYAEATGIPYELGLIKNRYVGRTFIQPSQELREQGVKMKLSAVRGVVEGKRVVMIDDSIVRGTTSKRIVRMLREAGATEVHVRIASPPLKYPCFYGIDIQTRKELIAANHTVEEIREMIGADSLTFLSEDGLVDAIGRPYEGKYGGLCMAYFNGDYPTALYDYEQELLESMK

SEQ ID NO: 30369 - DNA, 1533 bp, Bartonella quintana str. Toulouse
  CDS (1)..(1533): transl_table=11
atgatcctaacccatttcttacatcatgaccgaaagaatacaatgacaaaaatggacattccctttcaagaattttcattggatggcgatactcttcatgaagaatgtggagtttttggtattctaggccatgaagatgccgcgactttaacagctcttgggctccatgcacttcagcatcgtgggcaagaagcagctggaattgtttcctatcataacaaaatgtttcatcaagaaaagcatctaggtcttgttggagatcactatacaaaccccgcaacacttgcgcgtttaccaggaaatcgcgctattgggcatacccgttattcaacaactggagaaacagtattacgcaatgtgcaacctctttttgctgagttaaaagctggaggtattgctattgcccataatggcaatcttaccaacggtcttacattacgccgggaactcattgcgtccggcgctatttgccaatcaacatcagattcagaagtttttcttcatctgattgctcgttcacgttatgaatcatcatctgatcgctttgttgatgctattcggcaagtccaaggtggatatgctatgttagcgctaacacgcaccaagctcattgccgcacgcgatccaacaggtattcgacctttggtaataggtgaacttgatggtaaaccaattttttgttccgaaacctgtgcacttgatattattggagcaaaatatgttcgtgatgtcaaaaatggagaaatcatcatatgtgagatacaaaaaaatggggaaatcactaaaaaaattataaaaccagagagtgagaaaccagaaaaactgtgcctttttgaatatgtctattttgcgcgccctgattcaatcgttggaggtcggaatgtttacatgacacgtaaaaatatggggacctatttggcacaagaagcaccctgtgagggtgatgttgtggttcccgttcctgatggaggaacacctgccgcaattggctatgcacaagaaattggaatcccctttgaacttggtatcattcgtaatcattacgttggacgcacttttatcgaaccaacacagcaaattcgtgcttttggagttaaattgaagcattctgcaaaccgtcctgtcatcgaaggaaaacgcgttattctggttgatgactccattgtacgtggaacaacatccgtcaaaattgtgcgaatgctccgggatgcaggagcaaaagaagttcacatgcgcatttctagccctatgattttctatccagatttttatggcattgatacacctaacgttgaaagccttttggctaatcaatatccagacttaaaatccatgtgcaattttgttggagctgactcattagaatttctttcaacagatggtctataccttgctgtggccggagaaaaacgaaataacgctgatccacaatttactgaccattattttaccggacattatcctacacatctggttgatcaagaaagtatcccccaaattcatcaactctctgtcctaaaaacaagagattaa

SEQ ID NO: 30370 - protein, 510 aa, Bartonella quintana str. Toulouse
MILTHFLHHDRKNTMTKMDIPFQEFSLDGDTLHEECGVFGILGHEDAATLTALGLHALQHRGQEAAGIVSYHNKMFHQEKHLGLVGDHYTNPATLARLPGNRAIGHTRYSTTGETVLRNVQPLFAELKAGGIAIAHNGNLTNGLTLRRELIASGAICQSTSDSEVFLHLIARSRYESSSDRFVDAIRQVQGGYAMLALTRTKLIAARDPTGIRPLVIGELDGKPIFCSETCALDIIGAKYVRDVKNGEIIICEIQKNGEITKKIIKPESEKPEKLCLFEYVYFARPDSIVGGRNVYMTRKNMGTYLAQEAPCEGDVVVPVPDGGTPAAIGYAQEIGIPFELGIIRNHYVGRTFIEPTQQIRAFGVKLKHSANRPVIEGKRVILVDDSIVRGTTSVKIVRMLRDAGAKEVHMRISSPMIFYPDFYGIDTPNVESLLANQYPDLKSMCNFVGADSLEFLSTDGLYLAVAGEKRNNADPQFTDHYFTGHYPTHLVDQESIPQIHQLSVLKTRD

SEQ ID NO: 30371 - DNA, 1527 bp, Bartonella henselae str. Houston-1
  CDS (1)..(1527): transl_table=11
atgaaccgtttctcacatcataatcgaaagaatacgatgacaaaaatcgacattccatttcaggagttttcattgaatgacgatacccttcatgaagaatgcggagtctttggtattcttggccatgaggatgcagcgactttaacagctcttggacttcacgcgcttcaacatcgtggacaagaagcagctgggattgtttcttaccataataaaatgtttcatcaagaaaagcatctaggtcttgttggtgatcattatacaaaccccgcaacacttgcgcgtttaccgggaaatcgcgctatcgggcatacccgttattcaacaactggagaaatagcattacgcaatgtgcaacccctttttgctgagttaaaagctggaggtattgccattgcccataatggcaatcttactaacggtcttacattacgccgagaactcattgcttccggtgctatctgccaatcaacatcagattctgaagtttttcttcatcttattgctcgttcacgttatgaatcgtcgtcagatcgctttgttgatgctattcgaaaagtggaaggtggttatgccatgttagcgctcacacgcaccaaactgattgctgcgcgtgatccaataggtattcgacctctggtgatgggtgaacttcatggtaaaccaatattttgttccgaaacctgtgcccttgatattattggagcaaaatatattcgcgatgttaaaaatggagaagtcatcgtatgtgaaatacaaaaaaatggggaaatcaccacaaaaattataaaaccagaaaataagaaaccagaaaaactttgcctttttgaatatgtctattttgcgcgtcctgattcaatcgtcggaggacgaagtgtttatatgacacgtaaaaatatgggtatccgtttagctcaagaagccccctgtgaaggtgatattgtggttcctgttcctgacgggggaacacccgctgcaattggttatgcccaagaaattggaattccctttgagcttggtattattcgtaatcattacgtcggacgcacatttatcgaaccaacacaacaaattcgcgcttttggggttaaattaaagcattctgcaaatcgtcctgttattgaaggaaaacgtgtcattctggtcgatgactccattgtacgaggaacaacatccgttaaaattgtgcaaatgctccgcgatgcaggagcaaaagaagttcatatgcgcatctctagtcctatgattttctatcccgatttctatggtattgatacacctaaagttgaaagtttgttggctaatcaatatccagatttaaaagctatgtgcaattttgttggagctgactcattagaatttctttcaacaaatggtctatatcttgctgtgataggagaaaaacgaaataatgctgatccacaatttactgaccattattttactggagattatcctacacatctagtcgatcaagaaagtattcctaaaatttatcaatcatctgtcctaaaaacaagagattaa

SEQ ID NO: 30372 - protein, 508 aa, Bartonella henselae str. Houston-1
MNRFSHHNRKNTMTKIDIPFQEFSLNDDTLHEECGVFGILGHEDAATLTALGLHALQHRGQEAAGIVSYHNKMFHQEKHLGLVGDHYTNPATLARLPGNRAIGHTRYSTTGEIALRNVQPLFAELKAGGIAIAHNGNLTNGLTLRRELIASGAICQSTSDSEVFLHLIARSRYESSSDRFVDAIRKVEGGYAMLALTRTKLIAARDPIGIRPLVMGELHGKPIFCSETCALDIIGAKYIRDVKNGEVIVCEIQKNGEITTKIIKPENKKPEKLCLFEYVYFARPDSIVGGRSVYMTRKNMGIRLAQEAPCEGDIVVPVPDGGTPAAIGYAQEIGIPFELGIIRNHYVGRTFIEPTQQIRAFGVKLKHSANRPVIEGKRVILVDDSIVRGTTSVKIVQMLRDAGAKEVHMRISSPMIFYPDFYGIDTPKVESLLANQYPDLKAMCNFVGADSLEFLSTNGLYLAVIGEKRNNADPQFTDHYFTGDYPTHLVDQESIPKIYQSSVLKTRD

SEQ ID NO: 30373 - DNA, 1485 bp, Staphylococcus aureus subsp. aureus MRSA252
  CDS (1)..(1485): transl_table=11
atgtttaactactcaggattaaacgaagaatgtggcgtgtttggtatttggaatcatcctgaagcagcgcaactaacatatatgggacttcatagtttgcaacatcgtggtcaagaaggtgcaggtatagttgtttctgatcaaaatgaattaaaaggcgagcgaggattaggcttactaactgaagcgattaaagatgaccaaatggaacgattaaaaggatatcaacatgcaattggtcacgtccgttatgctacttcaggtaataaaggtattgaaaatattcaaccgcttctgtatcacttttatgatatgagtgtaggtatttgtcataatggtaacctcattaatgctaaatcattacgtcaaaatttagaaaaacaaggtgctatcttccattcgtcttcagatacagaagttattatgcatttgattcgacgcagtaaggcgccaacttttgaagaagcattaaaagaaagtcttcgaaaaattaaaggtggttttacatttgcaattttaacaaaggatgcgttatatggcgcagtagatccaaatgctatcagaccacttgttgtaggtaaaatgaaagatgggacatacatccttgcaagtgaaacatgtgcaattgatgtgttaggtgcagaattcgttcaagatattcatgcgggtgaatatgtcgtgattaatgataaaggtattacagttaaatcttatacacatcatacgacaactgcaatttctgcgatggaatatatttattttgcgagaccagattcaacgattgctggtaaaaatgttcatgcagtgcgtaaggcttcaggtaaaatgttagcacaagaaagtccggtaaaagctgatatggtcatcggtgtacctaattcatcattatctgcagcgagcggttatgctgaagaaatcggtttgccatatgaaatgggactagttaaaaatcaatatgttgcaagaacatttattcaaccaacgcaagagttacgtgaacaaggtgtaagagttaagctatctgcagtgaaagatattgtagacggtaaaaatattattcttgttgatgattccattgttcgaggtacgacaattcgacgtattgtgaaaatgttaaaagattctggtgcaaataaagtgcatgtgcgtatagcatcaccggaatttatgttcccaagtttttatggaatcgatgtttcaactacggcagaattaatttctgcaagcaaatcacctgaagaaattaaagattatattggcgctgattcgttagcatatctatctgtagatgggttaattgaatcaattggtttagattatgacgcgccatatagtggcttatgtgtagaaagtttcactggagattatcctgcagggttatatgattatgaagcaaattataaagcacatttaagtcatcgacaaaagcaatatatttctaaaaacaaacactattttgatagcgagggaaatttaaatgtctaa

SEQ ID NO: 30374 - protein, 494 aa, Staphylococcus aureus subsp. aureus MRSA252
MFNYSGLNEECGVFGIWNHPEAAQLTYMGLHSLQHRGQEGAGIVVSDQNELKGERGLGLLTEAIKDDQMERLKGYQHAIGHVRYATSGNKGIENIQPLLYHFYDMSVGICHNGNLINAKSLRQNLEKQGAIFHSSSDTEVIMHLIRRSKAPTFEEALKESLRKIKGGFTFAILTKDALYGAVDPNAIRPLVVGKMKDGTYILASETCAIDVLGAEFVQDIHAGEYVVINDKGITVKSYTHHTTTAISAMEYIYFARPDSTIAGKNVHAVRKASGKMLAQESPVKADMVIGVPNSSLSAASGYAEEIGLPYEMGLVKNQYVARTFIQPTQELREQGVRVKLSAVKDIVDGKNIILVDDSIVRGTTIRRIVKMLKDSGANKVHVRIASPEFMFPSFYGIDVSTTAELISASKSPEEIKDYIGADSLAYLSVDGLIESIGLDYDAPYSGLCVESFTGDYPAGLYDYEANYKAHLSHRQKQYISKNKHYFDSEGNLNV

SEQ ID NO: 30375 - DNA, 1539 bp, Acinetobacter sp. ADP1
  CDS (1)..(1539): transl_table=11
atgtgtggagtagttggtatagccggtaaagcgccagttaaccaaatgttgtttgatgcattaacgatgttgcagcatcgggggcaagatgcagctgggattgtaacctgccatgatggccgtttatttctcagaaaagacaatggaatggtgcgtgatgtattccatactcgtcatatgcgtgctttgatcggtaattacggtattggtcatgtgcgctatccaactgcgggttcctcaagtagtgctgaggcacaacctttttatgtgaattcaccctatggaattacgcttgcacacaatggtaatctgaccaacgctgaagaaattcacgatgatctgtttaaaacagatttgcgtcatatgaatacagattccgattccgaagttttgcttaacgtgtttgcgcacgaattgcaaaagagcggcaagttatcgcctacatcagaagatgtattccatgcggtttctcgtgtgcatgagcgctgcaagggtgcttatggcgtagttgcgatgatcactggacatggtcttgttggtttccgtgatccaaatgggattcgaccattaatttatggttcgcgtgaaactgaaaagggcgttgaatatattattgcctctgagtctgttgcaattacagcactcggattcaaaattgaacgcgatattcagccaggcgaagcaattttcatcaatgatcagggtgaattgtttacaaagcaatgtgctacaaatccacagcatcgcccatgtatctttgaatatgtttattttgcgcgtccagatgccattattgatggtatttctgtgtataaagcccgtttaaagatgggtgagaagctggcaaataaaatcttgcgcgagtggggtgaagatcacggaattgatgtcgtaattccaattccagatacaagtcgtacatcagcacttgaactggcgaatattctaggtgtgaaattccgtgaaggttttatgaaaaaccgttatatcggacgtacctttattatgccagggcagcaacaacgtaaaaaatcggtacgtcaaaagctgaacccagttgagcttgaatttaaaggtaaaaatgtattgcttgtagacgattcaatcgttcgcggtaccacctgtaatgaaattattcaaatggcgcgtgattctggtgctaaaaaggtatattttgcctctgctgcacctatggtgaagtatccaaatgtctatggtattgatatgcctgccaagacagaactgattgcttcgcaacgtagtgttgaagagattcgtgaaattatcggtgcagaccgtttggttttccaagacctggatgatctaaaaagtgctgtacgtaccaccaaagtacctgatctgacagagtttgatagttctgtttttgatggagtgtatgtggcaggtgggattgataaggcttatcttgaaaaccttgagaagaagcgcaacgatactgccaaaaatgcagcggatagttatattgatgtgaatatcgatgctgcttctgtggatttgactggaattcgagagctataa

SEQ ID NO: 30376 - protein, 512 aa, Acinetobacter sp. ADP1
MCGVVGIAGKAPVNQMLFDALTMLQHRGQDAAGIVTCHDGRLFLRKDNGMVRDVFHTRHMRALIGNYGIGHVRYPTAGSSSSAEAQPFYVNSPYGITLAHNGNLTNAEEIHDDLFKTDLRHMNTDSDSEVLLNVFAHELQKSGKLSPTSEDVFHAVSRVHERCKGAYGVVAMITGHGLVGFRDPNGIRPLIYGSRETEKGVEYIIASESVAITALGFKIERDIQPGEAIFINDQGELFTKQCATNPQHRPCIFEYVYFARPDAIIDGISVYKARLKMGEKLANKILREWGEDHGIDVVIPIPDTSRTSALELANILGVKFREGFMKNRYIGRTFIMPGQQQRKKSVRQKLNPVELEFKGKNVLLVDDSIVRGTTCNEIIQMARDSGAKKVYFASAAPMVKYPNVYGIDMPAKTELIASQRSVEEIREIIGADRLVFQDLDDLKSAVRTTKVPDLTEFDSSVFDGVYVAGGIDKAYLENLEKKRNDTAKNAADSYIDVNIDAASVDLTGIREL

SEQ ID NO: 30377 - DNA, 1518 bp, Erwinia carotovora subsp. atroseptica SCRI1043
  CDS (1)..(1518): transl_table=11
atgtgcggtattgtcggtatcgccggttttacaccggtcaaccagtcgatttatgacgcgttaacggtgttgcaacaccgtgggcaggatgccgcgggtattgtgaccatcgatgcctttaattgttttcgcctgcgtaaggccaatggcctggtgaaagatgtgtttgaagcgcggcacatgcagcgcttacagggaaacatggggcttggccatgtacgttatccgaccgcaggcagttccagcgcctcggaagcacagcctttttatgtaaactctccgttcggcatcacgatggctcacaacggtaacctgacgaacgcccacgaactgcgtaaaaagctgttcgagcaggagcgccgtcacgttaacaccacgtccgattctgaaatcctgttgaatatctttgccagagaactggaccgtttccaacattatccgttggaagccgataatatttttgcggccgttgccgcgacgcaccagcaaattcgtggtgcctatgcctgtgttggcatgattatcggtcatggcatggtggcgttccgcgatcctaacggtattcgtcctctggtgattggtaaacgtgacctggaagatggtcgcagcgaatatatggtagcgtctgaaagcgtcgcactggatacgctgggctttgagttcttacgtgatgttgcgccgggagaagcgatctacattacggaaaaagggcaactgtttactcgccagtgcgcagagaatccaaagagcaacccgtgcctgttcgaatatgtctacttcgctcgtcctgactctttcatcgataaaatttcggtctatagcgcacgcgttcgcatgggtcagaagctgggtgaaaagattgcacgtcagtgggaagatctcgatattgatgtcgtgatcccgattcctgaaacctcttgtgatatcgcgttggaaatcgcgcgcattatcaacaaaccgtatcgtcagggattcgtgaaaaaccgctatgttggtcgcacctttatcatgccgggacagcaggcgcgtaagaaatctgtgcgtcgcaagctgaacgcgaaccgtgccgagttccgtgataaaaatgtgctgctggtcgatgactctatcgtacgtggcacaacgtcggagcagattgtggagatggcgcgtgaagcaggagccaggcgtgtttatctggcctctgcggcaccggaaattcgcttccctaacgtgtacggcatcgacatgccgagcgttaatgaactgattgcccacggtcgcgaagtggacgagatctgtaagattatcggtgccgatgagctgatattccaggatctcgacgatctgatcgacgcagcgcgtgaagataacccggatattgttcagtttgaatgttcagtgttcaatgggatttacgtgacaaaagacgtcgatcaaggctatctggattatctggaagtactgcgtaacgatgatgctaaagcgttacgtagccagaatgaagtcgaagatctggaactgcacaacgaaggttaa

SEQ ID NO: 30378 - protein, 505 aa, Erwinia carotovora subsp. atroseptica SCRI1043
MCGIVGIAGFTPVNQSIYDALTVLQHRGQDAAGIVTIDAFNCFRLRKANGLVKDVFEARHMQRLQGNMGLGHVRYPTAGSSSASEAQPFYVNSPFGITMAHNGNLTNAHELRKKLFEQERRHVNTTSDSEILLNIFARELDRFQHYPLEADNIFAAVAATHQQIRGAYACVGMIIGHGMVAFRDPNGIRPLVIGKRDLEDGRSEYMVASESVALDTLGFEFLRDVAPGEAIYITEKGQLFTRQCAENPKSNPCLFEYVYFARPDSFIDKISVYSARVRMGQKLGEKIARQWEDLDIDVVIPIPETSCDIALEIARIINKPYRQGFVKNRYVGRTFIMPGQQARKKSVRRKLNANRAEFRDKNVLLVDDSIVRGTTSEQIVEMAREAGARRVYLASAAPEIRFPNVYGIDMPSVNELIAHGREVDEICKIIGADELIFQDLDDLIDAAREDNPDIVQFECSVFNGIYVTKDVDQGYLDYLEVLRNDDAKALRSQNEVEDLELHNEG

SEQ ID NO: 30379 - DNA, 1488 bp, Propionibacterium acnes KPA171202
  CDS (1)..(1488): transl_table=11
gtggcgcgcgcagacggaaggcttaccgcagacctcaacccccaggaccacgggccccaagacgcctgtggcgtcatcgggatctatgcccccggtgaggaggtttctaaactcacctacttcggcatgtatgccctgcaacaccgtggccaggaatcagctggcatggcggtgtcagacggtcgccacatgatggtctttaaagacatggggttggtgtcccaggtctttgacgaggccaccctcaattccctccagggacatatggccgtcgggcacacccggtattcgacgactggtgcgagtatctgggacaacgcccagccgacgttcaggtcgcgtcaaggtggtgacgggctagctctggcccataacggcaacctcaccaacaccggcgccctcgaagccctcatcgctgagcgtgccccggataccgaggttccccacaaagaccggatggactccagcaacgacacctcgctggtaacagccctcatgacgacctatgacggcactcttgaggaagtcgccgcccaggtcctgccccaccttcagggtgccttcagtctcgttttcatggacgaccacactttgtgcgctgctcgtgatccgcagggcatccgaccgttggtgctggggcgcctatctagtggttgggtggtcgcctccgaaactgcggctatcgacatcgtcggtggtactttcgttcgcgagatcgagcccggcgagatggtcgccattgacgcggctgggttgcgcaccagccgtttcgctgcggcccggcccaaggggtgcgtcttcgaatacgtttacctggctcgccctgacaccgttattgctggacgacgtatccacaacgttcgcgtcaaagtcggcaagatcctggcccaggaacaccctgccgacgccgacctcgtcatcccggtgccagagtctggcaccccggctgctatcggctatgccgacgagtccggcatcccctacggcatgggcctggtcaagaactcctacgtgggccggactttcatccagccctctcaaaccctgcgcaacttgggtattcggctcaagctcaacccgttgcgtgacgtcattgagggacgacgcatcgtcgtcgtcgatgactccatcgtgcgcggcaatacccagcgtcagctggtccgaatgttgcgtgaggctggtgcggccgaggtgcacgtgcgcatctcttctccgccggtgcagtggccgtgcttctacggcattgacttcgctactcgcgctcagctcatcgccccgggtcttgacgtcgaggacatctgccgatctatcggcgctgactcgcttggctacgtcagccttgacggcctcgtccgtgccacccacgttgacgccgataacctctgccgggcttgttttgacggcgtttatcccgtaccggtgcctgtctcggcgcgagccgtgctagccgacgccacccacaccaacccgaaccaggagcagcagtga

SEQ ID NO: 30380 - protein, 495 aa, Propionibacterium acnes KPA171202
MARADGRLTADLNPQDHGPQDACGVIGIYAPGEEVSKLTYFGMYALQHRGQESAGMAVSDGRHMMVFKDMGLVSQVFDEATLNSLQGHMAVGHTRYSTTGASIWDNAQPTFRSRQGGDGLALAHNGNLTNTGALEALIAERAPDTEVPHKDRMDSSNDTSLVTALMTTYDGTLEEVAAQVLPHLQGAFSLVFMDDHTLCAARDPQGIRPLVLGRLSSGWVVASETAAIDIVGGTFVREIEPGEMVAIDAAGLRTSRFAAARPKGCVFEYVYLARPDTVIAGRRIHNVRVKVGKILAQEHPADADLVIPVPESGTPAAIGYADESGIPYGMGLVKNSYVGRTFIQPSQTLRNLGIRLKLNPLRDVIEGRRIVVVDDSIVRGNTQRQLVRMLREAGAAEVHVRISSPPVQWPCFYGIDFATRAQLIAPGLDVEDICRSIGADSLGYVSLDGLVRATHVDADNLCRACFDGVYPVPVPVSARAVLADATHTNPNQEQQ

SEQ ID NO: 30381 - DNA, 1455 bp, Streptococcus pyogenes MGAS10394
  CDS (1)..(1455): transl_table=11
atgacatacgaagtaaaatctctaaatgaagaatgtggagtctttggtatctgggggcatcctcaggcagctcaagtcacttactttgggcttcatagccttcaacatcgcggtcaagaaggagctggtattgtttcaaatgacaatgggaaactctatggttatcgaaatgttgggctcctttctgaagtttttaagaatcaatctgaattagataatttaactgggaatgcggctattggacatgttcggtatgctactgcaggttctgcagatattcgcaatattcagccttttctttataaatttcatgacgggcaatttgctttatgccataatggtaatttgacaaatgctatttccttaaggaaagaattagaaaagcaaggtgcaattttcaatgcctcctcagatactgaaattttgatgcacttgattcgtcgaagccataactcaagtttcatgggaaaggtaaaagaagctctaaatacagtaaagggtggctttgcctatctactgatgacagaaaataaactcattgctgctcttgaccctaatgcctttcgtcctttgtcaattggacaaatgcaaaatggtgcctgggttatttccagtgagacctgtgcttttgaggtggtaggcgcaaaatgggttagagatgttgaacctggcgaagttattcttatagacgatcgtggtattcaatgtgatcgttatactgatgaaacgcaactggcaatttgttcgatggaatatgtctattttgcaaggccggattcaactatacatggtgttaatgttcatacggctcgaaaaaatatgggaaagcgtcttgcacaagaatttaaacaggatgctgatattgtaattggtgtcccaaattcgtccttatcggctgctatgggctttgctgaagaatccggattaccaaatgagatgggtcttgtaaaaaatcagtatacgcagcgaacctttattcaaccgacacaagaattaagggaacaaggtgttcgaatgaaactatcagcggtatctggtgttgtcaaaggaaagcgcgttgttatgattgatgactcaattgtaagaggaacgacttctagaaggattgtcggattattaagagaagcaggagctagtgaagtacatgttgctatagctagtccagaattaaagtatccttgtttttatggtattgatattcaaacaagacgagaattaatttcagcaaatcacgctgttgacgaagtgtgtgatattattggcgcagatagtctgacctatctctcattagatgggttgattgaatcaattggactcgaaacaaaagcaccaaatggtggtttatgcgtagcttactttgatgggcattatccaacaccgctttatgattatgaagaagaatacctcagaagtttagaagagaaaacaagtttttatattcaaaaagtgaaataa

SEQ ID NO: 30382 - protein, 484 aa, Streptococcus pyogenes MGAS10394
MTYEVKSLNEECGVFGIWGHPQAAQVTYFGLHSLQHRGQEGAGIVSNDNGKLYGYRNVGLLSEVFKNQSELDNLTGNAAIGHVRYATAGSADIRNIQPFLYKFHDGQFALCHNGNLTNAISLRKELEKQGAIFNASSDTEILMHLIRRSHNSSFMGKVKEALNTVKGGFAYLLMTENKLIAALDPNAFRPLSIGQMQNGAWVISSETCAFEVVGAKWVRDVEPGEVILIDDRGIQCDRYTDETQLAICSMEYVYFARPDSTIHGVNVHTARKNMGKRLAQEFKQDADIVIGVPNSSLSAAMGFAEESGLPNEMGLVKNQYTQRTFIQPTQELREQGVRMKLSAVSGVVKGKRVVMIDDSIVRGTTSRRIVGLLREAGASEVHVAIASPELKYPCFYGIDIQTRRELISANHAVDEVCDIIGADSLTYLSLDGLIESIGLETKAPNGGLCVAYFDGHYPTPLYDYEEEYLRSLEEKTSFYIQKVK

SEQ ID NO: 30383 - DNA, 1560 bp, Leifsonia xyli subsp. xyli str. CTCB07
  CDS (1)..(1560): transl_table=11
gtggccggaggagacggtcgtctcagccatgatctgctgcccggcgagaaggggccgcaggatgcttgcggtgtcttcggtgtgtgggcccccggcgaggaggtcgctaagctcagctacttcggcctctatgccctgcagcaccgcggccaggagtcggcgggcatcgcgacgagcgacgacgagaagatcctcatctacaaggacatgggcctggtctcccaggtcttcaacgagaacgcgctcaactcgctgaccggccacatcgccgtcggccacacacgatattcgaccaccggcgcctccagctggcagaacgcgcagccgaccctcggctccacctccggcggcacggtcgcgctcgggcacaacggcaacctgacgaacaccgccgagctgatggagctggtgcaggagcgctacccagcgcacgacggcgagctctcccgcggcaacacgaccgacacggccgtcgtcaccgccctgctcaccggcgatctcgaccacacgctcgaagagaccgcgctggaagtcctgccgcgtctgcgcggagcgttctgtctcgtcttcatggacgagcacacgctctacgccgcccgcgatccgcagggcgtccgcccgctggtgctcggccgcctggagcgcggctgggtcgtcgcgtcggagaccgcggcgctcgacatcgtcggcgcgagcttcgtgcgcgaggtcgagccgggcgagttcatcgccatcgacgagaacggcctgcgcagcagccgcttcgccgccgagaagcgcgcgggatgcgtcttcgaatacgtctacctcgcccgccccgacaccaccatcgccggccgcggagtctacgaggcgcgggtcgagatgggccgccagctcgcgcgtgagcacgaggtggcggccgatctcgtcatcccgacgcccgagtccggcacgcccgccgcgatcggctatgcgcaggccgctggcgtcccgttcggtcagggtctcgtgaagaactcgtacgtcggccgcaccttcatccagccgtcgcagaccatccgccagcgcggcatcaagctgaagctgaaccccctgaaggacgtcatcaagggcaagcgtctcgtcgtggtggacgattcgatcgtccgcggcaacacgcagcgtgcgctggtctcgatgctgcgcgaggccggagcggcggaggtgcatgtgcgtatctccagcccgcccatcacctggccgtgcttctacggaatcgacttcgcctcccgcgcggagctcatcgccaccggcctcggcgtcgaggaagtgcgccagtctatcggcgccgactccctcggctatctctccgaggacgggatgatcgcctccaccgagcagccccgcgagtgcctctgcaccgcgtgctttaccggcgtctacccgatcgcgctgcccgccgcccagcacctcggcaagaacctgctggaacgcccggcggcggagggcgctgccgccaccggcgacggctgcgagcccggcccggattcggagcatgagcgcctgctggcgttcggggacccgggacggcaggagtaa

SEQ ID NO: 30384 - protein, 519 aa, Leifsonia xyli subsp. xyli str. CTCB07
MAGGDGRLSHDLLPGEKGPQDACGVFGVWAPGEEVAKLSYFGLYALQHRGQESAGIATSDDEKILIYKDMGLVSQVFNENALNSLTGHIAVGHTRYSTTGASSWQNAQPTLGSTSGGTVALGHNGNLTNTAELMELVQERYPAHDGELSRGNTTDTAVVTALLTGDLDHTLEETALEVLPRLRGAFCLVFMDEHTLYAARDPQGVRPLVLGRLERGWVVASETAALDIVGASFVREVEPGEFIAIDENGLRSSRFAAEKRAGCVFEYVYLARPDTTIAGRGVYEARVEMGRQLAREHEVAADLVIPTPESGTPAAIGYAQAAGVPFGQGLVKNSYVGRTFIQPSQTIRQRGIKLKLNPLKDVIKGKRLVVVDDSIVRGNTQRALVSMLREAGAAEVHVRISSPPITWPCFYGIDFASRAELIATGLGVEEVRQSIGADSLGYLSEDGMIASTEQPRECLCTACFTGVYPIALPAAQHLGKNLLERPAAEGAAATGDGCEPGPDSEHERLLAFGDPGRQE

SEQ ID NO: 30385 - DNA, 1440 bp, Desulfotalea psychrophila LSv54
  CDS (1)..(1440): transl_table=11
atgtcacaggtaaaaacattatccgcgtcccaggactaccccacccacgaatgtggtgtttgcggtattttcgaccatgaagatgctgcaaagctcacctacttcggcctctatgccctccagcaccgtggccaagaaagtgcgggaattgttacatcaaccggcaaagaggtctttcttcacaaagatatgggacttgtgcccgagatctttaccgaagatatcctgcaaggacttaaaggggacatgtccatcggccatgtacgctactccaccaccggtgcgtccaacttcaccaatacccaacccctgatggttcaccataagaaccagaccctctccgttgcccacaatggcaacctggtgaactccaccgagctcagaaacaggctcgaggagagtggttctatctttcaaaccaccatggactccgaggccgtcctccatctcatggtacgcaacagcggtcccgatctcgataaaacactgagcgagacattccgtgccctcaagggtgcctattccctgctctatatgaccgaggacaccctcgttgccgtccgtgatcccgatggatttcgccccctctgccttggtcgcctgaccactggcggctgggttatagcctctgaaacctgcgccctcgacctcatcgaggccgattatgtacgtgatatcgagccgggtgaagttcttatcatgaaaagaggtgaggagatgcgctccatcttcccatggccaaaacagaccccgcaccactgcatctttgagcaggtctactttgcccgtcccgattccgatgtctttggtatcaacgtctatcaatcacgtaagcagatgggtaagatcctggcccgcgaggcaaagattgatgccgatttcgttatgccctttcctgattccggtaactatgcggccattggctatgcacaggaatccggtattcccatggagatgggcgtgatcagaaatcactatgtgggcaggacattcattgaaccaagccagtccatgcgtgacttcaacgtcaaggtcaagctcaaccccgtacgatctctcttgaagggaaaacgggttatcatcgttgaggattctattatccgaggaacaacaggtaagagtcgggtacgagccctacgcgaggcgggggccaaagagatccacatggtggtcagctgtcctccgaccatgcatgcctgctactatggcatcgatttcccaacctcatcacagctcattgcctgcaataagaacgtcgaagaaatcgcagaatatctgggcctggactctctccactacctcagccttgagggcatggtagaggcaacgggtatccctaaagagcactactgtctggcctgtttcaatggcatttaccccatcgcccctgatcaaaaatatcacaaagacgctctggcaacaaaggttgtcaagggctag

SEQ ID NO: 30386 - protein, 479 aa, Desulfotalea psychrophila LSv54
MSQVKTLSASQDYPTHECGVCGIFDHEDAAKLTYFGLYALQHRGQESAGIVTSTGKEVFLHKDMGLVPEIFTEDILQGLKGDMSIGHVRYSTTGASNFTNTQPLMVHHKNQTLSVAHNGNLVNSTELRNRLEESGSIFQTTMDSEAVLHLMVRNSGPDLDKTLSETFRALKGAYSLLYMTEDTLVAVRDPDGFRPLCLGRLTTGGWVIASETCALDLIEADYVRDIEPGEVLIMKRGEEMRSIFPWPKQTPHHCIFEQVYFARPDSDVFGINVYQSRKQMGKILAREAKIDADFVMPFPDSGNYAAIGYAQESGIPMEMGVIRNHYVGRTFIEPSQSMRDFNVKVKLNPVRSLLKGKRVIIVEDSIIRGTTGKSRVRALREAGAKEIHMVVSCPPTMHACYYGIDFPTSSQLIACNKNVEEIAEYLGLDSLHYLSLEGMVEATGIPKEHYCLACFNGIYPIAPDQKYHKDALATKVVKG

SEQ ID NO: 30387 - DNA, 1518 bp, Yersinia pseudotuberculosis IP 32953
  CDS (1)..(1518): transl_table=11
atgtgcggtattgtcggtatcgccggttttacaccggtaaaccagtcgatttatgatgcgttgatggtgcttcagcatcggggtcaggatgcggcgggtattgttaccattgatgcccataatgggttccgtctgcggaaagcgaacggcttggtgaaggatgtatttgaaacccggcatatgctgcgtttacaggggaatatggggattggtcatgttcgttacccaacggcaggcagctccagcgcttctgaagctcaacctttctatgttaactcaccgtttggcattaccctggctcacaatggtaatctgactaacgctcaccaactgagaaagaaattattcgaagtttctcgtcgtcatgtaaataccacgtctgactcagaaattctgttgaatatttttgccagtgaattggatcgtttccagcattatccgttggagtctgacaacatttttgccgctgttgccgcgacgcaccagttgattcgtggtgcttatgcctgcgtcgcaatgattatcggccacggtatggtcgctttccgtgaccccaacggtattcgtccgctggtaattggtaaacgcacgctggctgatgggcgcaatgagtatatggttgcgtccgaaagtgtggctttggatacacttgattttgaattcttgcgtgatgttgcaccgggcgaagccgtgtatatcaccgagaaaggccaactgttcacgcgtcagtgtgctgagaatccaaaatacaacccatgcttgtttgaatatgtttattttgcccgcccagactcctttatggataaaatttctgtttacagtgcgcgcgtccgcatggggcagaagttggggaccaaaatagccaaacagtgggaagacatggatatcgatgttgtcattcctattccagaaacctcttgcgatatcgcactggaaattgcccgaattctggataaaccgtaccgtcaggggtttgtcaaaaaccgttatgtcgggcgtacatttatcatgccgggtcagcaagaacgccgtaaatcggtgcgtcgtaagctgaatgctaatcgtgctgagttccgtggtaaaaacgtgttattggtggatgattccattgttcgcgggaccacgtcagagcagattgtcgaaatggcacgggaagctggggcgaaaaaagtgtactttgcgtcggcagcacctgaaatccgtttcccgaatgtgtacggtatcgatatgccaagtgctaatgagttgattgctcatggccgtgaagttgatgaaattcgtcagttgattggcgccgatgcactgattttccaagatcttactgatcttattgatgcagtacgtgaagataatccagacattacccagttcgaatgttctgtctttaatggtatttacgtgacgaaagatgtggatcagagctatctggaatatcttgagtcattacgtaacgacgatgcgcaggcattgcgtagccacaatgaagcggaaaatttagagatgcataacgaaggttaa

SEQ ID NO: 30388 - protein, 505 aa, Yersinia pseudotuberculosis IP 32953
MCGIVGIAGFTPVNQSIYDALMVLQHRGQDAAGIVTIDAHNGFRLRKANGLVKDVFETRHMLRLQGNMGIGHVRYPTAGSSSASEAQPFYVNSPFGITLAHNGNLTNAHQLRKKLFEVSRRHVNTTSDSEILLNIFASELDRFQHYPLESDNIFAAVAATHQLIRGAYACVAMIIGHGMVAFRDPNGIRPLVIGKRTLADGRNEYMVASESVALDTLDFEFLRDVAPGEAVYITEKGQLFTRQCAENPKYNPCLFEYVYFARPDSFMDKISVYSARVRMGQKLGTKIAKQWEDMDIDVVIPIPETSCDIALEIARILDKPYRQGFVKNRYVGRTFIMPGQQERRKSVRRKLNANRAEFRGKNVLLVDDSIVRGTTSEQIVEMAREAGAKKVYFASAAPEIRFPNVYGIDMPSANELIAHGREVDEIRQLIGADALIFQDLTDLIDAVREDNPDITQFECSVFNGIYVTKDVDQSYLEYLESLRNDDAQALRSHNEAENLEMHNEG

SEQ ID NO: 30389 - DNA, 1488 bp, Symbiobacterium thermophilum IAM 14863
  CDS (1)..(1488): transl_table=11
gtgatccggcccggtgacccgaccctggccctggccctgcagccctacctgggcgggtggccgaccaacccggacaagggcccggcggacgagtgcggcgtcttcggcatctacggccaccctgaggcggcgcgggtggtgtaccacgccctgatcgccctgcagcaccgggggcaggagtccgcgggcatcgtggccgcggacggtgcgaacctgaacacccaccggggcatggggctggtcagcgacgtgttcgagaagcccgagaccatccagcggctggccggcgacatcgccatcggccacgtgcggtattcgaccaccggctcctcccggctgggcaacgcccagcccgtggtggtgaacacccggcgcggcggactggccctggcgcacaacggcaacctcgtggacgccccggccatccgggaccggctggaggagcagggggcgatcttcaccacgtccatcgacaccgaggtgctggcccacctgatcgtccgttcccgggcgaagagcctggaggacgcgatcgtcgacgccgtgagccaggtgcacggcggctatgccctgctcatcctggccgaggaccggctgatcggcatccgggatccccacggcatccgcccgctgcagctgggccggcttgacggcagctgggtgctggcctccgagacctgcgcctttgacaccatcggcgcggagttcgtgcgggaggtggcccccggcgagatggtgaccatcagcgaggggggcaagctccggtcccgggcggcggtcagggaggccgtcgccccccggccgtgcatcttcgagttcatctacttcgcccgtcccgactcgcagttcgtcggggtcaacgtgcacaccgtgcgcaaggcgatgggccgccagctcgcgaaggaggcgccggcggatgccgacatcgtcatcggggtgcccgactcctcgatctccgcggccaccggctacgcggaggagtccggcatcccctacgaggtcgggctggtcaagaaccgctacatcgcccggacgttcatcctgccgtcccaggccgggcgcgagtcggcgctgaagctgaagctgaacccgctgcgcaaggtgatcgagggcaggcgggtggtgctggtggacgactccatcgtgcgcggcaccacgtcccgccacctggtgagcctcctccgggaggccggggcgcgggaggtgcacctgcgcatcgcatcgccgccgtaccagaacgcctgccactacggcatcgatacctccaagtccaccgacctgatcgcccgcgggcgcacggtccgggagatcgccgacgccatcggcgccgactccctggcctacctctcggtggagggcatggtgaaggccaccggcctgtcgccggaagcgggcttctgcctggcctgcttcaccggcgactacccggtgcccgtgccggaagaggccgacaagtacgcgctggaggggggctgcggctgtgactga

SEQ ID NO: 30390 - protein, 495 aa, Symbiobacterium thermophilum IAM 14863
MIRPGDPTLALALQPYLGGWPTNPDKGPADECGVFGIYGHPEAARVVYHALIALQHRGQESAGIVAADGANLNTHRGMGLVSDVFEKPETIQRLAGDIAIGHVRYSTTGSSRLGNAQPVVVNTRRGGLALAHNGNLVDAPAIRDRLEEQGAIFTTSIDTEVLAHLIVRSRAKSLEDAIVDAVSQVHGGYALLILAEDRLIGIRDPHGIRPLQLGRLDGSWVLASETCAFDTIGAEFVREVAPGEMVTISEGGKLRSRAAVREAVAPRPCIFEFIYFARPDSQFVGVNVHTVRKAMGRQLAKEAPADADIVIGVPDSSISAATGYAEESGIPYEVGLVKNRYIARTFILPSQAGRESALKLKLNPLRKVIEGRRVVLVDDSIVRGTTSRHLVSLLREAGAREVHLRIASPPYQNACHYGIDTSKSTDLIARGRTVREIADAIGADSLAYLSVEGMVKATGLSPEAGFCLACFTGDYPVPVPEEADKYALEGGCGCD

SEQ ID NO: 30391 - DNA, 1431 bp, Bacillus licheniformis ATCC 14580
  CDS (1)..(1431): transl_table=11
atgcttgctgaaatcaaaggcttaaatgaagaatgcggcgtatttgggatttgggggcatgaagaagcaccgcaaattacgtactacggccttcacagccttcagcacagaggccaggagggcgccggcatcgtcgcgacagacggcgaaaaaatgtccgcccacaaaggccaggggctgattaccgaagtttttcaaaacggtgagctcaaaaaggtgaaaggaaagggagcgatcggccacgtccgctatgcaacggcgggcggcggcggcttcgaaaacgtccagccgttccttttccattcgcaaaacaacggcagccttgcgcttgcgcacaatggaaacttagtgaacgccactcagctaaaacagcagcttgaaaaccagggcagcatttttcaaacgtcttcagatacggaagtgctcgcccatttaattaaaagaagcggccacttcgagctgaaagatcaaatcaaaaacgctctttctatgctgaaaggcgcttatgctttcctgatcatgacggaaaaggaaatgatcgtggcgcatgatccgaacggactcagaccgctatctgtcgcaatgcttggcgacgcgtacgtcgtcgcttctgaaacgtgcgcatttgatgtggtcggcgcgacatatctgcgcgatgtagaaccgggcgagatgctgatcatcaatgatgaaggcatgaagtcagagcggttctccatcaacatcaaccgttcgatctgcagcatggagtacatttatttctcaagacctgacagcaatattaacggcattaacgtccacagcgcgagaaagaatctcggcaaaaagctcgccgaggaatcaggcattgaagcagatgtggtgacaggcgttcctgactcaagcatttcagcggcgatcggctatgccgaagcgacgggaattccttacgaactcggattgatcaaaaaccgctatgtcggcagaacgttcattcagccgtcacagtcgctcagggagcagggcgtgagaatgaagctgtcagccgtccgcggggtcgttgaaggaaagcgcgtcgtcatggtggacgattcaatcgtgaggggcacgacgagccgcaggattgtgacgatgctgcgcgaagccggagcgacggaagtgcacgtcagaatcagttccccgcctattgcccatccgtgcttttacggaattgacacatcgacgcacgaagaactgatcgcgtcctctcattcagtggaagaaatccgtcaggaaatcggcgccgatacattgtcattcttgagcattgaaggactcctttccgggatcggaagacagtatgaaggtgaaaactgcggccagtgcatggcctgttttacaggaaaatatccgaccgaaatttatcaggatactgttcttcctcacgtgaaagaaatcgttttgacaaaataa

SEQ ID NO: 30392 - protein, 476 aa, Bacillus licheniformis ATCC 14580
MLAEIKGLNEECGVFGIWGHEEAPQITYYGLHSLQHRGQEGAGIVATDGEKMSAHKGQGLITEVFQNGELKKVKGKGAIGHVRYATAGGGGFENVQPFLFHSQNNGSLALAHNGNLVNATQLKQQLENQGSIFQTSSDTEVLAHLIKRSGHFELKDQIKNALSMLKGAYAFLIMTEKEMIVAHDPNGLRPLSVAMLGDAYVVASETCAFDVVGATYLRDVEPGEMLIINDEGMKSERFSININRSICSMEYIYFSRPDSNINGINVHSARKNLGKKLAEESGIEADVVTGVPDSSISAAIGYAEATGIPYELGLIKNRYVGRTFIQPSQSLREQGVRMKLSAVRGVVEGKRVVMVDDSIVRGTTSRRIVTMLREAGATEVHVRISSPPIAHPCFYGIDTSTHEELIASSHSVEEIRQEIGADTLSFLSIEGLLSGIGRQYEGENCGQCMACFTGKYPTEIYQDTVLPHVKEIVLTK

SEQ ID NO: 30393 - DNA, 1512 bp, Mannheimia succiniciproducens MBEL55E
  CDS (1)..(1512): transl_table=11
atgtgtggtattgttggaattgtaagtcaaagcccggtcaatcaatcaatttatgatgccttgaccgtattgcagcatcgcggacaggatgctgccgggattgtgactattgatgatgaaaaccgctttcgcttgcgtaaagccaacggtttggtaagcgatgtgttccaacaggttcacatgacgcgtttacagggcaacgcggggattggacacgttcgttatccgacagccggtagctcaagcgtatcggaagcgcaacctttctatgtcaattcgccttacggcttatcattagtgcataacggcaaccttacaaattccgacgaattaaaatccaaacttttcaaattagcccgtcgtcacgtcaatactaattccgactccgaagcattgttaaatattctggcttattatcttgatcatatgcaaaccgagcatctttcaccggaagatattttttatgcgatcaaaaaaacccataaagatattcgcggcgcttatgcctgtatcgctatgattatcggtcacggtatggtggcgttcagagatcctcacggcattcgcccgttaattttgggtaaacgcgaagagagcggaaaaaccgaatatatgtttgcttcggaatctgttgcattagacaccgccggttttgacgtggtacgtgatattgaacccggcgaagcggtatatatcactttcgacggcaaactctacgcggagcaatgtgcggaaaatccggtgttaacgccttgtattttcgaatacgtttattttgcccgtccggattcgactattgacggcgtatcggtatatgcggcgcgcgtacatatgggtgaacgtttggggcaaaaaattgccaacgaatgggctgatgcggatattgatgtggtcattccggtgcctgaaacatccaatgatatcgcattaagaatcgcaaccatattgggcaaaccttaccgtcagggtttcgtaaaaaaccgttatgtgggacgcacatttattatgccggggcaaaaacagcgtattagtgcggttcgccgtaaattaaatacgatttcttccgaatttaaggataaaaacgtgttattagtggatgattccatcgtgcgcggtacaacttcggaacaaatcgttgatatggcgcgtgccgccggcgcgaagaaaatttattttgcttcggcagcgcctgaaattcgctatccgaatgtgtatggcattgatatgccgaccaagcacgaattaatcgcttatggccgcgagcctgaggaaattgccaaattaatcggcgtggataagctcatttttcaggatttatcggcattaacgcagtccgtacagcaagaaaatccaaatatcaaagaatttgatacttcggtatttaccggacattatgtgacgggcgatatttccaccgaatatctggataatattgcgcaacagcgtaatgacgcggcaaaaagaaaacgcgcaaaagatgcgacaaatctggaaatccataacgaaggataa

SEQ ID NO: 30394 - protein, 503 aa, Mannheimia succiniciproducens MBEL55E
MCGIVGIVSQSPVNQSIYDALTVLQHRGQDAAGIVTIDDENRFRLRKANGLVSDVFQQVHMTRLQGNAGIGHVRYPTAGSSSVSEAQPFYVNSPYGLSLVHNGNLTNSDELKSKLFKLARRHVNTNSDSEALLNILAYYLDHMQTEHLSPEDIFYAIKKTHKDIRGAYACIAMIIGHGMVAFRDPHGIRPLILGKREESGKTEYMFASESVALDTAGFDVVRDIEPGEAVYITFDGKLYAEQCAENPVLTPCIFEYVYFARPDSTIDGVSVYAARVHMGERLGQKIANEWADADIDVVIPVPETSNDIALRIATILGKPYRQGFVKNRYVGRTFIMPGQKQRISAVRRKLNTISSEFKDKNVLLVDDSIVRGTTSEQIVDMARAAGAKKIYFASAAPEIRYPNVYGIDMPTKHELIAYGREPEEIAKLIGVDKLIFQDLSALTQSVQQENPNIKEFDTSVFTGHYVTGDISTEYLDNIAQQRNDAAKRKRAKDATNLEIHNEG

SEQ ID NO: 30395 - DNA, 1485 bp, Bacillus licheniformis ATCC 14580
  CDS (1)..(1485): transl_table=11
atggattcatgcgcagacagaagagctcgaaagcgcatggaaaggagctatcccatgcttgctgaaatcaaaggcttaaatgaagaatgcggcgtatttgggatttgggggcatgaagaagcaccgcaaattacgtactacggccttcacagccttcagcacagaggccaggagggcgccggcatcgtcgcgacagacggcgaaaaaatgtccgcccacaaaggccaggggctgattaccgaagtttttcaaaacggtgagctcaaaaaggtgaaaggaaagggagcgatcggccacgtccgctatgcaacggcgggcggcggcggcttcgaaaacgtccagccgttccttttccattcgcaaaacaacggcagccttgcgcttgcgcacaatggaaacttagtgaacgccactcagctaaaacagcagcttgaaaaccagggcagcatttttcaaacgtcttcagatacggaagtgctcgcccatttaattaaaagaagcggccacttcgagctgaaagatcaaatcaaaaacgctctttctatgctgaaaggcgcttatgctttcctgatcatgacggaaaaggaaatgatcgtggcgcatgatccgaacggactcagaccgctatctgtcgcaatgcttggcgacgcgtacgtcgtcgcttctgaaacgtgcgcatttgatgtggtcggcgcgacatatctgcgcgatgtagaaccgggcgagatgctgatcatcaatgatgaaggcatgaagtcagagcggttctccatcaacatcaaccgttcgatctgcagcatggagtacatttatttctcaagacctgacagcaatattaacggcattaacgtccacagcgcgagaaagaatctcggcaaaaagctcgccgaggaatcaggcattgaagcagatgtggtgacaggcgttcctgactcaagcatttcagcggcgatcggctatgccgaagcgacgggaattccttacgaactcggattgatcaaaaaccgctatgtcggcagaacgttcattcagccgtcacagtcgctcagggagcagggcgtgagaatgaagctgtcagccgtccgcggggtcgttgaaggaaagcgcgtcgtcatggtggacgattcaatcgtgaggggcacgacgagccgcaggattgtgacgatgctgcgcgaagccggagcgacggaagtgcacgtcagaatcagttccccgcctattgcccatccgtgcttttacggaattgacacatcgacgcacgaagaactgatcgcgtcctctcattcagtggaagaaatccgtcaggaaatcggcgccgatacattgtcattcttgagcattgaaggactcctttccgggatcggaagacagtatgaaggtgaaaactgcggccagtgcatggcctgttttacaggaaaatatccgaccgaaatttatcaggatactgttcttcctcacgtgaaagaaatcgttttgacaaaataa

SEQ ID NO: 30396 - protein, 494 aa, Bacillus licheniformis ATCC 14580
MDSCADRRARKRMERSYPMLAEIKGLNEECGVFGIWGHEEAPQITYYGLHSLQHRGQEGAGIVATDGEKMSAHKGQGLITEVFQNGELKKVKGKGAIGHVRYATAGGGGFENVQPFLFHSQNNGSLALAHNGNLVNATQLKQQLENQGSIFQTSSDTEVLAHLIKRSGHFELKDQIKNALSMLKGAYAFLIMTEKEMIVAHDPNGLRPLSVAMLGDAYVVASETCAFDVVGATYLRDVEPGEMLIINDEGMKSERFSININRSICSMEYIYFSRPDSNINGINVHSARKNLGKKLAEESGIEADVVTGVPDSSISAAIGYAEATGIPYELGLIKNRYVGRTFIQPSQSLREQGVRMKLSAVRGVVEGKRVVMVDDSIVRGTTSRRIVTMLREAGATEVHVRISSPPIAHPCFYGIDTSTHEELIASSHSVEEIRQEIGADTLSFLSIEGLLSGIGRQYEGENCGQCMACFTGKYPTEIYQDTVLPHVKEIVLTK

SEQ ID NO: 30397 - DNA, 1500 bp, Legionella pneumophila subsp. pneumophila str. Philadelphia 1
  CDS (1)..(1500): transl_table=11
atgtgtggcattgtaggaatttacagtcatgaacccgttgctgctgagctttatgatagcttgattcatttacagcaccgggggcaagatgcctcaggtattttaaccggagctgatcgtttttacttcaaacatggacttggactggtcagagagtctattttctctgaagatattcttaaactgaaggggaatatcggcattgctcatgtgcgttatcccacggccggaggttatagtgaagcggatgttcagcctctttggatagggagccctcgcggtatagctttggctcataatggaaatttagtgaattatggagagttggttgatgatttatgcggaaaacagcataggcatttaaactctactcttgattctgaggcacttttattacttctggcagactatttagccaagggatcttattccgatcatgatgaagagcaattctttcaattactatgtatggcagttaatgaaatacatcaacgagttcagggttcctattctgttgtgagtttagtaattggcaaaggtttggttgcatttagggatccgcatggtatccgtcctttagtttggggtgagcgagtccatgaaaatggtagtaaagattatatttttgcttcagaaaccacccctttttatgctttaggttttgagcccaagggtgatttgcagcccggtgaagttgcttacgtgaatcagcaaggacaattgtacagaaaagtgctttcatcaaaaaaatttaccccttgtatatttgaatacgtttacttcgccagaccagatgccacattagacgatgtgagcgtttatcgagccagattacgtatggggcaaaatttagctaaaagctggaaaaagagatttccagatacactacctgatgtggtgattccagccccttcaacagcaaatactgccgcattagcttttgcaaatgagttgggaatacgttattccgaaggtttatataaaaatccttttattggacgtacttttattatgcctaatcaggagtcgcgatcaagacaggttcgttataaattaactcctcagaaaacggaaattaataaaaaaaaggtattaatcgttgatgacagtatcgtaaggggaactacctcacgcgaaatagtcagaatgatacgagaatatggtgcatcagaaatatattttgtatcaacctgtccaccaattaaaaacccttgtttctacgggattgatatcccatcgcgtaaaaaattgatagcagcccataaaacggaagaggaaatccgtcaatttctaggggtggataaattattataccaaactcaggaaaaccttatagaggctgtgtctcgcagggggcaatatgacatgagcaagccttgtatggcttgtatggatggtaaatacatttgtggacagattactgaagaaaaaattaaattgttggagaaaaaaagattaaccgagaatgaccaagaaacagagataggagagatgtcttga

SEQ ID NO: 30398 - protein, 499 aa, Legionella pneumophila subsp. pneumophila str. Philadelphia 1
MCGIVGIYSHEPVAAELYDSLIHLQHRGQDASGILTGADRFYFKHGLGLVRESIFSEDILKLKGNIGIAHVRYPTAGGYSEADVQPLWIGSPRGIALAHNGNLVNYGELVDDLCGKQHRHLNSTLDSEALLLLLADYLAKGSYSDHDEEQFFQLLCMAVNEIHQRVQGSYSVVSLVIGKGLVAFRDPHGIRPLVWGERVHENGSKDYIFASETTPFYALGFEPKGDLQPGEVAYVNQQGQLYRKVLSSKKFTPCIFEYVYFARPDATLDDVSVYRARLRMGQNLAKSWKKRFPDTLPDVVIPAPSTANTAALAFANELGIRYSEGLYKNPFIGRTFIMPNQESRSRQVRYKLTPQKTEINKKKVLIVDDSIVRGTTSREIVRMIREYGASEIYFVSTCPPIKNPCFYGIDIPSRKKLIAAHKTEEEIRQFLGVDKLLYQTQENLIEAVSRRGQYDMSKPCMACMDGKYICGQITEEKIKLLEKKRLTENDQETEIGEMS

SEQ ID NO: 30399 - DNA, 1407 bp, Bacteroides fragilis YCH46
  CDS (1)..(1407): transl_table=11
atgggaggttttttcggaacagtctcgaaaacgagctgtgtgaccgatttattctacggcacagactataactcacacctgggaacaaaacggggaggacttgcgacatatagtgaagaacagggatttatccgctcgattcataacctgcagagttcatatttccgtaccaaatttgaggaagaactggataaatttaaaggaaatgccggtatcggtattatcagtgatacagacgcccaacctattattattaactcacatctcggtagatttgccattgttacggttgctaaggtcacaaaccttaaagaactcgaagaggaactactttcacaaaacatgcatttcgccgaacttagttcgggtagtaccaatcaaacggaacttatcgctttattgattattcagggtaaaaattttgtagaaggaatagagaatgtatataaccatataaaaggttcgtgttctatgcttctgttgacagaagatggagtgattgccgcacgagataaatggggacgtactcctattgttatcgggaaaaaggagggcgcttatgcagccacgagtgaatctaacagttttccgaatcttgattttgaaatagaacgctatttaggacccggtgaaatagtccgtatgcatgctgaccgtcttgaacaacttcgcaagcctgatgacaaaatgcaaatctgttcatttttgtgggtgtattacggttttcccaattcatgttatgaaggccggaatgtagaagaggtacgctttacgagcgggttgaaaatgggtgaacaagatgactgcgatgctgattgtgtttgtggaattccggattcgggtatcgggcaggcattgggttatgcagaagggaaaggcattccttatcatcgtgctattaccaagtatactcctacctggccccgtagttttactccgagcaagcaggaattacgttctttggtggcaaagatgaagttgatccctaaccgtgctatgctccaagataagcgtattattttttgtgatgactccattgtgcgtggtacgcagttgcatgataatgtgaagattctttttgattatggtgcaaaagaggtacatatgcgtatcggatgcccaccgcttatttatggctgtccgtttattggttttacagcttcaaagtcggatatggaacttatcaccaggcagataataaaagaactggagggagatgaaaataagaatttggataaatatgctactacaggttcgccggaatatgagaagatggtaggcatcatcgccaagcgtttcggactttcgtctctcaaattcaacacgattgaaacactgattgaagccatcggattgccaaagtgtaaagtttgtacccattgttttgacggatccagttgtttctaa

SEQ ID NO: 30400 - protein, 468 aa, Bacteroides fragilis YCH46
MGGFFGTVSKTSCVTDLFYGTDYNSHLGTKRGGLATYSEEQGFIRSIHNLQSSYFRTKFEEELDKFKGNAGIGIISDTDAQPIIINSHLGRFAIVTVAKVTNLKELEEELLSQNMHFAELSSGSTNQTELIALLIIQGKNFVEGIENVYNHIKGSCSMLLLTEDGVIAARDKWGRTPIVIGKKEGAYAATSESNSFPNLDFEIERYLGPGEIVRMHADRLEQLRKPDDKMQICSFLWVYYGFPNSCYEGRNVEEVRFTSGLKMGEQDDCDADCVCGIPDSGIGQALGYAEGKGIPYHRAITKYTPTWPRSFTPSKQELRSLVAKMKLIPNRAMLQDKRIIFCDDSIVRGTQLHDNVKILFDYGAKEVHMRIGCPPLIYGCPFIGFTASKSDMELITRQIIKELEGDENKNLDKYATTGSPEYEKMVGIIAKRFGLSSLKFNTIETLIEAIGLPKCKVCTHCFDGSSCF

SEQ ID NO: 30401 - DNA, 1884 bp, Bacteroides fragilis YCH46
  CDS (1)..(1884): transl_table=11
atggaacaactgaaacatgaatgtggcgttgccatgatacgtttgcttaaaccgctggagtactatgaaaagaagtacggaacgtggatgtacgggctgaataagctctatctgctgatggaaaagcagcataaccgtggtcaggaaggtgccggtctggcgtgtgtgaaactggaagcaaatccgggtgaggagtatatgttccgtgagcgggcattgggttccggtgccatcaccgagatatttgagacagtacaaagcaacttcaaggatctgagcaaagaacagttgcacgatgccgcgtttgccaaacggacgctgccttttgccggagaagcttatatggggcatctgcgttactcgactaccggaaaatccgggatatcttatgttcatccgtttctcagaagaaataactggcgggcgaagaatcttgctctttgcggcaacttcaacatgactaatgtggatgaaatttttgcccgtatcacagccatcggccagcatccccgtaagtatgccgatacgtatattatgttggaacaagtggggcacaggctcgaccgtgaagtggaacgtctctttaacctggctgaggctgaaggcctgaccggcatgggcgtgacgcattacattgaggaccacatcgaccttgccaacgtgttgcgcacgtcgagtaaagaatgggacggggggtatgtgatgtgcggactgaccggtagcggagagagctttgcattgcgtgacccgtgggggattcgtccggtgttctggtatcaggatgacgagattgcggtgcttgcttccgaacgtccggtgattcagacggcactcaatgttccgataggagaaatcagggaattactgccgggacaggccctcctgatcagtaaagagggaaagttgcgtacggcacagatcaataaggcacgggagaagaaagcctgttcgttcgagcggatctacttctcgcgaggcagtgacgcggatatttacaaggagagaaaacaactgggtgagaaactggttccgaacatcctgaaagcgattgataatgacctcgaccataccgtcttctcgttcatcccgaatacggcagaggtggcattttacggtatgcttcaggggctggacaattatctgaatgaggagaaggtgcggcagattgcgagcctgggacatcatccggatcacgatgaactggaagtgattctgtcccgccgtatccgttcggagaaagtggctatcaaagatatcaaactgcgcactttcattgccgagggcaatagccggaatgacttggcagcacacgtatatgacatcacatacggcagtctccgttccggtatcgacaatctggtgattatcgacgacagcattgttcgcggtactactctgaaacagagtattatcggtatcctcgaccgtctgggaccgaagaagatagtcatcgtctcttcttctccgcaagttcgctatcccgactattacggtattgatatggcgaagatgtccgaattcatcgcctttaaagctgcaattgaattgctgaaggaccgggatatgaaagatgtgatcgcatcggcttaccggaagtcgaaagatcaggtgggactgccgaaagagcagatggtaaactatgtgaaggatatttatgctcctttcaccgatgaggagatttcggagaagatggtggaactgctgacgccgaaaggaacgaaagcgaaagtgcagattgtctaccagccgctcgaggggctgcacgaggcgtgtcccaatcatacgggagactggtacttcagtggcaactatcctacaccgggcggggtgaagctgctgaacgaagcatttattaactacatcgagcaggtgtaccaattttaa

SEQ ID NO: 30402 - protein, 627 aa, Bacteroides fragilis YCH46
MEQLKHECGVAMIRLLKPLEYYEKKYGTWMYGLNKLYLLMEKQHNRGQEGAGLACVKLEANPGEEYMFRERALGSGAITEIFETVQSNFKDLSKEQLHDAAFAKRTLPFAGEAYMGHLRYSTTGKSGISYVHPFLRRNNWRAKNLALCGNFNMTNVDEIFARITAIGQHPRKYADTYIMLEQVGHRLDREVERLFNLAEAEGLTGMGVTHYIEDHIDLANVLRTSSKEWDGGYVMCGLTGSGESFALRDPWGIRPVFWYQDDEIAVLASERPVIQTALNVPIGEIRELLPGQALLISKEGKLRTAQINKAREKKACSFERIYFSRGSDADIYKERKQLGEKLVPNILKAIDNDLDHTVFSFIPNTAEVAFYGMLQGLDNYLNEEKVRQIASLGHHPDHDELEVILSRRIRSEKVAIKDIKLRTFIAEGNSRNDLAAHVYDITYGSLRSGIDNLVIIDDSIVRGTTLKQSIIGILDRLGPKKIVIVSSSPQVRYPDYYGIDMAKMSEFIAFKAAIELLKDRDMKDVIASAYRKSKDQVGLPKEQMVNYVKDIYAPFTDEEISEKMVELLTPKGTKAKVQIVYQPLEGLHEACPNHTGDWYFSGNYPTPGGVKLLNEAFINYIEQVYQF

SEQ ID NO: 30403 - DNA, 1536 bp, Burkholderia mallei ATCC 23344
  CDS (1)..(1536): transl_table=11
atgtgcggcatcgtaggcgttatctcccagtccccggtcaaccagctcgtctatgacagcctgctgctgctgcagcatcgcggtcaggacgcggcgggcatcgcgacggcggacggcagcaatttccatatgtacaaggcgaacggcatggtgcgcgacgtgttccgcacgcgcaacatgcgcagcctgcccggcacggccgggatcggtcaggtccgctacccgacggcgggctccgcgtcgagcgaagccgaggcgcaaccgttctacgtgaacgcgccgttcggcatcatcctcgcgcacaacggcaacctgacgaactggcagcagttgaaggacgaaatgttccgcatcgaccgccgccacatcaacacgaactccgacagcgaagtgctgctgaacgtgctcgcgcacgaactgcagctctcgacgacgggcctcgagctcgatcccgattcgctgttcaaggcggtcgcgggcgtgcatcgccgcgcgcacggctcgtatgcgatcgtgtcgctgatcgccggctacggtctgctcgcgtttcgcgatccgttcggcattcgcccgctttgcatcggcaagctcgaaaccgagcagggcaccgagtggatggtggcgtcggaatcggtcgcggtggaaggcatcggcttcgaattcgtccgcgacgtgcagccgggcgaggtggtcttcatcgacgtgaacggcaagttccatagccgccagtgcgcggacaagccgagcctgaacccgtgcatgttcgagtacgtgtatctcgcgcgcccggattcgtgcctcgacggcgtgcccgtctacaacgtgcgcctgcgcatgggcgattacctcgccgagaagatcaggcgcgagctgccgaacgtgccgatcgatgtcgtgatgccgattcccgattcgtcgcggccggccgcgatgcaggtggcggcgaagctcggcgtcgagtatcgcgagggcttcttcaagaaccgctacgtcggccgcacgttcatcatgcccggccaggcggtgcgcaagaagtcggtgcgccagaagttcaacgcgatgagcatcgagttcaaggacaagcacgtgctgatcgtcgacgattcgatcgtgcgcggcaccacgtcgcacgagatcgtgcagatggcgcgcgacgcgggcgcgaaatcggtgatcttcgcgtcggcggcgccgcccgtgaagttcccgaacgtctacgggatcgacatgccgacgcgcggcgaactcgtcgcgcacggccgcaccgacgaggaagtcgcgaagatcatcggcgccgattatctgatctaccaggacgtcggcgatctgcgccgcgcggtgcgcgacatcaacccgtcgctcgaaggcttcgaggcgtcgtgcttcgacggcgactacatcaccggcgacgtcacgcccgagtatctggacgcgatcgagcgcgcccgcctcgcgcccgcgtcgcaggcggaccgcgatccgagcggcgaaggcgccgagcgctcgcagatgaacctgcagctgtcggtcgaatga

SEQ ID NO: 30404 - protein, 511 aa, Burkholderia mallei ATCC 23344
MCGIVGVISQSPVNQLVYDSLLLLQHRGQDAAGIATADGSNFHMYKANGMVRDVFRTRNMRSLPGTAGIGQVRYPTAGSASSEAEAQPFYVNAPFGIILAHNGNLTNWQQLKDEMFRIDRRHINTNSDSEVLLNVLAHELQLSTTGLELDPDSLFKAVAGVHRRAHGSYAIVSLIAGYGLLAFRDPFGIRPLCIGKLETEQGTEWMVASESVAVEGIGFEFVRDVQPGEVVFIDVNGKFHSRQCADKPSLNPCMFEYVYLARPDSCLDGVPVYNVRLRMGDYLAEKIRRELPNVPIDVVMPIPDSSRPAAMQVAAKLGVEYREGFFKNRYVGRTFIMPGQAVRKKSVRQKFNAMSIEFKDKHVLIVDDSIVRGTTSHEIVQMARDAGAKSVIFASAAPPVKFPNVYGIDMPTRGELVAHGRTDEEVAKIIGADYLIYQDVGDLRRAVRDINPSLEGFEASCFDGDYITGDVTPEYLDAIERARLAPASQADRDPSGEGAERSQMNLQLSVE

SEQ ID NO: 30405 - DNA, 1536 bp, Burkholderia pseudomallei K96243
  CDS (1)..(1536): transl_table=11
atgtgcggcatcgtaggcgttatctcccagtccccggtcaaccagctcgtctatgacagcctgctgctgctgcagcatcgcggtcaggacgcggcgggcatcgcgacggcggacggcagcaatttccatatgtacaaggcgaacggcatggtgcgcgacgtgttccgcacgcgcaacatgcgcagcctgcccggcacggccggaatcggtcaggtccgctacccgacggcgggctccgcgtcgagcgaagccgaggcgcaaccgttctacgtgaacgcgccgttcggcatcatcctcgcgcacaacggcaacctgacgaactggcagcagttgaaggacgaaatgttccgcatcgaccgccgccacatcaacacgaactccgacagcgaagtgctgctgaacgtgctcgcgcacgaactgcagctctcgacgacgggcctcgagctcgatcccgattcgctgttcaaggcggtcgcgggcgtgcatcgccgcgcgcacggctcgtatgcgatcgtgtcgctgatcgccggctacggtctgctcgcgtttcgcgatccgttcggcattcgcccgctttgcatcggcaagctcgaaaccgagcagggcaccgagtggatggtggcgtcggaatcggtcgcggtggaaggcatcggcttcgaattcgtccgcgacgtgcagccgggcgaggcggtcttcatcgacgtgaacggcaagttccatagccgccagtgcgcggacaagccgagcctgaacccgtgcatgttcgagtacgtgtatctcgcgcgcccggattcgtgcctcgacggcgtgcccgtctacaacgtacgcctgcgcatgggcgattacctcgccgagaagatcaggcgcgagctgccgaacgtgccgatcgatgtcgtgatgccgattcccgattcgtcgcggccggccgcgatgcaggtggcggcgaagctcggcgtcgagtatcgcgagggcttcttcaagaaccgctacgtcggccgcacgttcatcatgcccggccaggcggtgcgcaagaagtcggtgcgccagaagctcaacgcgatgagcatcgagttcaaggataagcacgtgctgatcgtcgacgattcgatcgtgcgcggcaccacgtcgcacgagatcgtgcagatggcgcgcgacgcgggcgcgaaatcggtgatcttcgcgtcggcggcgccgcccgtgaagttcccgaacgtctacgggatcgacatgccgacgcgcggcgaactcgtcgcgcacggccgcaccgacgaggaagtcgcgaagatcatcggcgccgattatctgatctaccaggacgtcggcgatctgcgccgcgcggtgcgcgacatcaacccgtcgctcgaaggcttcgaggcgtcgtgcttcgacggcgactacatcaccggcgacgtcacgcccgagtatctggacgcgatcgagcgcgcccgcctcgcgcccgcgtcgcaggcggatcgcgatccgagcggcgaaggcgccgagcgctcgcagatgaacctgcagctgtcggtcgaatga

SEQ ID NO: 30406 - protein, 511 aa, Burkholderia pseudomallei K96243
MCGIVGVISQSPVNQLVYDSLLLLQHRGQDAAGIATADGSNFHMYKANGMVRDVFRTRNMRSLPGTAGIGQVRYPTAGSASSEAEAQPFYVNAPFGIILAHNGNLTNWQQLKDEMFRIDRRHINTNSDSEVLLNVLAHELQLSTTGLELDPDSLFKAVAGVHRRAHGSYAIVSLIAGYGLLAFRDPFGIRPLCIGKLETEQGTEWMVASESVAVEGIGFEFVRDVQPGEAVFIDVNGKFHSRQCADKPSLNPCMFEYVYLARPDSCLDGVPVYNVRLRMGDYLAEKIRRELPNVPIDVVMPIPDSSRPAAMQVAAKLGVEYREGFFKNRYVGRTFIMPGQAVRKKSVRQKLNAMSIEFKDKHVLIVDDSIVRGTTSHEIVQMARDAGAKSVIFASAAPPVKFPNVYGIDMPTRGELVAHGRTDEEVAKIIGADYLIYQDVGDLRRAVRDINPSLEGFEASCFDGDYITGDVTPEYLDAIERARLAPASQADRDPSGEGAERSQMNLQLSVE

SEQ ID NO: 30407 - DNA, 1509 bp, Methylococcus capsulatus str. Bath
  CDS (1)..(1509): transl_table=11
atgtgcggaattgccggtatcgtttccaacgatgaggtcaatcaggaactgtacgaggcgctcaccgtgcttcagcatcgcggccaggatgccgccggtatcgtgacctgcgagagggagcggctgcatctgcgcaaggagagcggtctggtgcgggatgtgttccacacccgccacatggtggagctgaaaggcacgatgggcatcggccacgtgcgttatcccactgccggctgttccagcaccgctgaagcgcagccgttctatgtcaattccccgtacggcatctcgctcgcccacaatggcaatctgaccaatgcggcccggctcaaacgcgaactgttccgacaggatcagcgccatatcaacaccgattcggattcggaggttctactcaacgtcttcgcccatgaaatgcagggcatcggcaagctgcgggtatcgccggacgacgtgttccgggccgtttccgcggtgcataggcgctgccgcggtgcctatgccgtggtggcgatggtcaccggtttcggcgtcgtcggcttccgcgatccgcatggcatccgccctctggttttcggcgagcgggaggggcggttcggcaaggactacatgatcgcttccgagagcgtggctctggacgtgctcggcttcgagctggttcgggatgtggcgcccggcgaggcggtcctgatcgagaaggacggtaccctgcatatccgccagtgcgccgaacacgtcgtccattccccatgcatcttcgagttcgtctatttcgcccggccggattccatcatcgacgacatctccgtctacaaggcccggctgcgcatgggggacaagctggccgacaagattctgcgggagcgccccgagcacgacatcgacgtggtcatccccatcccggacaccagccgtacttcggcgctgcagctcgccaaccggctgggcgtgaaatacagcgaaggcttcatcaagaaccgttacatcggccgtaccttcatcatgccggggcagaccctgcgcaagaagtccgtgcggcagaagctcaacgccatcgacctggagttcaagggcaagaacgtgctgctggtggacgactccatcgtgcgtggcaccacctcgacccagatcatccagatggcgcgcgacgccggcgcccgcaaggtctatttcgcctcggcctcgccgccggtgcgctaccctaatgtttacggcatcgacatgccggcggtcgaggagctgatcgcccacggccggaccgacgaacaggtacgggaagcgctgggcgcggactggctggtctatcaggatctggccgatctggtcgagtcggtacagaagggcaacccgtcgatcccccgtttcgacacctcctgcttcgacaaggattacgtcaccggtgacatcgatcaggcctatctcgatcgcctgagcgagcaccgctcggatcatgccaaggccaaacgggatgcggccgcgaccgccatcgatctttacaacaccgtctaa

SEQ ID NO: 30408 - protein, 502 aa, Methylococcus capsulatus str. Bath
MCGIAGIVSNDEVNQELYEALTVLQHRGQDAAGIVTCERERLHLRKESGLVRDVFHTRHMVELKGTMGIGHVRYPTAGCSSTAEAQPFYVNSPYGISLAHNGNLTNAARLKRELFRQDQRHINTDSDSEVLLNVFAHEMQGIGKLRVSPDDVFRAVSAVHRRCRGAYAVVAMVTGFGVVGFRDPHGIRPLVFGEREGRFGKDYMIASESVALDVLGFELVRDVAPGEAVLIEKDGTLHIRQCAEHVVHSPCIFEFVYFARPDSIIDDISVYKARLRMGDKLADKILRERPEHDIDVVIPIPDTSRTSALQLANRLGVKYSEGFIKNRYIGRTFIMPGQTLRKKSVRQKLNAIDLEFKGKNVLLVDDSIVRGTTSTQIIQMARDAGARKVYFASASPPVRYPNVYGIDMPAVEELIAHGRTDEQVREALGADWLVYQDLADLVESVQKGNPSIPRFDTSCFDKDYVTGDIDQAYLDRLSEHRSDHAKAKRDAAATAIDLYNTV

SEQ ID NO: 30409 - DNA, 1500 bp, Nocardia farcinica IFM 10152
  CDS (1)..(1500): transl_table=11
gtgttcggtgtctgggcgccgagcgaggacgtggccaagctcacgtactacggcctctacgcgctgcagcatcgcggccaggaggcggcgggcatcgcggtctccgacggtcagcagatcctggtgttcaaggatctgggcttggtcagccaggtgttcgacgagcagacgctggccgccatgcccggccacatcgccgtcggccactgtcgctactccaccacgggcggcgtgacctgggagaacgcccagccgatcttccgcaccaccgcggtcggctccggcctggcgctgggccacaacggcaatctcgtcaacaccgccgaactggccgggcgcgcacgcgaactcgggctcatcggcacccccgtgtccggcggccggccgcagccggtgggcgcgacctccgactccgatgtgatgaccgccctgctggcgcacgccgcggccgactcgagcatcgagcaggccgcgatggaactgctgccgcagctgcgcggcgcgttctgcctcaccttcatggacgagcacaccctctacgccgcccgcgacccgcacggggtgcggccgctgtgcctgggcaggctcgaccgcggctgggtggtggccagcgagaccgccgcgctcgacatcgtcggcgccgccttcgtccgtgagatcgaacccggcgaactgctggcgatcgacgccgaaggcgtgcggtcgatgcgcttcgccaaccccgaacccaagggttgcgtcttcgaatacgtctatctggcccgtcccgactccaccatcgccgggcgctcggtgcacgccacccgcgtcgagatcggcaggcggctggccaaggagcatccggtcgaggccgatctggtcatcccggtccccgaatccggcaccccggccgcggtcggctacgcccagggctcgggtgtgccctacggccagggcctgatgaagaacgcctacgtggggcgcaccttcatccagccgagccagacgatccgccagctcggcatccggctcaagctcaacccgctgcgcgaggtgatccgcggcaagcggttgatcgtggtcgacgactccatcgtgcgcggcaacacccagcgcgcgctggtgcggatgctgcgggaggcgggcgcggtggagatccacgtccgcatcgcctcgccgccggtcaagtggccctgcttctacggcatcgatttcgcctcccgggcggagctgatcgccaacggtggcggcgccgacgacagctacgacgacatggtcgaagccgtgcggcgctcgatcggcgccgacaccctcggctacatctccaccgagggcatgatcgccgcgaccgaacagccgcggacccggctgtgcagcgcgtgcttcgacggccagtacccgatcccgctgcccaccgaggcttcgatcgggaagaacctgctcgaggggatgctcaccgggcagccggaatcggtgctgctcggcgacaacgccaacgccagcgcgttgagccgcccctga

SEQ ID NO: 30410 - protein, 499 aa, Nocardia farcinica IFM 10152
MFGVWAPSEDVAKLTYYGLYALQHRGQEAAGIAVSDGQQILVFKDLGLVSQVFDEQTLAAMPGHIAVGHCRYSTTGGVTWENAQPIFRTTAVGSGLALGHNGNLVNTAELAGRARELGLIGTPVSGGRPQPVGATSDSDVMTALLAHAAADSSIEQAAMELLPQLRGAFCLTFMDEHTLYAARDPHGVRPLCLGRLDRGWVVASETAALDIVGAAFVREIEPGELLAIDAEGVRSMRFANPEPKGCVFEYVYLARPDSTIAGRSVHATRVEIGRRLAKEHPVEADLVIPVPESGTPAAVGYAQGSGVPYGQGLMKNAYVGRTFIQPSQTIRQLGIRLKLNPLREVIRGKRLIVVDDSIVRGNTQRALVRMLREAGAVEIHVRIASPPVKWPCFYGIDFASRAELIANGGGADDSYDDMVEAVRRSIGADTLGYISTEGMIAATEQPRTRLCSACFDGQYPIPLPTEASIGKNLLEGMLTGQPESVLLGDNANASALSRP

SEQ ID NO: 30411 - DNA, 1500 bp, Legionella pneumophila str. Paris
  CDS (1)..(1500): transl_table=11
atgtgcggcattgtaggaatttacagtcatgaacccgttgctgctgagctttatgatagcttgattcatttacagcaccgggggcaagatgcctcaggtattttaaccggagctgatcgtttttacttcaaacatggacttggactggtcagagagtctattttctctgaagatattcttaaactgaaggggaatatcggcattgctcatgtgcgttatcccacggccggaggttatagtgaggcggatgttcagcctctttggatagggagccctcgcgggatagctctggctcataatggaaatttagtgaattatggagagttggttgatgatttatgcggaaaacagcataggcatttaaactctactcttgattcagaggcacttttattacttctggcagactatttagccaagggatcttattccgatcatgatgaagagcaattctttcaattattatgtatggcagttaatgaaatacatcaacgagttcaaggttcctattctgttgtgagtttagtaattggcaaaggtttggttgcatttagggatccgcatggtattcgtcctttagtttggggtgagcgagtccatgaagatggtagtaaagattatatttttgcttcagaaaccacgcctttttatgctttaggttttgagcccaagggtgatttgctgccaggtgaagttgcttacgtgaatcagcaaggacaattgtacagaaaagtgctttcatcaaaaaaatttacaccttgtatatttgaatacgtttacttcgccagaccagatgccacattagacgatgtgagcgtttatcgagccagattacgtatggggcaaaatttagctaaaagctggaaaaagagatttccagatacactacctgatgtggtgattccagccccttcaacagcaaatactgccgcattagcttttgcaaatgagttgggaatacgttattccgaaggtttatataaaaatccttttattggacgtacttttatcatgcctaatcaggagtcgcgatcaagacaggttcgctataaattaactcctcagaaaacggaaattaataaaaaaaaggtattaatcgttgatgatagtatcgtaaggggaactacctcacgcgaaatagtcagaatgatacgagaatatggagcatcagaaatatattttgtatcaacctgtccaccaattaaaaacccttgtttctacgggattgatatcccatcgcgtaaaaaattgatagcagcccataaaacggaagaggaaatccgtcaatttctaggggtggataaattattataccaaactcaggaaaaccttatagaggctgtgtctcgcagggggcaatatgacatgagcaagccttgtatggcttgtatggatggcaaatacatttgtggacagattactgaagaaaaaattaaattgttggagaaaaaaagattaaccgagaatgaccaagaaacagagataggagagatgtcttga

SEQ ID NO: 30412 - protein, 499 aa, Legionella pneumophila str. Paris
MCGIVGIYSHEPVAAELYDSLIHLQHRGQDASGILTGADRFYFKHGLGLVRESIFSEDILKLKGNIGIAHVRYPTAGGYSEADVQPLWIGSPRGIALAHNGNLVNYGELVDDLCGKQHRHLNSTLDSEALLLLLADYLAKGSYSDHDEEQFFQLLCMAVNEIHQRVQGSYSVVSLVIGKGLVAFRDPHGIRPLVWGERVHEDGSKDYIFASETTPFYALGFEPKGDLLPGEVAYVNQQGQLYRKVLSSKKFTPCIFEYVYFARPDATLDDVSVYRARLRMGQNLAKSWKKRFPDTLPDVVIPAPSTANTAALAFANELGIRYSEGLYKNPFIGRTFIMPNQESRSRQVRYKLTPQKTEINKKKVLIVDDSIVRGTTSREIVRMIREYGASEIYFVSTCPPIKNPCFYGIDIPSRKKLIAAHKTEEEIRQFLGVDKLLYQTQENLIEAVSRRGQYDMSKPCMACMDGKYICGQITEEKIKLLEKKRLTENDQETEIGEMS

SEQ ID NO: 30413 - DNA, 1500 bp, Legionella pneumophila str. Lens
  CDS (1)..(1500): transl_table=11
atgtgtggcattgtaggaatttacagtcatgaacccgttgctgctgagctttatgatagcttgattcatttacagcaccgggggcaagatgcctcaggtattttaaccggagctgatcgtttttacttcaaacatggacttggactggtcagagagtctattttctctgaagatattcttaaactgaaggggaatatcggcattgctcatgtgcgttatcccacagccggaggttatagtgaagcggatgttcagcctctctggatagggagccctcgcgggatagctctggctcataatggaaatttagtgaattatggagagttggttgatgatttatgcggaaaacagcataggcatttaaactctactcttgattcagaggcacttttattacttctggccgactatttagccaagggctcttattccgatcatgatgaagagcaattctttcaattattatgtatggcagttaatgaaatacatcaacgagttcaaggctcctattctgttgtgagtttagttattggcaaaggtttggttgcatttagggatccacatggtattcgtcctttagtttggggtgagcgagtccatgaaaatggtagtaaagattatatttttgcttcagaaaccacgcctttttatgctttaggttttgaacccaagggtgatttgctgccaggtgaagttgcttacgtaaatcagcaaggacaattgtacagaaaagtgctttcatcaaaaaaatttaccccttgtatatttgaatacgtttacttcgccagaccagatgccacattagacgatgtgagcgtttatcgagccagattacgtatggggcaaaatttagctataagctggaaaaagagatttccggatacactacctgatgtggtgattccagccccttcaacagcaaatactgccgcattagcttttgcaaatgagttgggaatacgttattccgaaggtttatataaaaatccttttattggacgtacttttatcatgcctaatcaggagtcgcgatcaagacaggttcgctataaattaactcctcagaaaacggaaattaataaaaaaaaggtattaatcgttgatgatagtatcgtaaggggaactacctcacgcgaaatagtcagaatgatacgagaatatggagcatcagaaatatattttgtatcaacctgtccaccaattaaaaacccttgtttctacgggattgatatcccatcgcgtaaaaaattgattgcagcccataaaacggaagaggaaatccgtcaatttctaggggtggataaattattataccaaactcaggaaaatcttatagaggctgtgtctcgcagggggcaatatgacatgagcaagccttgtatggcttgtatggatggcaaatacatttgtggacagattactgaagaaaaaattaaattgttggagaaaaaaagattaaccgagaatgaccaagaaacagagataggagagatgtcttga

SEQ ID NO: 30414 - protein, 499 aa, Legionella pneumophila str. Lens
MCGIVGIYSHEPVAAELYDSLIHLQHRGQDASGILTGADRFYFKHGLGLVRESIFSEDILKLKGNIGIAHVRYPTAGGYSEADVQPLWIGSPRGIALAHNGNLVNYGELVDDLCGKQHRHLNSTLDSEALLLLLADYLAKGSYSDHDEEQFFQLLCMAVNEIHQRVQGSYSVVSLVIGKGLVAFRDPHGIRPLVWGERVHENGSKDYIFASETTPFYALGFEPKGDLLPGEVAYVNQQGQLYRKVLSSKKFTPCIFEYVYFARPDATLDDVSVYRARLRMGQNLAISWKKRFPDTLPDVVIPAPSTANTAALAFANELGIRYSEGLYKNPFIGRTFIMPNQESRSRQVRYKLTPQKTEINKKKVLIVDDSIVRGTTSREIVRMIREYGASEIYFVSTCPPIKNPCFYGIDIPSRKKLIAAHKTEEEIRQFLGVDKLLYQTQENLIEAVSRRGQYDMSKPCMACMDGKYICGQITEEKIKLLEKKRLTENDQETEIGEMS

SEQ ID NO: 30415 - DNA, 1518 bp, Photobacterium profundum SS9
  CDS (1)..(1518): transl_table=11
atgtgtggtattgtcggaatcgtggggtctaccccagtaaaccagtctatctatgatgcactgaccgtgttgcaacaccgtggtcaagatgcagccggtattgttactctggaaagcaatcgtttccgtctgcgtaaagcgaatggacttgttcgtgatgtgtttgaagctagacacatgcagcgtcttcaagggaatgtgggtattggtcatgtacgttacccaacagcaggaagttctagtgcttcagaagctcaaccattttatgtgaattcaccttacggtatttctttggcacataatggtaatttaacaaatgctgctgaagttaaagaatctttatttacccatgctcgtcgtcatgttaatacaacatcagactctgaaattctgttgaatgtattggcaaatcaactagaactgtctaactcttaccctttgaaacctgaagatgttttcactgcagtacgtgaagttcatcgcaatgtaaaaggtgcatatgccgttgttgctatggtgattagccatggtttaatcgcatttcgcgacccacatggtattcgccctttatgtattggtaagcgtgaaattgacggttcaacggaatatatggttgcttctgaatctgttgcacttgatgcggtaggttttgatttcatgcgtgatgttgcgcctggcgaagccatatatgttacttttgatggccaattatatactgaacaatgtgctgataaccctgtattgaatccgtgtatttttgaattcgtctatttcgctcgcccagattcattcatggataaagtgtcagtttacagtgcacgtgtgtgcatggggcagagattgggtgagaaaatcaagcgcgagtgggatgatctggatattgatgttgttattcctattccagaaacatcatgcgacagtgcattagaaatcgcacgtacaatcgataaaccttatcgtcagggttttgtgaagaaccgttatgttggtcgcacatttatcatgcctggtcagcaaatgcgccgtaaatcagtacgtcgtaaattgaatgcgatccgttctgaatttaaaggcaagaatgtactgctagtcgatgactctattgttcgtggtacaacatctgaacagatcattgaaatggcacgtgatgccggtgctaacaaagtgtacctagcatcagcggcaccagaagtacgtttccctaatgtttatggtattgatatgccatcggcaaatgagttaatcgcccatggtcgcgaagttgacgaaatcagtgaaatgattggtgctgatgctcttattttccaagatctggaagacttagtggcagcggtcgctgaaggtaaccctgatattaaattattcgaaacgtcggtatttaatggcagttatgtaacgggtgatattgatcaacagtaccttgaatttttagattcgttacgtaatgaagactctaaaacccaacgtgaaattcagcaagatcttgcgaatttagagcttcataacgaaggcgtttaa

SEQ ID NO: 30416 - protein, 505 aa, Photobacterium profundum SS9
MCGIVGIVGSTPVNQSIYDALTVLQHRGQDAAGIVTLESNRFRLRKANGLVRDVFEARHMQRLQGNVGIGHVRYPTAGSSSASEAQPFYVNSPYGISLAHNGNLTNAAEVKESLFTHARRHVNTTSDSEILLNVLANQLELSNSYPLKPEDVFTAVREVHRNVKGAYAVVAMVISHGLIAFRDPHGIRPLCIGKREIDGSTEYMVASESVALDAVGFDFMRDVAPGEAIYVTFDGQLYTEQCADNPVLNPCIFEFVYFARPDSFMDKVSVYSARVCMGQRLGEKIKREWDDLDIDVVIPIPETSCDSALEIARTIDKPYRQGFVKNRYVGRTFIMPGQQMRRKSVRRKLNAIRSEFKGKNVLLVDDSIVRGTTSEQIIEMARDAGANKVYLASAAPEVRFPNVYGIDMPSANELIAHGREVDEISEMIGADALIFQDLEDLVAAVAEGNPDIKLFETSVFNGSYVTGDIDQQYLEFLDSLRNEDSKTQREIQQDLANLELHNEGV

SEQ ID NO: 30417 - DNA, 1443 bp, Haloarcula marismortui ATCC 43049
  CDS (1)..(1443): transl_table=11
atgcacgagaagtgcggcgttgttggcatctctttggaggaccgtgacgccgcccgaccgctttactactccttgtacgcgctccagcaccgcggccaggaatcggccggcatcgtcacccacgacgggttccagcagtacagccacgtcgaaatgggactcgtcggtgacgcattcgaccccggcgatctggaggcgctcaacggctcgaacggtatcggccacgtccgatacccgactgccgggagcgtcaacgcctgctgtgcccagccgttctccgtctcgttcaagtcggggtcgctgggactgtcccacaacgggaacctcgtcaacgctgacgagatcggcgacgaactggctgacctcggccacgcctttacctccgatggcgacaccgaggtcatcgcccacgacctcgcgcgtaatctcctcgaggaggatctggttcgggctgtcaagcggacgatgaaccgcatccacgggtcgtactctttgaccatcatgcacgacgagacggtcctcggcgtgcgcgacccgcaggggaaccggccgctgtgtatcggcgaactcaaggacggctacgtcctcgcctccgaatcagccgccatcgatacgctcgacggcgaactgatccgggacgtcaagcccggcgaactcgtcgtcctgcacgccgacggcaccggctacgacacctatcagctcgtcgaaccggagaacacggccaattgcttcttcgaacacgtctacttcgcgcgaccggactcgaccatcgacgagaacctcgtctacgaggtccggcgcgaactcggtcggaaactctgggaggagtccggcgtcgagtcggacgtggtgttgccggtgcccgactccgggcgtgcgttcgcctccggatacgctgaggccgcacaggacgacggctcggacatcgagttcgccgaagggctgatgaaaaaccggtacgtcggccgtacgttcatcatgccgacgcaagacgaacgcgagcgggctgtccgactgaagctcaaccccatcaagtccacaatcgagggcaaaagcgtcaccatcatcgacgactctatcgtccgcgggaccacctcgacgcaactgatcaagttgctgaaggatgccggtgccgaagaggtcaacgtgcgcatcggcgcgccgcccatcgtcgctccgtgttacatgggtatcgacatggcctcccgcgacgaactcatcgccgggaatcagtccgtcgaggaaatccgcgacgaaatcgaggcggactcgctgtcgtatctctctatcgacgccatcgcggaaacgctggacaagagccggactgacctctgtctcggctgtgtcaccggcgaatacccctacgacatcgagggcgaggcgacggaccgcgacgttgtccgcccggatatcgggacccaatcgagcccggctgacgactag

SEQ ID NO: 30418 - protein, 480 aa, Haloarcula marismortui ATCC 43049
MHEKCGVVGISLEDRDAARPLYYSLYALQHRGQESAGIVTHDGFQQYSHVEMGLVGDAFDPGDLEALNGSNGIGHVRYPTAGSVNACCAQPFSVSFKSGSLGLSHNGNLVNADEIGDELADLGHAFTSDGDTEVIAHDLARNLLEEDLVRAVKRTMNRIHGSYSLTIMHDETVLGVRDPQGNRPLCIGELKDGYVLASESAAIDTLDGELIRDVKPGELVVLHADGTGYDTYQLVEPENTANCFFEHVYFARPDSTIDENLVYEVRRELGRKLWEESGVESDVVLPVPDSGRAFASGYAEAAQDDGSDIEFAEGLMKNRYVGRTFIMPTQDERERAVRLKLNPIKSTIEGKSVTIIDDSIVRGTTSTQLIKLLKDAGAEEVNVRIGAPPIVAPCYMGIDMASRDELIAGNQSVEEIRDEIEADSLSYLSIDAIAETLDKSRTDLCLGCVTGEYPYDIEGEATDRDVVRPDIGTQSSPADD

SEQ ID NO: 30419 - DNA, 1440 bp, Streptococcus thermophilus LMG 18311
  CDS (1)..(1440): transl_table=11
atgacatacgaagttaaatctcttaatgaagaatgtggtgtttttggaatttggggtcacccagatgctgccaaattaacttatttcggactttatagtcttcaacaccgtggccaagagggggcaggaattctctcaaatgatgcgggtcaattgaagcgtcatcgtgatatggggcttctctcagaagttttccgtgatccagccaacttagacaagctgactggtaaggctgctatcggtcatgttcgttatgcgactgccggtgaggcttctgtagacaatattcaaccattcatgtttaagtttcacgatggacagcttggtcttgctcataatgggaatttgactaatgcagtgtcactaagacgtgagttggagaagaatggggccatttttagctcaacttctgattcagaaatcttagctcacttgattcgtcgtagccataacccatcatttatgggaaaagtaaaagaagctctgaacactatcaaaggtggatttgcttaccttcttatgattgaggacaagctaattgcagccttggatccaaatggttttcgtcccctttctattggtaagatggccaatggagctatcgtggtttcatctgaaacctgtgcctttgaagtagttggagcagagtggattcgcgatgtaaatccaggtgaagttgttatcatcgatgataacggcatcacttacgataactatacaacggacactcaattggctgtttgctcaatggagtatatctactttgcccgtcctgattcaaatatccgaggggtcaatgtccatacagctcgtaaacgtatgggtgctcaattagcacgtgagttcaaacatgaagcagatattgtcgttggtgtgcctaattcatcacttagtgcagccatgggatttgcggaagaatcaggcttgccaaatgaaatgggcttgataaaaaaccaatacacccaacgtacctttatccaaccaacacaagaattgcgtgagcaaggagttcgtatgaaactctctgccgtatcaggtgttgttaaaggaaaacgtgtggtcatgattgacgattccattgttcgtggaacaacgtcccgtcgtatcgttcaactcttgaaagaagcaggggcgactgaggttcacgtggctatcggaagtccagcccttgcttacccatgtttctacggtatcgatattcaaacacgtaaggaattgattgctgccaatcacacagtagaagaaatccgtgaaatcattggtgcggatagcttgacttacttgtctatcgatggcttgattgattccattggaattgacacagatgaaccaaatggtggcctttgtgtggactacttcactggcaaatattcaacaccattgtatgactacgaaaaaagctatttggaaagtttggaagaacacacttctttctattaa

SEQ ID NO: 30420 - protein, 479 aa, Streptococcus thermophilus LMG 18311
MTYEVKSLNEECGVFGIWGHPDAAKLTYFGLYSLQHRGQEGAGILSNDAGQLKRHRDMGLLSEVFRDPANLDKLTGKAAIGHVRYATAGEASVDNIQPFMFKFHDGQLGLAHNGNLTNAVSLRRELEKNGAIFSSTSDSEILAHLIRRSHNPSFMGKVKEALNTIKGGFAYLLMIEDKLIAALDPNGFRPLSIGKMANGAIVVSSETCAFEVVGAEWIRDVNPGEVVIIDDNGITYDNYTTDTQLAVCSMEYIYFARPDSNIRGVNVHTARKRMGAQLAREFKHEADIVVGVPNSSLSAAMGFAEESGLPNEMGLIKNQYTQRTFIQPTQELREQGVRMKLSAVSGVVKGKRVVMIDDSIVRGTTSRRIVQLLKEAGATEVHVAIGSPALAYPCFYGIDIQTRKELIAANHTVEEIREIIGADSLTYLSIDGLIDSIGIDTDEPNGGLCVDYFTGKYSTPLYDYEKSYLESLEEHTSFY

SEQ ID NO: 30421 - DNA, 1413 bp, Geobacillus kaustophilus HTA426
  CDS (1)..(1413): transl_table=11
atgcttgctgaaatcaaaggattgaacgaggagtgcggcattttcggcatttgggggcatgaagacgccgcccggctcacatactacgggcttcacagcctgcagcaccgtgggcaggaaggggccggcatcgttgtcgcgcataacgggagcttatccagtcataaagggctggggctggtgaccgatgtgtttcaaagcggtacgctcgatgcgctcaaaggggcggcggccatcggtcatgtccgctattcgacggcgggcgggggcggctatgaaaacgttcagccgctcttgttccgctcgcaaaccggcgcgatggcgctcgcccataacggcaacttgacaaacgccatcgagttgaagctcgcgcttgaagggcaaggaagcatttttcagacgacatcggatacggaagtgttcgcccatctcatccgccgcagccaagcgccgacgtttgtcgagcaaatgaaagaggcgctcagtcagatcgaaggggcgtttgcgtttttgctgctgacggaaaaggcgctctatgcggcgcttgatccgcacgggtttcggccgctgtcgctcggccggctcggctcggcgtatgtcgtggcgtcggaaacgtgcgcgtttgacgtcatcggcgccacatacgagcgggaagtggcgcctggggaattgctcatcatcagccgcgaaggggtgcgttcagaacggttcgctcctaggcagccgcggtcgatttgcagcatggagtacatttatttcgctcgtccggacagccatgtcgacggcatcaatgtccataaggcccgaaaaaacttaggaaagcggctggccttggaagcgccggcagaggccgacatcgtcaccggcgtgccggactcaagcatctctgttgccatcggctacgctgaggcgagcggcattccatacgaattggggttgattaaaaaccgatatgtcgggcggacgttcatccagccgtcgcaggcgttgcgcgagcaaggagtgaaaatgaagctgtcgccggtgcgcggggttgtggccggcaaacgggttgtgatggtggatgattcgatcgtgcgcgggacgacgagccggcgcatcgtcgcgatgctccgtgaagccggggcggttgaagtgcacgtgcgcatcagcgcgccgccgatcacccatccttgcttttacggcattgatacgtcgtcaaaggaagaattgatcgcggcgaatcgcactgttgaagagattcggcgcttgattggcgctgattccctcgcctttatcagccaggaagggatgcttgaggccatcgggcgtccggacgtctcgccgcagcgcgggcaatgtttggcgtgtttcactggccaatatccgacccgcctcggtcaagcggcgcggccatgtctgacgatgaaatga

SEQ ID NO: 30422 - protein, 470 aa, Geobacillus kaustophilus HTA426
MLAEIKGLNEECGIFGIWGHEDAARLTYYGLHSLQHRGQEGAGIVVAHNGSLSSHKGLGLVTDVFQSGTLDALKGAAAIGHVRYSTAGGGGYENVQPLLFRSQTGAMALAHNGNLTNAIELKLALEGQGSIFQTTSDTEVFAHLIRRSQAPTFVEQMKEALSQIEGAFAFLLLTEKALYAALDPHGFRPLSLGRLGSAYVVASETCAFDVIGATYEREVAPGELLIISREGVRSERFAPRQPRSICSMEYIYFARPDSHVDGINVHKARKNLGKRLALEAPAEADIVTGVPDSSISVAIGYAEASGIPYELGLIKNRYVGRTFIQPSQALREQGVKMKLSPVRGVVAGKRVVMVDDSIVRGTTSRRIVAMLREAGAVEVHVRISAPPITHPCFYGIDTSSKEELIAANRTVEEIRRLIGADSLAFISQEGMLEAIGRPDVSPQRGQCLACFTGQYPTRLGQAARPCLTMK

SEQ ID NO: 30423 - DNA, 1410 bp, Anaplasma marginale str. St. Maries
  CDS (1)..(1410): transl_table=11
ttggtgcagaatcgtatgccactggcaagcgtacacgaagaatgcgggatttttgcaatccagaaccacagcgacgcggctaagaagtgcctcatgggccttcatgcgctgcagcaccgcggtcaggagtcatttggcattgttacatcgtccaacaacggggagttcgctgtgtatcacagcagtgaacacgtgagtagcatattcgaaaagccggaggcacactcgttacggggcaatctgtcagtcgggcatgtaagatattccaccagcggcagtaaaccgggagcgcagccaatagtggtagactgcaagttcggcaaattggctatagcacacaacgggaacctaactaacgccgatagcctgcgtaggcagttagtcgacaaggggtgcgtgtttttgtcagacatcgatacggaggtcattgcccacttaatagcaaccagcccgtctgattcttttatcgattgcgtcatctccgccgtgaaagaggttaagggcgcgtattctctggtcatgatgacaaacaacaccctggtcggggtgagagacgctgccggtatacggccgttggtgcttggcattgtggatggggcatatgtcatggcatcagaaacttgcgcactcgatatagtaaaggcagagtttgtcagagatatacaacccggagaactggtggtaatcagccagtcaaatgagttgaccagcatgtatccgtttccgccgttgaagcgcagtttctgcatttttgagtatatatattttgccaggccggatagtgtcgtggacaacataccagtttatgaggcacgtaaaaatatcggggcagagcttgcagtagaaagccctcctcccgacaatgtagatatggtggtgcccgtaccagattctggtatcccagcagctatggggtacgcggcaaagtctggcgtgccttttgagtttgggatagtaaggaatcactatgtggggcgcactttcatccagccaaccgatggcgggcggcgcatgggggttgagctgaagcacaacgcgaactcctcagttttgcgcgggaaaaacatagttctggttgacgacagcatagtgcgtggcaccaccctgcgagaagtaatagagctgcttagaagggctggaacaaaagccatacacctccggatttctagcccgccaacactgcactcatgcttttatggtatcgatacgccggagcggtccaagttggtggcaaacaggctctctctacaagaactgaacacgatgctgcagtgcgatagcatagcatttatcagcatagatggtctgtacaaagcagtgtgcggggccccccgcaacaactcctctccacagtattgtgatgcatgcttcaccggcatgtacccggtaggcgaaatggaacagcactga

SEQ ID NO: 30424 - protein, 469 aa, Anaplasma marginale str. St. Maries
MVQNRMPLASVHEECGIFAIQNHSDAAKKCLMGLHALQHRGQESFGIVTSSNNGEFAVYHSSEHVSSIFEKPEAHSLRGNLSVGHVRYSTSGSKPGAQPIVVDCKFGKLAIAHNGNLTNADSLRRQLVDKGCVFLSDIDTEVIAHLIATSPSDSFIDCVISAVKEVKGAYSLVMMTNNTLVGVRDAAGIRPLVLGIVDGAYVMASETCALDIVKAEFVRDIQPGELVVISQSNELTSMYPFPPLKRSFCIFEYIYFARPDSVVDNIPVYEARKNIGAELAVESPPPDNVDMVVPVPDSGIPAAMGYAAKSGVPFEFGIVRNHYVGRTFIQPTDGGRRMGVELKHNANSSVLRGKNIVLVDDSIVRGTTLREVIELLRRAGTKAIHLRISSPPTLHSCFYGIDTPERSKLVANRLSLQELNTMLQCDSIAFISIDGLYKAVCGAPRNNSSPQYCDACFTGMYPVGEMEQH

SEQ ID NO: 30425 - DNA, 1518 bp, Idiomarina loihiensis L2TR
  CDS (1)..(1518): transl_table=11
atgtgtggtattgttggtattgttggtaagcagcctgttaaccaagcgctttacgatgggttaaccatgcttcaacatcgtggccaggacgccgctggtattatgacagttgatgagcactgtactttgcgtttaagaaaagccaacggattggtgcgggatgtgttccatacacgtcacatgcaccgcttgtcgggtaatgtcggtattggtcatgtgcgttatcctacagtcggaagttcgagctcagcagaagcgcaaccgttctatgttaactcaccttttggtattgccatggcgcataatggtaacttaaccaatgctgctgacgttcaggaacatttgtttcaaacggcgcgtcgtcatattaataccacctccgactcggaaattttgctgaacatttttgccaatgagctggataaaaacgagagtttaacgctgagcgaagaagacgtttttcgcaccatgaccgcggttcaccgtcaggttcgtggttcttatgccgtggtagcaatgatcctcggtcatggcatggttgcattccgtgacccatggggcattcgtcctttagccctgggtaaacgtgataccgaagacggcgaagagtacattgttgcctctgaaagcgttgccattgacggcaccggttttaaatatatgcgcgatgtcgagcctggcgaagctatttatattacaaacgatggcaagctgtattctcgtcagtgcgctgataagccaatacattgtccgtgtatttttgagtacgtgtactttgcgcgtcccgactcgtttattgatggcatttcggtctatgcctctcgggttaatatgggccgtaagctgggcgagaagataaagcgtgattacggcgaactcgatattgatgtggttattccaattcctgaaaccagctgtgatatcgctttagagatagccagcgtgctggacttaccttatcgccagggctttgtgaaaaaccgttatattggtcgtacctttattatgccgggacagactcagcgacgtaaatcagtacgccgaaagttaaatgccattagcgcggaattccgtggtaagaacgttctgctggttgatgattcaattgtacgtggaacaacgtcagagcaaataattgaaatggctcgtgaagccggtgcgaagaaagtatattttgcttcagctgctccggaaattcgcttcccgaacgtttacggcattgatatgccaagcgctaacgagctgattggtcacggacgtgaagcaacggaaattcgtgacataattaaagctgatggtctcatttatcaggatcttgacgacttaattgaagcagtaggagcagagaaccgatcaattaaacgttttgatacgtcggtattcagtggtgaatacgtaacgggtgatgtgagccaggagtacttagatcgtttgcatgcggcacgtaatgacgttgcaaggtccgatcgtgacggctcagaagacgccaacctcgaacttcacaacgacaacgattaa

SEQ ID NO: 30426 - protein, 505 aa, Idiomarina loihiensis L2TR
MCGIVGIVGKQPVNQALYDGLTMLQHRGQDAAGIMTVDEHCTLRLRKANGLVRDVFHTRHMHRLSGNVGIGHVRYPTVGSSSSAEAQPFYVNSPFGIAMAHNGNLTNAADVQEHLFQTARRHINTTSDSEILLNIFANELDKNESLTLSEEDVFRTMTAVHRQVRGSYAVVAMILGHGMVAFRDPWGIRPLALGKRDTEDGEEYIVASESVAIDGTGFKYMRDVEPGEAIYITNDGKLYSRQCADKPIHCPCIFEYVYFARPDSFIDGISVYASRVNMGRKLGEKIKRDYGELDIDVVIPIPETSCDIALEIASVLDLPYRQGFVKNRYIGRTFIMPGQTQRRKSVRRKLNAISAEFRGKNVLLVDDSIVRGTTSEQIIEMAREAGAKKVYFASAAPEIRFPNVYGIDMPSANELIGHGREATEIRDIIKADGLIYQDLDDLIEAVGAENRSIKRFDTSVFSGEYVTGDVSQEYLDRLHAARNDVARSDRDGSEDANLELHNDND

SEQ ID NO: 30427 - DNA, 1527 bp, Azoarcus sp. EbN1
  CDS (1)..(1527): transl_table=11
atgtgcggaattttaggggtcgtcgcgacttccccggtcaaccagttgctctacgatggcctccaggtcctgcagcatcgcggtcaggatgctgccgggatcgcgacttccgagggcggacgcttcttgatgcacaaggggtcgggcctcgtgcgcgacgtgtttcgtacgcgaaacatgcgcaatctcgtcggcaactggggcatcggccatgtccgctatcccacggcggggtccgcgtacaatcccgccgaagcgcagccgttctacgtcaattctccgttcgggctgctgcttgcgcacaatggcaatctgacgaactcggaggaactcaagcgggaaatgttcctttccgatctgcggcacatcaacacgaattcggattcggaagtgctgctgaacgtgcttgcccatgaattgcaggcagcggcgaagggtttcaagctcgatgaggacgcggttttccgcgccgtctccggtgtccatcggcgctgccgcggcgcgtacgcggtggtcgtgatgattgccggctacggcctgctcgcgttccgcgacccgtacgggatacggccgctcgtggtcgggcgcaatgaggtcgaggccggacaggagtggctcgtcgcttcggagtccgtcgcgatggatgtcctcggcttcaggatgctgcgcgatgtcgcccccggcgaggcgatcctcatcgatacgcaggggaatttccggagccggcagtgcgcggacaagactgtcgaagcgccctgcatgttcgagttcgtctatctcgcgcggccggattcgatcatcgacggggtgtcggtgtacgagtcgcgcgtcaagatgggcgagttcctcgccgacaagctcaagcgcgtgatgccgcatgccgagatcgacgtcgtgatcccgattcccgactcgagccgaccctccgcaatggaaatggcccaccggctgaaccttccctatcgcgaaggcttcgtgaagaaccgttatatcggacgcaccttcatcatgccgggacaggcgatccggcgtaagtcggtgcgccagaagctgaacacgattccgcaggaattcaggggcaagaaagtgctcctcgtcgacgattcgatcgtgcggggaacgaccagccgtgaaatcgtgatgatggcgcgcgaggccggtgccgagaaagtctatatggcgtcggcggcgcctcccgtccggtatgcgaacgtgtacgggatcgacatgccgacgcgcgccgaactgatcgccgcaagccgcgacgaggctcagatctgccaggagatcggtgcggacggactgatctaccaggacctcgccgacctgaaggcggcggtgagagccgtgaatccggcgatcagcttcttcgagacttcgtgcttcgacggatgctatgtgacgggggacatcacgccggagtatctcaacgggatcgagaaccggcacgacgccggcaacctctcatcggacgagagcgagggcggacaactcgacctcaacctcgtaggtagccacgacaactga

SEQ ID NO: 30428 - protein, 508 aa, Azoarcus sp. EbN1
MCGILGVVATSPVNQLLYDGLQVLQHRGQDAAGIATSEGGRFLMHKGSGLVRDVFRTRNMRNLVGNWGIGHVRYPTAGSAYNPAEAQPFYVNSPFGLLLAHNGNLTNSEELKREMFLSDLRHINTNSDSEVLLNVLAHELQAAAKGFKLDEDAVFRAVSGVHRRCRGAYAVVVMIAGYGLLAFRDPYGIRPLVVGRNEVEAGQEWLVASESVAMDVLGFRMLRDVAPGEAILIDTQGNFRSRQCADKTVEAPCMFEFVYLARPDSIIDGVSVYESRVKMGEFLADKLKRVMPHAEIDVVIPIPDSSRPSAMEMAHRLNLPYREGFVKNRYIGRTFIMPGQAIRRKSVRQKLNTIPQEFRGKKVLLVDDSIVRGTTSREIVMMAREAGAEKVYMASAAPPVRYANVYGIDMPTRAELIAASRDEAQICQEIGADGLIYQDLADLKAAVRAVNPAISFFETSCFDGCYVTGDITPEYLNGIENRHDAGNLSSDESEGGQLDLNLVGSHDN

SEQ ID NO: 30429 - DNA, 1527 bp, Zymomonas mobilis subsp. mobilis ZM4
  CDS (1)..(1527): transl_table=11
atgtcgcctagcctttcgagcgaactcttttccgactctatctctaccctgacgacgacaactgaatctttagataatggggcgtctgatgatacccttcatgaagaatgtggtgttttcggtatttggggcgcagatacagccgctgccgtcgtagctctcggactacatgctttacagcatcgcggacaggaagccgccggtatcaccagctgggatgggaaaaatttccactcccgtcgtgctgttggtcacgttgcgggtaactttgaccgtgacgatgctatccgcagcttgcccggatcatgtgctattggccatgtccgctatgcaaccaccggtgccagcaccttgtgcaatgttcagccgctttatgccgaactggtttcgggcggatttgcgattgctcataacggcaatatttccaatgccgaaactttgcgccatcagttggtgcgtcatggatctatctttcaatccacgtcggatactgaaacgattatccatctggttgcgacctcaagctatcgcagcctgttagaccgattcattgatgctttaaaacaggttgagggcgcttattctctcgtctgcctgacgccggaaggcatgattgcctgtcgtgatccgctgggtattcgcccgctggttctcggtaaagtcggggaaacttttgttgtcgcttccgaaacggttgctctcgatattattggcggaacctatatccgtcaggtcgaaccgggtgagctgattattatttcggaaaaagggctgcaatctattcatccctttaaaaagcagaagcctcgcccctgcattttcgagcatgtctatttttcgagaccggattctttgatcggtagcacctcggtttattctgttcggaaatctatcgggatcgaattggcgcgcgaaaatccggttgatgccgatatggttattcctgtgccagattcagggacacctgccgctatcggttatgcccagcaatcttctttgccgtttgaattgggtattatccgttcccattatgttggacgcacctttattcagccgggcgaccaagtccgtcatttgggcgtgaagctgaagcataatgccaaccgtgccttgattaaaggcaagaagttggttctagttgatgactctattgtcagaggcacgaccagcgtcaaaatcatcagaatgcttcgggatgcgggtgccaaggaaatccatttgcggattgccagcccaccgacccgtcatagctgtttttatggtgtagatacgccggagcgggcaaaattgttggcggctaaaatgaccgtcgaacagatggcagaatatatcggcgctgatagtttagcttttatttcgatggatggcctttatcgtgcggtcggtgaagaggctcgcaatgatgctcagccgcaatattgtgatgcttgctttacaggtgcctatcccacgcccctaaccgatcttggcgaattgggtgctagcgaacaactggttcgtttatccgaacaggtggctatcgcctaa

SEQ ID NO: 30430 - protein, 508 aa, Zymomonas mobilis subsp. mobilis ZM4
MSPSLSSELFSDSISTLTTTTESLDNGASDDTLHEECGVFGIWGADTAAAVVALGLHALQHRGQEAAGITSWDGKNFHSRRAVGHVAGNFDRDDAIRSLPGSCAIGHVRYATTGASTLCNVQPLYAELVSGGFAIAHNGNISNAETLRHQLVRHGSIFQSTSDTETIIHLVATSSYRSLLDRFIDALKQVEGAYSLVCLTPEGMIACRDPLGIRPLVLGKVGETFVVASETVALDIIGGTYIRQVEPGELIIISEKGLQSIHPFKKQKPRPCIFEHVYFSRPDSLIGSTSVYSVRKSIGIELARENPVDADMVIPVPDSGTPAAIGYAQQSSLPFELGIIRSHYVGRTFIQPGDQVRHLGVKLKHNANRALIKGKKLVLVDDSIVRGTTSVKIIRMLRDAGAKEIHLRIASPPTRHSCFYGVDTPERAKLLAAKMTVEQMAEYIGADSLAFISMDGLYRAVGEEARNDAQPQYCDACFTGAYPTPLTDLGELGASEQLVRLSEQVAIA

SEQ ID NO: 30431 - DNA, 1473 bp, Silicibacter pomeroyi DSS-3
  CDS (1)..(1473): transl_table=11
atgcccgcccctcgttttcccatcgcccatccctttgatgacgacaagctgcgcgaggaatgcgggatattcggggtgatcggagttcaggacgccgccagtttcgtggctcttggcctgcatgccctgcaacaccggggacaagaggcgggcggtatcgtcacccatgaccccgaacaggggttcaactcggcccgccgctttggctatgtccgcgacaacttcacctcgcaatcggtgatggaaaccctgcccggcccgctgggcatcggccatgtgcgctattccaccgccgggtccaagggtcagacccagatccgcgatgtgcagccctttttcggcgagtttgccatgggcggcgcggcgattgcccataacggcaacatcaccaatgccaatgccctgcgccgcgaactgatcgagcgcggctcgatctttcaaagctcttcggacagcgaatgcatcatccacctgatggcgcgctccttgcagcgcaccatccctgagcggatggaggatgcgctgcgtcgggtcgagggcgcgttttcggtggtggcgatgacccggaccaagctcatcggcgtgcgcgacccgctgggcgtgcgcccgctggttctgggcaaggtcggtgatggctggattctgtcctcggaaacctgcgcgctggatatcatcggcgccgagttcatccgcgagatcgaaccgggcgagatggtggtgatcactgccgaggacggggtgcagagccatttccccttccgcccgcaaccgtccaagttctgcatcttcgaacatgtctatttctcgcgccccgattcgatcctgggcgggcgcagcgtgtatgagacgcgcgaggcgatcggccgcgaactggccaaggaaagcccggtcgaggccgatctggtctgtccggtgcccgacagcggcaccccggcggcgatcggtttctcgctggaaagcggcattccctatgcgatggggatcatccgcaatcagtatatgggccgcaccttcatcgagcccaccgagcagatccgcaacatgggcgtgcgtctgaagctgaacgtgaaccgggcgctgatccggggcaagcgggtgatcctggtcgacgactcggtggtgcgcggcaccaccagccgcaagatcaaggacatgatcctggatgccggcgccaaggaggtgcatttccgcatcgccagcccgcccaccgcctggccgtgtttctatggcgtcgacacgcccgagcgcgagaagctgctggcagccaccatgagcgaggacgagatgcgcacgcatctgggggtggacagcctgaagttcatctctctcaatggactctaccgtgcagtgggcgagacaaatggccgtgacaacgcctgcccgcaatattgcgacgcctgcttctcgggcgaatacccggtgcggccctcggacatgatcgaaaagggcttctctctgaaagccgccgaatag

SEQ ID NO: 30432 - protein, 490 aa, Silicibacter pomeroyi DSS-3
MPAPRFPIAHPFDDDKLREECGIFGVIGVQDAASFVALGLHALQHRGQEAGGIVTHDPEQGFNSARRFGYVRDNFTSQSVMETLPGPLGIGHVRYSTAGSKGQTQIRDVQPFFGEFAMGGAAIAHNGNITNANALRRELIERGSIFQSSSDSECIIHLMARSLQRTIPERMEDALRRVEGAFSVVAMTRTKLIGVRDPLGVRPLVLGKVGDGWILSSETCALDIIGAEFIREIEPGEMVVITAEDGVQSHFPFRPQPSKFCIFEHVYFSRPDSILGGRSVYETREAIGRELAKESPVEADLVCPVPDSGTPAAIGFSLESGIPYAMGIIRNQYMGRTFIEPTEQIRNMGVRLKLNVNRALIRGKRVILVDDSVVRGTTSRKIKDMILDAGAKEVHFRIASPPTAWPCFYGVDTPEREKLLAATMSEDEMRTHLGVDSLKFISLNGLYRAVGETNGRDNACPQYCDACFSGEYPVRPSDMIEKGFSLKAAE

SEQ ID NO: 30433 - DNA, 1491 bp, Francisella tularensis subsp. tularensis SCHU S4
  CDS (1)..(1491): transl_table=11
atgtgtggagtaattggagtcgctggaccagatcaggttagttatgcattattttatggtttaagtcttttgcagcataggggtcaagatgctgcagggattgcaactatggatcatgggcacttttttatccgtaaaaatacaggtctagtaagtgatgtatttacagatgaaaaactagagaagtcaaaaggtaatatgggtatcggtcatgttagatatcctactgcaggtagcttgggtgcagctgatagccaacctttttatgtaaataatccccatggtatagttttcgttcataatggcaatctgactaatgtgccagagcttgcacaaatgctccatgatattgaaagacgccatcttaatacaagttcagattccgaattattgcttaatttctttgcttgtgggatgaataaatcaaaaggatctgcgacttctgaggctgtttataaagcatgtaaatttgtttttgagcatgtcaaaggtggttatgcatgtactgcgatgatagcaaattttggtttaattgcttttagagatccttatggtattcgtccacttgtgcttggttttaaagagtacgatgatggtgaaaaagcttacatggtcgctagtgaaagtgttgctttagatatttccggatttaaagtattacgtgatgttgagcctggtgaggtgataataattacagaggatagaaaagttcactctaaaatctgtgcaaagaatccagttttggcaccatgcctatttgagtatgtatactttgcacgtcctgatagtattatgaatggtgtgagtgtttatcaagcgcgagtagatgcgggtaaaatcctaagtaagagaatcaaagaagcgtggaaggataaggatatcgatatcgttatccctgtacctgagacaggtagagcctctgctcaagagattgcaacagcattaggtgttgagtaccgtgaaggttttgttaagaatcgctatgttggtagaacttttatcatgccagagaatgttgatagaaagaattttgtcagaagaaaactaaaccctattccagcagaatttagggataaaaatgttctacttgttgatgattctattgtccgaggtacaacatcaaagcgtattattgagatgattagagatttaggtgctaaatctgtttatcttgcttcagtatctccagccgttcgttatccaaatgtttatggtattgatatgccggttaagtcggatttaattgctcatggaaagactatagaagagattcgccagtggattggagtagatggactaatatatttaccattagaggatctaaaagagattattcaaaagcaaaaccctaaaattagagagtttgaggatagtgttttctctggtaattacattacaggtgatgtcgatgatgcttatctagatgcgctagagaaacatcgtaaagagttaaaagaattagaaaaaaaatacaaagggtttgataactaa

SEQ ID NO: 30434 - protein, 496 aa, Francisella tularensis subsp. tularensis SCHU S4
MCGVIGVAGPDQVSYALFYGLSLLQHRGQDAAGIATMDHGHFFIRKNTGLVSDVFTDEKLEKSKGNMGIGHVRYPTAGSLGAADSQPFYVNNPHGIVFVHNGNLTNVPELAQMLHDIERRHLNTSSDSELLLNFFACGMNKSKGSATSEAVYKACKFVFEHVKGGYACTAMIANFGLIAFRDPYGIRPLVLGFKEYDDGEKAYMVASESVALDISGFKVLRDVEPGEVIIITEDRKVHSKICAKNPVLAPCLFEYVYFARPDSIMNGVSVYQARVDAGKILSKRIKEAWKDKDIDIVIPVPETGRASAQEIATALGVEYREGFVKNRYVGRTFIMPENVDRKNFVRRKLNPIPAEFRDKNVLLVDDSIVRGTTSKRIIEMIRDLGAKSVYLASVSPAVRYPNVYGIDMPVKSDLIAHGKTIEEIRQWIGVDGLIYLPLEDLKEIIQKQNPKIREFEDSVFSGNYITGDVDDAYLDALEKHRKELKELEKKYKGFDN

SEQ ID NO: 30435 - DNA, 1413 bp, Bacillus clausii KSM-K16
  CDS (1)..(1413): transl_table=11
atgtttactgaaatcaaaggcttgaacgaagaatgtggcgtatttgccgtttggggccataaagaagctgcgcaaattacgtattatgggttgcacagcctccagcaccgcggccaggaaggcgcaggcattgtcgtgtccgacggaaacaagctctctgcccataaagggctcggcctagtcaatgatgtgtttaatcaagatgtcttgcgtaatcttcaagggaagggcgcgattggccacgtccgttatgcgacggccggtggaggcggctatgccaatgtccagccgttgtatttcaattcgcaaaaaggcggtcttgcgattgcgcacaatggcaatcttgtcaacgccaatcacttaaaacaccagcttgaagcacaagggtcgatcttccagtccacatcggatacggaagtgctcgcccatctcattaaacgcagcggctactatacgttagaagaacaattgaaaaatgggctgtcttccttaaaaggcgcctatgcatttgccgtcatgaatgagcgccaactgatggtcgcccttgatccaaatgggttgcgtcctctttccatcggacgtttaggcgatgcgtatgtcgttgcttcagagacatgtgcgttcgacatcattggcgccacctatgagcgtgaagtaatgccaggtgaactgctcattattgacgatacaggcttgcgcagcgaacgctttgtttctccagggaaccgggcgatttgcagcatggaatacgtttattttgcgcggccagattcaaacgtggataccatcaatattcatacagcgagaaaaaatttaggaaaacagcttgcgattgaagcgccagtggaagcggatgtggtgacaggcgtgcctgattccagcatttccgcagcaattggctatgctgagcagtctggcattccttatgagttgggcatgattaaaaatcgctatgtcgggcgcacctttattcaaccttcacaagaattacgggaacaaggggtaaagatgaagctttcccctgtgcgtggcgtagttgaaggcaaacgagttgttatgattgacgattcgattgtacggggaacgactagccgccgcattgtccatatgcttcgtgatgcaggggcagctgaagtccatgtccgcatttcatcgccaccgattaaacatccgtgcttttacggaattgatacgtcaacgacggaagaattaattgcttccaaccactcaatcgaagaaatgcgggaaatcatgggggctgattcacttgcttttttgtcgactgaaggcttgaaagcagggattggccgttctgaggcgatgcataattgcgggcaatgccttgcctgctttacaggcgaatacccaacggagatttatgccgacaccgtgcatccgcacgcgaaagtatag

SEQ ID NO: 30436 - protein, 470 aa, Bacillus clausii KSM-K16
MFTEIKGLNEECGVFAVWGHKEAAQITYYGLHSLQHRGQEGAGIVVSDGNKLSAHKGLGLVNDVFNQDVLRNLQGKGAIGHVRYATAGGGGYANVQPLYFNSQKGGLAIAHNGNLVNANHLKHQLEAQGSIFQSTSDTEVLAHLIKRSGYYTLEEQLKNGLSSLKGAYAFAVMNERQLMVALDPNGLRPLSIGRLGDAYVVASETCAFDIIGATYEREVMPGELLIIDDTGLRSERFVSPGNRAICSMEYVYFARPDSNVDTINIHTARKNLGKQLAIEAPVEADVVTGVPDSSISAAIGYAEQSGIPYELGMIKNRYVGRTFIQPSQELREQGVKMKLSPVRGVVEGKRVVMIDDSIVRGTTSRRIVHMLRDAGAAEVHVRISSPPIKHPCFYGIDTSTTEELIASNHSIEEMREIMGADSLAFLSTEGLKAGIGRSEAMHNCGQCLACFTGEYPTEIYADTVHPHAKV

SEQ ID NO: 30437 - DNA, 1338 bp, Campylobacter jejuni RM1221
  CDS (1)..(1338): transl_table=11
atgtgtgcagttgtaggagttatcaattcaaaaaatgctagcacttatgcgtattatgcgctttttgctatgcaacaccgtgggcaagaagcaagtggcattagtgtgagtaatggtaaaaatattaagactattaaagctaaaggtgaagtgagtcaaatttttaatcctgataatctaaaaactttagaaggtgaaatcgctatagggcataatcgctattctacagcaggaaattcaagtttaaatgacgctcagcccatagcagctacttcggttttaggtgatattgctttagcgcataatggaaatttagtcaataaagaagaggtaagatcaagacttattcaagatggggctatttttcaaaccaatatggatacagaaaatgttgtccatcttatcgcaagaagtaagcaagaaagtctaaaagatagatttattgagagtttaaaagaatgtataggagcttattgttttgttttagcaagcaaagataaactttatgttgtaagagatcctcatggggtgcgtcctttgtctttagggcgtttaaaagatggaggctatatagttgctagtgaaacttgtgcttttgatcttatagaggctgaatttattcgtgatgttaaaccaggggaaatgcttatttttactcagggaaatgataaatttgaaagcatagaacttttttctcaaactcctagaatttgcgcttttgaatacatttattttgctagacctgatagtatagtagaaggcaaaagcgtgtatgaagtgcgtaaaaaaatgggcgaagctttagctaaaaaatttgcttataaagcagactttgtcgtgcctgtgccagatagtggagtaagtgcagctataggttttgcgcaatatttacaaatccctcttgaaatggcaatagtaagaaatcattatgtaggaagaacttttatagagccaactcaagagcttagaaatttaaaagtaaaattaaaacttaatcctatgcgtaaagttttagaaggcaaagaaatcgtagtcattgatgatagcttggtgcgtggcactacttctaaaaaaataatttccttacttcgtgctgcaggagcgagtaaaatccatcttgccatagcttgtcctgagatcaaatttcctgatacttatggtatagatactccaacttttgaagaacttatcagcgcaaataaaaatgctgaagaagtgcgtgaatatgtagaagctgatacgctaagttttttaagcataaaagagctaactcaaagcataggcgatgaaagaaaatattctttaatcagttttgatggagattattttattaaataa

SEQ ID NO: 30438 - protein, 445 aa, Campylobacter jejuni RM1221
MCAVVGVINSKNASTYAYYALFAMQHRGQEASGISVSNGKNIKTIKAKGEVSQIFNPDNLKTLEGEIAIGHNRYSTAGNSSLNDAQPIAATSVLGDIALAHNGNLVNKEEVRSRLIQDGAIFQTNMDTENVVHLIARSKQESLKDRFIESLKECIGAYCFVLASKDKLYVVRDPHGVRPLSLGRLKDGGYIVASETCAFDLIEAEFIRDVKPGEMLIFTQGNDKFESIELFSQTPRICAFEYIYFARPDSIVEGKSVYEVRKKMGEALAKKFAYKADFVVPVPDSGVSAAIGFAQYLQIPLEMAIVRNHYVGRTFIEPTQELRNLKVKLKLNPMRKVLEGKEIVVIDDSLVRGTTSKKIISLLRAAGASKIHLAIACPEIKFPDTYGIDTPTFEELISANKNAEEVREYVEADTLSFLSIKELTQSIGDERKYSLISFDGDYFIK

SEQ ID NO: 30439 - DNA, 1401 bp, Ehrlichia ruminantium str. Welgevonden
  CDS (1)..(1401): transl_table=11
atgcaatttaatgaaatatatgaggaatgtggagtatttgccatatataataacaattatgcagctatcaattgtattttaggattacacgctattcaacatagaggacaagaatcatttggtatagtaacatctgataatactaatttttactcctattactctaatgaacaagtgaatactatcttcactcaacaatcaaaaatagaccacctattaggaaatattgctattggacacgtacgttactctacaagcggaagcaaaactggtatgcaacctataattttagattgccaatttggaaaattagcaatagcacataatggtaaccttattaatgcattacaaattagagaatcactcattaaaaaaggacgtatattttcatcagacattgatacagaagtaatagcacatcttattgctatgaatacacaagatactatattggacaatataatatacgccctacaaaatattaagggtgcttattctttagtaattttgataaacaatactttagtatgttgtcgagatccatatggtattagaccattagtactaggcatgttagacaatgtatatgtaatagcttcagaaacatgtgctttagatatagttggagcacaatttgtcagagatattttaccaggagaattaataacaattaatcaaagtaataccttaacaagttatttcccatttgaaaaacaaaaatcaagtttttgtatttttgaatacgtatattttgcacgaccagacagtataatggaaaataagtctgtatatgaaatacgtaaaaacataggaagagaactagcaatagagaatcctgtaccaaaagatacaaatatggtaatacctatacctgattctggagtaccagctgcattagggtttgcagaatatactaatataccttttgagttcggcattattaggaatcattatataggaagaacttttatacaacctcacgaccatattcgtaatataggagtaaagcttaagcataatcccaattcttcaatattaaaaggtaaaaatatagttttaatagatgatagtattgtacgaggaacaactttaaaaaatataatagcattactccataaagcaggtgtcaaacagatacacttaagaatctcaagtcctcctactatacattcttgcttctacggaatagacacaccagaagaatcaaaattgatagccaacaatttatcaaaagcagacattataaaattattaggatgtgatagcttacatttcttaagcataaatgggctttacaaggcaatatgcaatacaaaacgcaataatgtcccacaatattgtgatgcatgcttcactggagattacccaattggtaaaatagatacaaataatgtttactaa

SEQ ID NO: 30440 - protein, 466 aa, Ehrlichia ruminantium str. Welgevonden
MQFNEIYEECGVFAIYNNNYAAINCILGLHAIQHRGQESFGIVTSDNTNFYSYYSNEQVNTIFTQQSKIDHLLGNIAIGHVRYSTSGSKTGMQPIILDCQFGKLAIAHNGNLINALQIRESLIKKGRIFSSDIDTEVIAHLIAMNTQDTILDNIIYALQNIKGAYSLVILINNTLVCCRDPYGIRPLVLGMLDNVYVIASETCALDIVGAQFVRDILPGELITINQSNTLTSYFPFEKQKSSFCIFEYVYFARPDSIMENKSVYEIRKNIGRELAIENPVPKDTNMVIPIPDSGVPAALGFAEYTNIPFEFGIIRNHYIGRTFIQPHDHIRNIGVKLKHNPNSSILKGKNIVLIDDSIVRGTTLKNIIALLHKAGVKQIHLRISSPPTIHSCFYGIDTPEESKLIANNLSKADIIKLLGCDSLHFLSINGLYKAICNTKRNNVPQYCDACFTGDYPIGKIDTNNVY

SEQ ID NO: 30441 - DNA, 1419 bp, Dehalococcoides ethenogenes 195
  CDS (1)..(1419): transl_table=11
ttgcatgaatcttgcggcattttcggtgtatttgcccccggtcaggatgtagcccggctcacatttttcgccctgtttgccttgcagcacaggggacaggaaagctcaggtatttctacatctgacgggcgggaacttaagctttattcccagatgggtctggtctcccatatctttactgaagatatactccgcaaactgggcggacatattgccatagggcataaccgttattccaccaccggttcaagccagcagataaacgcccagccatttctgatgggccaaggcgacaacgttatggccatagcccataacggcaatatagttaattcagaagccctgaatgccgaactaagctctcagggatatgtttttaaaagctctacagataccgaaataatcggccagcttatcctgtcagcagttgaaactgactgggtcaaacggatacgctatgccatgaaccgccttaaaggggctttttcctgcactattatgaccaaagacaccctctacgccatgcgtgacccgctgggtgtccgccccctgtgcctgggcaaaattcaagggggttacgtagttgcttccgaaagctgtgcccttgaccatatcggggctgatttcatacgcgaaatagagccgggtgaaattctggctataaatgaaaacggggtaaccagtttcaaacagccgatttcccgccgggctttgtgcatatttgaatttatttattttgcccgccctgacagccagatagacgggcagcttttatattccgcccgccaggctatgggggcagagctggccagagagtacccggtagaagcggatttggtgataggcgtacctgactccgctacagcagccggtataggttatgctataaattcaggcatacccccggccgaaggccttattaaaaaccgctacatggggcggacatttattcagcctgaccagcaccttcgcgacctgggagtaaagctcaagttcaaccccctgaggagtgttctggaagacaagcgggtagtactggtagatgacagcatagtccgcgggactaccaccccccaggttatccgcctgctgcgcaaagccggtgccaaagaagtacatatgagggtatgcgccccgcccataaccaacccctgtttcttcggggtagacatggccacccgttcggagcttattgccgctaaaatgagcgtgcctgagatacagaaatacataggggcagattcacttggttacctcagcctgcccggccttataaaggcagtggggctgcccaaagataacttctgcctggcctgtttcaccggcgaatacgccctgccggttcagctggagatggataaatttgcactcggcaaccagcgcggcaactgctgccagatgccatcacccggcagctaa

SEQ ID NO: 30442 - protein, 472 aa, Dehalococcoides ethenogenes 195
MHESCGIFGVFAPGQDVARLTFFALFALQHRGQESSGISTSDGRELKLYSQMGLVSHIFTEDILRKLGGHIAIGHNRYSTTGSSQQINAQPFLMGQGDNVMAIAHNGNIVNSEALNAELSSQGYVFKSSTDTEIIGQLILSAVETDWVKRIRYAMNRLKGAFSCTIMTKDTLYAMRDPLGVRPLCLGKIQGGYVVASESCALDHIGADFIREIEPGEILAINENGVTSFKQPISRRALCIFEFIYFARPDSQIDGQLLYSARQAMGAELAREYPVEADLVIGVPDSATAAGIGYAINSGIPPAEGLIKNRYMGRTFIQPDQHLRDLGVKLKFNPLRSVLEDKRVVLVDDSIVRGTTTPQVIRLLRKAGAKEVHMRVCAPPITNPCFFGVDMATRSELIAAKMSVPEIQKYIGADSLGYLSLPGLIKAVGLPKDNFCLACFTGEYALPVQLEMDKFALGNQRGNCCQMPSPGS

SEQ ID NO: 30443 - DNA, 1350 bp, Thermococcus kodakarensis KOD1
  CDS (1)..(1350): transl_table=11
atgcgcgaaaagtgcggggtctttgcagcactctcagagaacgcgccgaagaaagcatactacgccctgatagccctccagcaccgcggccaggagagcgccggaataagtgtatggaagcacaggataagaaccgtcgctggcagggggcttatccaggacgttttcaatgggaaaaccctctcatcccttcgctccaacctcgcgatcggtcacgtccgctactccacatccggctctctcagcgagactcagcctcttgaaacggagtgctgtggaaagaggatagcagttgcccacaacggcaccctcacgaactttctccctctgagaaagagttatgagaataggggggttaggtttcaccactccgttgattctgaacttcttgggatttcgtttctctggcacctgaatgagaccggcgacgagtttgaggccatgagagaagtctttaacgaggttaagggcgcttattcggttgctctgctcttcgacggcaaaatcctcgtagcgagagattccgtagggttcaggcccctgagctatgggattggagacggccactactttgcgagcgaggattcggctttgaggcttttcgttgacgagactgagggcggggaaataagggacgttcggccgggtgaggtctttctactctcggaagggagtgtggagagtagagttctggcgagggagaagcaccaccactgcgtcttcgagtacatctacttcgcccggccagacagcacaatagacggcgtgaacgtctatcatgcgagggtgaagatgggaagggaacttgctagggagagtcccgccgatgcagatgttgtgatagcggttcccgactctgggagggcagcagcgttgggcttttcgatggaaagcgggataccctactcggaggggctgataaagaaccgctacatcgggaggactttcataacccccggccagttctacagggagcttaaggtaaagctcaagctctcgcccgtgagggaggtcatcaacggaaagagagtcgttctcgttgatgattccatagtcagggggacgaccatgaggagactagtctcccttctgaggaaagcgggagcgaaggaagtgcacgtgagaatagcgtcgccgcctataaggcacccctgctacatgggtatagacatcccgacgaggcacgaacttatagctgccttcgggagcgttgagaaggtgaggggagcgataggtgctgacagcctggcatatttaagcgttgagggccttatcagggctgttggcaagaaagacctatgcctggcgtgcctcacaggggagtaccctgagtgggccttcaggttttaa

SEQ ID NO: 30444 - protein, 449 aa, Thermococcus kodakarensis KOD1
MREKCGVFAALSENAPKKAYYALIALQHRGQESAGISVWKHRIRTVAGRGLIQDVFNGKTLSSLRSNLAIGHVRYSTSGSLSETQPLETECCGKRIAVAHNGTLTNFLPLRKSYENRGVRFHHSVDSELLGISFLWHLNETGDEFEAMREVFNEVKGAYSVALLFDGKILVARDSVGFRPLSYGIGDGHYFASEDSALRLFVDETEGGEIRDVRPGEVFLLSEGSVESRVLAREKHHHCVFEYIYFARPDSTIDGVNVYHARVKMGRELARESPADADVVIAVPDSGRAAALGFSMESGIPYSEGLIKNRYIGRTFITPGQFYRELKVKLKLSPVREVINGKRVVLVDDSIVRGTTMRRLVSLLRKAGAKEVHVRIASPPIRHPCYMGIDIPTRHELIAAFGSVEKVRGAIGADSLAYLSVEGLIRAVGKKDLCLACLTGEYPEWAFRF

SEQ ID NO: 30445 - DNA, 1482 bp, Gluconobacter oxydans 621H
  CDS (1)..(1482): transl_table=11
atgaggcgtccttgtgaaaccagtccggaaaggccgcgccgcatgacccagtccgacagtctcaaccgcccctacgaagagtgtggggtttttggcgtctggggtgtgcctgatgcgtccgccctgacggctctggggctgcacgccctgcagcatcgcggccaggaagccgccggcatcgtcagtttcgatggcgaacggttccaccagcacaaaggtctgggactggtcggcgatgtgttcggtgacagccgcgtcatggcgacgctgcccggcacggtggccatcggtcacaaccgctatgccacgacgggcgggacgcatgtccgcaatgtgcagccactttatgccgattatgaattcggcggtctggccgtggcgcataacggcaacctgaccaattccgcgaccctcaagcaggcgctggtcaagcgcggatgcatcttccattcctcgacggatacggaagtcttcatccacctgatcgccatatcgctctatacgaccgtgctcgatcgcttcatcgatgccgtcaagcaggtgaagggtgcgtactcgctcattacgctgacgccggatgacggcctgatcggcatgcgcgatccgctcggtgtgcgtccgctcgtccttggccggatgccgggctatgagcagggcaatggcggctgggtgctcgcgagcgagacctgtgctctggatatcattggtgcggactatgtccgggatatcgaacccggcgagatcgtcgtcatcaataatgacggactgcgctccctgcggcctttcggcgatcagggcggccggttctgcgtttttgaatacatttacttcgcgcggcctgattccgtgctcgaaggccagccggtctatgaggcgcggcgtcagatcggctgcgaactggcacgggagagcgcggttgaggcggatgtcgtggtgccggtgccggattccggtgtgccgtctgcgatcggctatgcggcggagagtggcattccgttcgagcttggcattatccgtaaccattatgtgggccggaccttcatcgagccgacggaccagatccgtaatctcggcgtgaagatgaagcactccgccaaccgtccggttctggcgggcaagcgcgtcatcctggtggatgattcgatcgtccggggcacgacgtcgcgcaagatcgtggacatggtgcgtgcggccggtgcgacggaagtgcacatgcgcatcacgtctccgccgacgaagcatgcgtgtttctacgggatcgacacgcctgaagagagcaagctgatggcggcgacgcatacgcttgaggaaatggcacaggcgatcggtgcggacagtctggcctttgtcagcttcgacgggctttaccgggcgctgggtcatgctaaccgggccgagggcgcgcgccgttactgcgatgcctgcttcaccggggattacccgatcgaactggtggacaaggaaggcaatctggtcgcgtaa

SEQ ID NO: 30446 - protein, 493 aa, Gluconobacter oxydans 621H
MRRPCETSPERPRRMTQSDSLNRPYEECGVFGVWGVPDASALTALGLHALQHRGQEAAGIVSFDGERFHQHKGLGLVGDVFGDSRVMATLPGTVAIGHNRYATTGGTHVRNVQPLYADYEFGGLAVAHNGNLTNSATLKQALVKRGCIFHSSTDTEVFIHLIAISLYTTVLDRFIDAVKQVKGAYSLITLTPDDGLIGMRDPLGVRPLVLGRMPGYEQGNGGWVLASETCALDIIGADYVRDIEPGEIVVINNDGLRSLRPFGDQGGRFCVFEYIYFARPDSVLEGQPVYEARRQIGCELARESAVEADVVVPVPDSGVPSAIGYAAESGIPFELGIIRNHYVGRTFIEPTDQIRNLGVKMKHSANRPVLAGKRVILVDDSIVRGTTSRKIVDMVRAAGATEVHMRITSPPTKHACFYGIDTPEESKLMAATHTLEEMAQAIGADSLAFVSFDGLYRALGHANRAEGARRYCDACFTGDYPIELVDKEGNLVA

SEQ ID NO: 30447 - DNA, 1467 bp, Lactobacillus acidophilus NCFM
  CDS (1)..(1467): transl_table=11
ttggaaggagtgcatcccttgtttaatgaaatcaaaagcctaaatgaggaatgtggcatcttcggagtttttggagctcctaatgctagtcaattaacctatttaggcttgcataacttacagcaccgcggccaagaaggggccggcattgtttcaagtgatggcgagcatttataccaacaccgcgatcgtgggcttctatccgatgcctttgccgatcctaacgatttaaaaaagctagtcggtgacagtgctataggccatgttcgctacagtacgacggggcgcaattcgattcaaaatgtgcagccatttctttttcactttctcgatggggatgtggctttagctcacaacggtaatttagttaacgccgtgtctttacgagacaagctggaaaaacaaggtgcaatttttcaatcttcatctgataccgaaattttaatccacttgattcgtaatcatattaaagatggttttatttcggcattaaagcaaggtttaaacgaagttcatggcggttttgccttcttgcttttacaaaaagatcgcatgattgcagccctggatcctaacggaatcagacctttatgcattggccagcttgataatggcgcatacgttgtttctagtgagacttgcgcgctagacataattggtgccaaatttgttcgcgacgttcaaccgggtgaattaatcatcattgatcgagatgggatgaaaattgatcattttactgaggatactcatttagcaatctgttcaatggaatacatctattttgctcgacctgattcgattattcacggcgtgactgtccacaatgctagaaagagaatgggacgactgctggctcgtgaagccccagccgatgttgatatggtaattggcgtgccgaattcatctttgtcagctgcttctggttacgctgaagagttacatttgccatacgaaatgggactagttaagaatcaatatgttgctagaaccttcatccaacctacgcaagccttgcgtgaaaagagcgtgaagttgaagctttcggctgtacgaggcgttgttgctggtaaaaagatcgctgtcattgacgattcaattgtaagagggacaacttctaagcaaattgtcagaatgcttaaagaagtaggtgccaaagaagttcacttgagaattgctagtccaccatttaaatttccttgtttttacggcattgacatttcaactcgggctgaattaatagctgctcattattcagtagaagaaatgcgtaaaatcatcggtgctgatagccttggctttttgagcgttgatagcttgattaaagcaatcaatgtgcctgatcgtggagacttatcggggctgacagttgcttactttaatggtaaatatccaactaaattggatgactacgaagctggatacttagcttctcttaatgctcaagaacggcgaaaaagaaaggaataa

SEQ ID NO: 30448 - protein, 488 aa, Lactobacillus acidophilus NCFM
MEGVHPLFNEIKSLNEECGIFGVFGAPNASQLTYLGLHNLQHRGQEGAGIVSSDGEHLYQHRDRGLLSDAFADPNDLKKLVGDSAIGHVRYSTTGRNSIQNVQPFLFHFLDGDVALAHNGNLVNAVSLRDKLEKQGAIFQSSSDTEILIHLIRNHIKDGFISALKQGLNEVHGGFAFLLLQKDRMIAALDPNGIRPLCIGQLDNGAYVVSSETCALDIIGAKFVRDVQPGELIIIDRDGMKIDHFTEDTHLAICSMEYIYFARPDSIIHGVTVHNARKRMGRLLAREAPADVDMVIGVPNSSLSAASGYAEELHLPYEMGLVKNQYVARTFIQPTQALREKSVKLKLSAVRGVVAGKKIAVIDDSIVRGTTSKQIVRMLKEVGAKEVHLRIASPPFKFPCFYGIDISTRAELIAAHYSVEEMRKIIGADSLGFLSVDSLIKAINVPDRGDLSGLTVAYFNGKYPTKLDDYEAGYLASLNAQERRKRKE

SEQ ID NO: 30449 - DNA, 1401 bp, Ehrlichia ruminantium str. Gardel
  CDS (1)..(1401): transl_table=11
atgcaatttaatgaaatatatgaagaatgtggagtatttgccatatataataacaattatgcagctatcaattgtattttaggattacacgctattcaacatagaggacaagaatcatttggtatagtaacatctgataatactaattttcactcctattactctaatgaacaagtgaatactatcttcactcaacaatcaaaaatagaccacctactaggaaatattgctattggacacgtgcgttactctacaagcggaagtaaaactggtatgcaacctataattttagattgtcaatttggaaaattagcaatagcacataatggtaaccttattaatgcattacaaattagagaatcactcattaaaaaaggacgtatattttcatcagacattgatacagaagtaatagcacatcttattgctatgaatacacaagatactatattggacaatataatatacgctctacaaaatattaagggtgcttattctctagtaattttgataaacaatactttaatatgttgtcgagatccatatggtattagaccattagtactaggcatgttagacaatgtatatgtaatagcttcagaaacatgtgctttagatatagttggggcacaatttgttagagatattttaccaggagaattaataacaattaatcaaagtaataccttaacaagttatttcccatttgaaaaacaaaaatcaagtttttgtatttttgaatacgtatattttgcacgaccagacagcataatggaaaataagtctgtatatgaaatacgtaaaaacataggaagagaactagcaatagagaatactgtaccaaaagatacaaatatggtaatacctatacctgattctggagtaccagctgcattagggtttgcagaatatactaatataccttttgagttcggcattattaggaatcattatataggaagaacttttatacaacctcacgaccatattcgtaatataggagtaaagcttaagcataatcccaattcttcaatattaaaaggtaaaaatatagttttaatagatgatagtattgtacgaggaacaactttaaaaaatataatagcattactccataaagcaggtgtcaaacagatacacttaagaatctcaagtcctcctactatacattcttgcttctacggaatagacacaccagaagaatcaaaattgatagccaacaatttatcaaaagcagacattataaaattattaggatgtgatagcttacatttcttaagcataaatgggctttacaaggcaatatgcaatacaaaacgcaataatgtcccacaatattgtgatgcatgcttcactggagattaccccattggtaaaatagatacaaataatgtttactaa

SEQ ID NO: 30450 - protein, 466 aa, Ehrlichia ruminantium str. Gardel
MQFNEIYEECGVFAIYNNNYAAINCILGLHAIQHRGQESFGIVTSDNTNFHSYYSNEQVNTIFTQQSKIDHLLGNIAIGHVRYSTSGSKTGMQPIILDCQFGKLAIAHNGNLINALQIRESLIKKGRIFSSDIDTEVIAHLIAMNTQDTILDNIIYALQNIKGAYSLVILINNTLICCRDPYGIRPLVLGMLDNVYVIASETCALDIVGAQFVRDILPGELITINQSNTLTSYFPFEKQKSSFCIFEYVYFARPDSIMENKSVYEIRKNIGRELAIENTVPKDTNMVIPIPDSGVPAALGFAEYTNIPFEFGIIRNHYIGRTFIQPHDHIRNIGVKLKHNPNSSILKGKNIVLIDDSIVRGTTLKNIIALLHKAGVKQIHLRISSPPTIHSCFYGIDTPEESKLIANNLSKADIIKLLGCDSLHFLSINGLYKAICNTKRNNVPQYCDACFTGDYPIGKIDTNNVY

SEQ ID NO: 30451 - DNA, 1386 bp, Wolbachia endosymbiont strain TRS of Brugia malayi
  CDS (1)..(1386): transl_table=11
atgctcgataaaatgtacgaagagtgcggagtatttggtataagctgcaataaagattctgcctttgactctatactaggtcttcatgctttgcagcacaggggtcaagaatcttttggcgtagtaacaagtaacaacgataagctgcattcttatcattttcaaggtcaggtgagtagtgtacttgacaatatagatgaaataaaaaaatccttgcctggaaattatgcaataggtcacgttcgatactcaacaagtggcaataaatctggagtgcagcctatccttggcaaaagtaacaagtttggagattttgccatagcacataatggtaacttaattaatatttctccaatacgcgagcagttgattaaacagggacgcgtttttcaatcagatattgatacagaggtggtagctcgtttggtagaagccaatacgaaaaatagctttctagggagtttcatatatgcattaaagcaaatacaaggcgcttattcttttgtagcaatcaaccgagaagtagttgttggagtacgtgattcagcaggaatcagacctcttgttttaggaaaattgaacagttcttacgtgctcgcatctgagacttgcgcccttgatatagtaaatgcagagtttattagagaaatagaaccaggtgaactagttactatcgatcaaaatggtaatctagcttcagcatttcctctttctcagcaaaagtcaagtttctgtatctttgaatacatttatttttcaaggccagacagcataatagaagataggtccatatatgatataagaaaagagataggaagaacacttgcagaagagagtccaccgaaaaacaatgtggatatggttgtaccaatacctgattctggaatacctgcagccatcggatacacaaaatattcaggattacctatagaactcggaataatccgtaatcattacattggaagaacttttatacaaccaaccgctgaagtacgtaaagttagaataaaattaaaatttaatgctaataaagacattttaaagggtaagaacataattttaatagacgatagtatagtacgtggtagtacactaaaaagcataatagttatgctaaaagatgcaggagtaaaagaaattcacctaaaaatctcaagtccaccaattaagtattcttgtttttacggaattgacacaccagagtgcaaggatctaattgccgcaagtaagtctgtaagggaaatagaagcaattataggggtaaatagtttaaccttcttaagcatcgatggattatatcaggctgttaacggagagaaacgtaataacacagcaccgcaatactgcgatgcctgtttcactggtgattatccgattggtaagtaa

SEQ ID NO: 30452 - protein, 461 aa, Wolbachia endosymbiont strain TRS of Brugia malayi
MLDKMYEECGVFGISCNKDSAFDSILGLHALQHRGQESFGVVTSNNDKLHSYHFQGQVSSVLDNIDEIKKSLPGNYAIGHVRYSTSGNKSGVQPILGKSNKFGDFAIAHNGNLINISPIREQLIKQGRVFQSDIDTEVVARLVEANTKNSFLGSFIYALKQIQGAYSFVAINREVVVGVRDSAGIRPLVLGKLNSSYVLASETCALDIVNAEFIREIEPGELVTIDQNGNLASAFPLSQQKSSFCIFEYIYFSRPDSIIEDRSIYDIRKEIGRTLAEESPPKNNVDMVVPIPDSGIPAAIGYTKYSGLPIELGIIRNHYIGRTFIQPTAEVRKVRIKLKFNANKDILKGKNIILIDDSIVRGSTLKSIIVMLKDAGVKEIHLKISSPPIKYSCFYGIDTPECKDLIAASKSVREIEAIIGVNSLTFLSIDGLYQAVNGEKRNNTAPQYCDACFTGDYPIGK

SEQ ID NO: 30453 - DNA, 1467 bp, Xanthomonas oryzae pv. oryzae KACC10331
  CDS (1)..(1467): transl_table=11
atgtgtggcatcgtcggtattgtcggcaaccagaacgtcgccgggcagctgtatgacggcctgaccgtcctgcagcatcgtgggcaggacgccgcaggcatcgccaccgcagatggcacgcgcctgcgggtgcagaaggccaatggcctggtccgcgacgtcttcgacgaaaagaaaatggcggtgctggaaggccgcgtcggtatcgcgcattgccgttacccgaccgcaggttcggaaggcatggacgaggcgcagccgttctatgtcaactcgccttatggcatcgcgctggcgcacaacggcaacctgatcaacaccgaggccttgcgccagcaagtgttcgaagccgaccgccgcaacatcaataccgattcggacagcgaagtgctgttgaacgtgttcgcctacgagctggacgcgcagcgcatgcttacccccgaagcggccatccgcgcggtggccggcgtgcaccgccgctgcaagggcggctacgcggtggtcagcgtggtgttgggcctgggcctggtcgcgttccgcgacccgcacggcatccgcccgctggtgctgggcaagcgcgagcatgccgaaggcgccgaatacatcgtgtcttccgaatcggcagcgctcgacatcctggggtatcagcgcgtgcgcgacgtgcgcccgggcgaagcgttggtgattacggcgcgcggcgagctgttttcggaaatctgcgcttcgccgaccaacaacgcgccgtgcattttcgagtacgtgtatttcgcccgtcccgattcgatgatcgacaacatctcggtgcacaaggcgcgcatgcgcatgggcctgaagctgggcgaaaagatcctgcgcctgcgcccgaatcatgatatcgacaccatcattccgatcccggacacctcgcgcgatgtggcgctggagatgtccaacgtgctcggcgtgaagtaccgcgagggcttcgtcaagaaccgttacgtgggccgcaccttcatcatgccggggcagggcgaacggcagaaatcggtacgccgcaagctcaacccgatccacctggaattccgcaaccgtgtggtgttgctggtcgacgattcgatcgtgcgcggcaccaccagccggcagatcgtgcagatggcgcgcgacgccggcgcgcgcaaggtgtacctggcctcggctgcgccgccggtgcgttaccccaacatctacggcatcgacatgccggcggccgaagagctcatcgcgcatggccgcagcgagctggaaatccaggagtttctgggctgcgactggctgatctaccaggatctggaagacctggaagtggcggtgcgcgaagggaatccggacatcaagcagttcgactcttcgtgcttcaacggcgagtacatcaccggcatcgagccgggatatttcgaacgcatccagcagctgcgctcggacgatgccaagaagcgtcgtcgcgcctga

SEQ ID NO: 30454 - protein, 488 aa, Xanthomonas oryzae pv. oryzae KACC10331
MCGIVGIVGNQNVAGQLYDGLTVLQHRGQDAAGIATADGTRLRVQKANGLVRDVFDEKKMAVLEGRVGIAHCRYPTAGSEGMDEAQPFYVNSPYGIALAHNGNLINTEALRQQVFEADRRNINTDSDSEVLLNVFAYELDAQRMLTPEAAIRAVAGVHRRCKGGYAVVSVVLGLGLVAFRDPHGIRPLVLGKREHAEGAEYIVSSESAALDILGYQRVRDVRPGEALVITARGELFSEICASPTNNAPCIFEYVYFARPDSMIDNISVHKARMRMGLKLGEKILRLRPNHDIDTIIPIPDTSRDVALEMSNVLGVKYREGFVKNRYVGRTFIMPGQGERQKSVRRKLNPIHLEFRNRVVLLVDDSIVRGTTSRQIVQMARDAGARKVYLASAAPPVRYPNIYGIDMPAAEELIAHGRSELEIQEFLGCDWLIYQDLEDLEVAVREGNPDIKQFDSSCFNGEYITGIEPGYFERIQQLRSDDAKKRRRA

SEQ ID NO: 30455 - DNA, 1515 bp, Vibrio fischeri ES114
  CDS (1)..(1515): transl_table=11
atgtgcggtattgttggaatcgtgggcgcaacaccagtaaaccagtcaatctatgacgctttaacagtgctacaacatcgtggccaagatgctgctggtattattaccatagaaagcaatcgtttccgtctgagaaaggcgaacggtttggtgaaggatgtgtttgaaacaaaacacatgcaacgcctacaaggtaacgttggtattggacatgttcgataccctacagcaggtagttctagtgcctcagaagcacaacctttctatgtaaactctccatttggtatcactcttgcgcataatggtaacttaaccaatgcaaatgaaattcgtgaaacgttatttgaacaagagcgtcgtcatgtaaatacaacctctgattctgaagttttattaaatatctttgcacaccatcttgatgaatcaaaaaattacccgctaacaaacgatgatatctttaaaactgtagcgaaagttcatgaacaaattcgtggtgcttatgcagtaacggcaatgatcattggccatggcatggtggcatttcgagatccaaacggcattcgcccattatgtttaggtaagcgtgaaattgaaggtcgcacagaatatatggtggcttcagagtcagtcgctttggatgcagtaggctttgatttcgttcgtgatgttgcaccgggtgaagcgatttatgctccatttgaagggggtttatatactcaacaatgtgcgcatggaccaaagttaaatccatgtatttttgaatttgtttattttgctcgtccagattcgtttattgataaaatttcggtatacagtgcacgagttgaaatgggtaagcgtttaggtgagaaaattaagcgtgagtgggatgatttagatattgatgttgtactgcctattcctgaaacatcatgtgatatcgcattagaaatcgctcagattatcaataagccttaccgccaaggctttgttaagaaccgttatgtcggccgtacttttatcatgccaggtcaacaagagcgtaagaaatcagttcgtcgtaaattgaatgctattcgttcagaatttaaagataaaaacgttttattagttgatgactccattgtgcgtggaacaacctcagagcagattattgaaatggctcgtgattctggtgctaaaaacgtttatatggtgtcagctgctcctgagattcgtttccctaacgtatatggtatcgatatgccaagtgcaaatgagctgattgcacatggtcgtgaagttgatgagatttgcaacgagattggtgcggatgctcttattttccaagacctttcagacttagttgatgcggttggttgcggtaacagagaaattgagaaatttgaaacctctgttttcaatgcacattatgttactggtgatgttgaccagaattacctagagtacttagaaagcctacgtaatgatgatgcaaaacaagacaacgaagcacaaaacgtagcaagtctagatatttataacgaagagatttaa

SEQ ID NO: 30456 - protein, 504 aa, Vibrio fischeri ES114
MCGIVGIVGATPVNQSIYDALTVLQHRGQDAAGIITIESNRFRLRKANGLVKDVFETKHMQRLQGNVGIGHVRYPTAGSSSASEAQPFYVNSPFGITLAHNGNLTNANEIRETLFEQERRHVNTTSDSEVLLNIFAHHLDESKNYPLTNDDIFKTVAKVHEQIRGAYAVTAMIIGHGMVAFRDPNGIRPLCLGKREIEGRTEYMVASESVALDAVGFDFVRDVAPGEAIYAPFEGGLYTQQCAHGPKLNPCIFEFVYFARPDSFIDKISVYSARVEMGKRLGEKIKREWDDLDIDVVLPIPETSCDIALEIAQIINKPYRQGFVKNRYVGRTFIMPGQQERKKSVRRKLNAIRSEFKDKNVLLVDDSIVRGTTSEQIIEMARDSGAKNVYMVSAAPEIRFPNVYGIDMPSANELIAHGREVDEICNEIGADALIFQDLSDLVDAVGCGNREIEKFETSVFNAHYVTGDVDQNYLEYLESLRNDDAKQDNEAQNVASLDIYNEEI

SEQ ID NO: 30457 - DNA, 1545 bp, Neisseria gonorrhoeae FA 1090
  CDS (1)..(1545): transl_table=11
atgtgcggcgtattaggtttggtcagtcatgaacccgtgaaccagcttctgtacgacggtttgcagatgttgcagcacagggggcaggatgcggcgggcattgcaacggcggaaggcggtaccttccatatgcacaaaggcaaagggatggtgagcgaagtgttccgcacgcgcaatatgcgcgatttgaccggcaacgccggcatcgcccacgtccgttatcccacggcgggcaacgccggcagcagcgcggaggcgcagcctttctacgtcagctcgcctttcggcatcgttttggcgcacaacggcaacctcaccaacactgccgaactgtatgaaaacgtgtgtaacaaacacctgcgccacatcaacaccggctccgattccgaagttttgctcaacgtattcgcgcacgaattgcgccgcgaagtctctaaaaacgccgacccgcaccggctcaatgccgacaatattttcaacgccgttgccgaagtccaccgcctagtgcgcggtgcatacggcgtggttgccatgattgcgggctacggtatgctcgccttccgcgacccttacggcatccgcccgctggcattgggttcgcaaaccgacagcgaaggcaggaaatcctatgccgtcgcctccgaatccgtcgccttcaatgcgcttgcctacgatttggaacgcgatatccggccgggcgaagcggtatttgtcggctttaacggcacaatcatcgcccgacaatgcagcgaccgtgccaaactcagcccctgcctttttgaatatgtttattttgcccgccccgactctgtgattgacggtgtatcggtttaccaatcgcgcttggatatgggcgtgtccttggcggaaaaaatcaaacgcgagctgcccgtggacggcatcgacgtcgtgatgcccattcccgataccagccgccccagtgcaatggagcttgccgtccacctcaacaaaccctaccgcgagggtttgattaaaaaccgctatatcggccgcacctttattatgcccggtcagtcgacgcgcaaaaaatccgtgcgccaaaaactcagcccgatggaaaccgaatttgcaggcaaaagcgtgttgctggtggacgactccatcgtgcgcgggacgaccagccgcgaaatcgtcgaaatggtacgcgcggcgggcgcgcgcaaagtctatatcgcctccgccgcgcccgaagtgcgctatcccaatgtgtacggcatcgatatgcccacgcgcgaagagttgattgccaacgggcgcagcgcggcggaaatcgccgccgaaatcggcgcggacggcatcgtgtttcaagacttgggcgatttggaagccgtcgtcaaagcactcaacccgaaaatcgaatccttcgattcgtcctgtttcaacggcatttatcggaccggcgacatcgatgatgcctacctcgaccgcctgtctgccgagaaatccggctgcgccggtctgaaaatccacccgagcaggatggaacacagcatcagcatcagcgatgcgggcgacgaagaataa

SEQ ID NO: 30458 - protein, 514 aa, Neisseria gonorrhoeae FA 1090
MCGVLGLVSHEPVNQLLYDGLQMLQHRGQDAAGIATAEGGTFHMHKGKGMVSEVFRTRNMRDLTGNAGIAHVRYPTAGNAGSSAEAQPFYVSSPFGIVLAHNGNLTNTAELYENVCNKHLRHINTGSDSEVLLNVFAHELRREVSKNADPHRLNADNIFNAVAEVHRLVRGAYGVVAMIAGYGMLAFRDPYGIRPLALGSQTDSEGRKSYAVASESVAFNALAYDLERDIRPGEAVFVGFNGTIIARQCSDRAKLSPCLFEYVYFARPDSVIDGVSVYQSRLDMGVSLAEKIKRELPVDGIDVVMPIPDTSRPSAMELAVHLNKPYREGLIKNRYIGRTFIMPGQSTRKKSVRQKLSPMETEFAGKSVLLVDDSIVRGTTSREIVEMVRAAGARKVYIASAAPEVRYPNVYGIDMPTREELIANGRSAAEIAAEIGADGIVFQDLGDLEAVVKALNPKIESFDSSCFNGIYRTGDIDDAYLDRLSAEKSGCAGLKIHPSRMEHSISISDAGDEE

SEQ ID NO: 30459 - DNA, 1458 bp, Brucella abortus biovar 1 str. 9-941
  CDS (1)..(1458): transl_table=11
atgctggatgatgacaccctgcatgaagaatgtggtgtattcggcattctgggccatgaggatgcggctgcgctgaccgcgctcggcctgcatgcgctccagcatcgcggtcaggaagccgccggcattgtttcctatcataatcgccgtttccattccgaacgccatatgggcctcgtcggcgaccatttcaccgatgcggcaacactgaaccgcctgccgggcaaccgcgccatcggccatgtgcgttattccacaaccggcgagacgatcctgcgcaatgtacagccgctgtttgcggaactggaagtcggcggcatcgccattgcccataacggcaatttcaccaatggcattacgctgcgcaaacagttgattgcttccggcgcgatcttccaggcaacgtcggatacggaagtcgtgctgcacatgattgcccgttcgcggcactcctcctcaaccgaccgtttcgtggaagcgatccgccaggttgaaggcggctatgccatgctggcgcttacccgcaccaagctgatcgccgcgcgcgatcccatcggcattcgcccgctcgtcatgggcgagctggacggcaagccgatcttctgctcggaaacctgcgctctcgatattatcggcgcgaaatatattcgcgacgtcgagaatggcgaagtggtagtctgcgaaatccagaaggatggctccatcaccacccgatccatcaagccggaaaatccgcagccggagcggctgtgcctttttgaatatgtttatttcgcacggccggattcggtagtgggtggccgcagcgtctatgtggcgcgcaagaacatgggcatgaaccttgccgccgaggcgggcgtggatgccgatgtggtcgtgcccgtaccggatggcggtacgccggcagcgctgggctttgcgcaggcaagcggtattccgtttgaatatggcatcatccgcaaccattatgtgggccgcaccttcattgagcctacacagcagatccgcgcgcttggcgtgaagctgaaacattcagccaatcgcgctatgattgaaggcaagcgggtcgttctggtggatgattccatcgtgcgcggcaccacctcggtcaagatcgttcagatgatccgcgacgcaggcgcaaccgaagtccatatgcgcgtggcaagcccgatgatcttccacccggatttttacggtatcgacaccccccatgccgataagctgctggccaaccagcacgaaagcctcgaatccatgtgccgctacatcggcgccgattcgctggccttcctttccatcgacgggctctacaaggccgttggcggaaagccgcgtgatccaaaggcgccgaccttcaccgatcactatttcacgggcgagtatccgacccgccttctggatcaggaaggcgaaagcaacgtccacaccttgtcgctgctcgccagcaacggctga

SEQ ID NO: 30460 - protein, 485 aa, Brucella abortus biovar 1 str. 9-941
MLDDDTLHEECGVFGILGHEDAAALTALGLHALQHRGQEAAGIVSYHNRRFHSERHMGLVGDHFTDAATLNRLPGNRAIGHVRYSTTGETILRNVQPLFAELEVGGIAIAHNGNFTNGITLRKQLIASGAIFQATSDTEVVLHMIARSRHSSSTDRFVEAIRQVEGGYAMLALTRTKLIAARDPIGIRPLVMGELDGKPIFCSETCALDIIGAKYIRDVENGEVVVCEIQKDGSITTRSIKPENPQPERLCLFEYVYFARPDSVVGGRSVYVARKNMGMNLAAEAGVDADVVVPVPDGGTPAALGFAQASGIPFEYGIIRNHYVGRTFIEPTQQIRALGVKLKHSANRAMIEGKRVVLVDDSIVRGTTSVKIVQMIRDAGATEVHMRVASPMIFHPDFYGIDTPHADKLLANQHESLESMCRYIGADSLAFLSIDGLYKAVGGKPRDPKAPTFTDHYFTGEYPTRLLDQEGESNVHTLSLLASNG

SEQ ID NO: 30461 - DNA, 1485 bp, Corynebacterium glutamicum ATCC 13032
  CDS (1)..(1485): transl_table=11
atgacccaggtaaaccacccgtacgatgatctcaacgaacaggcaccgcaggaagaatgcggcgttttcggcgtttgggcgccaggtgaggaagtctcgaaacttacctactttggcctcttcgcacttcagcaccgtggtcaagaagccgcgggcatcgcagtaggcgatggcgaacagatcctggttttcaaagatttgggcctagtctcccaagttttcgacgaaccaattctggaatccctccgcggaaacatcgccatcggacacacccgatacaccaccgccggcggaaacacctgggaaaatgcccagcctatgttccgcatggcaccagatggcaccgatatcgcccttggacacaacggcaacctgattaattacatcgagttgttggacaaagccaccgaacttggcctcgtcgatcccgccaagaagccatcagataccgatgtgctcactggactgctcgcaagcggcgtccatgacggaaataatctctttgattccgccaaggaactcctccccagcgtcaagggagcctactgcctcaccttcaccgacggacacaccctgtacgcagcgcgtgatccattcggcatccgcccactgtccatcggccgcctcgagcgcggctgggtagtcgcatctgaaaccgcagcgctcgacatcgtaggtgcctcgcatgtgcgcgaggtcgaaccaggcgaactgattgctatcgacgaatccggcctcaagtccgcacgattcgccgagacaacccgcaaaggttgcgtcttcgaatacgtttacctggctcgtccagactccgtgatcaagggaagaaacgtcaacgaagcccgacttgaaatcggccgcaagctcgctgcagaagcaccagcagtcggcgatctagtcatcccaaccccagaatcaggcaccccagcagcagttggattcgcccaagcatctggcatcccattcggccaaggcatggtcaaaaacgcctacgttggccgaaccttcatccagccttccgacactctccgccaactgggaatccgcctcaagctgaacccattgcgcgaggttatcgccggaaagcgccttgtggttgtggatgattccatcgtccgcggtaacacccaacgcgccgtgatccgcatgttgcgcgaagccggtgcagctgaggttcacgtacgcatcgcctcaccacccgtgaaatggccatgcttctacggcatcgattttgccaccccaggcgaactcattgccaacgctgtcaccagtgacaacgaagcagaaatggtagaagcagtccgctccgcaatcggcgcagacaccctcggctacgtctccatcgactccatggttgcagcaaccgagcaaccagccaacgaactctgcatcgcctgcttcgacggcaaataccccatgggtctgccacagggaaacagcaacgcagacctagtccgcaagatgcaagcaaccgcctcaagttaa

SEQ ID NO: 30462 - protein, 494 aa, Corynebacterium glutamicum ATCC 13032
MTQVNHPYDDLNEQAPQEECGVFGVWAPGEEVSKLTYFGLFALQHRGQEAAGIAVGDGEQILVFKDLGLVSQVFDEPILESLRGNIAIGHTRYTTAGGNTWENAQPMFRMAPDGTDIALGHNGNLINYIELLDKATELGLVDPAKKPSDTDVLTGLLASGVHDGNNLFDSAKELLPSVKGAYCLTFTDGHTLYAARDPFGIRPLSIGRLERGWVVASETAALDIVGASHVREVEPGELIAIDESGLKSARFAETTRKGCVFEYVYLARPDSVIKGRNVNEARLEIGRKLAAEAPAVGDLVIPTPESGTPAAVGFAQASGIPFGQGMVKNAYVGRTFIQPSDTLRQLGIRLKLNPLREVIAGKRLVVVDDSIVRGNTQRAVIRMLREAGAAEVHVRIASPPVKWPCFYGIDFATPGELIANAVTSDNEAEMVEAVRSAIGADTLGYVSIDSMVAATEQPANELCIACFDGKYPMGLPQGNSNADLVRKMQATASS

SEQ ID NO: 30463 - DNA, 1509 bp, Pseudomonas syringae pv. syringae B728a
  CDS (1)..(1509): transl_table=11
atgtgtggcatcgtcggtatcgtcggcaagtcgaacgtcaatcaggcgctgtatgacgcgcttaccgtcctccagcaccgcggccaggacgctgccggtatcgtaaccagccatgatggccggttattcctgcgcaaggacaacggattggtgcgcgatgtgtttcatcaacgtcatatgcagcgtctggtcgggcatatgggcatcggtcacgtgcgttaccccaccgcgggcagttcgacgtcggccgaggctcagccgttttacgtcaactcgccttacggcatcacgctggcgcacaacggcaacctcaccaacgtcgagcagctggccaaggaaatttacgagtccgacctgcgccatgtgaacaccaattccgattcggaagtgctgctcaacgtgttcgcccatgaactggccgtgcgtggcaagttgcagccaaccgaagaggatatcttcgcggccgtgaccgacgtgcacaatcgctgccgcggtggttatgcggtcgtagccatgatcaccggctacggtatcgtcggcttccgtgacccggacgccattcgtcctatcgtgttcggccagcgtcacaccgacgaaggcgtcgagtacatgatcgcctcggaaagcgtatcgctggacgtgctgggctttaccctgattcgcgaccttgcaccgggcgaagcggtctacatcaccgaagacggcaagctgcacacccgtcagtgcgcggccaaccccaaatacgctccgtgtatcttcgagcacgtctatctggcgcgcccggattcgatcatcgacggtatctcggtctacaaggcgcgcctgcgcatgggcgagaagctggccgacaagatcctgcgcgagcgtccggatcacgatatcgacgtggtcatcccgattccggacaccagccgtactgcggcgctggagctggccaaccatctgggcgtcaagttccgcgaaggcttcgtcaagaaccgttacatcggccggaccttcatcatgccgggccaggctgcgcgcaagaaatccgtacgccagaagctcaacgccatcgagctggagttccgcggcaagaacgtgatgctggtggatgactccatcgtacgcggcacgacctgcaagcagatcatccagatggcccgcgaagccggtgccaagaatgtctacttctgttctgcagccccggctgtgcgctaccccaacgtctacggcatcgacatgccgagtgctcacgagctgattgcccacaaccgcaccacgcaggacgtggccgacctcatcggtgccgactggctggtctatcaggacctgaatgacctgatcgaagcggtcagcggcagcaagaaaatcaagatcgacaacttcgattgctcggttttcgacggcaagtacgtgaccggcgacatcgacgagcattatttgaaccggatcgagagcgcgcgtaatgacgcctccaagatcaagactcaggcagtgagcgcgatcatcgatctgtacaacaactaa

SEQ ID NO: 30464 - protein, 502 aa, Pseudomonas syringae pv. syringae B728a
MCGIVGIVGKSNVNQALYDALTVLQHRGQDAAGIVTSHDGRLFLRKDNGLVRDVFHQRHMQRLVGHMGIGHVRYPTAGSSTSAEAQPFYVNSPYGITLAHNGNLTNVEQLAKEIYESDLRHVNTNSDSEVLLNVFAHELAVRGKLQPTEEDIFAAVTDVHNRCRGGYAVVAMITGYGIVGFRDPDAIRPIVFGQRHTDEGVEYMIASESVSLDVLGFTLIRDLAPGEAVYITEDGKLHTRQCAANPKYAPCIFEHVYLARPDSIIDGISVYKARLRMGEKLADKILRERPDHDIDVVIPIPDTSRTAALELANHLGVKFREGFVKNRYIGRTFIMPGQAARKKSVRQKLNAIELEFRGKNVMLVDDSIVRGTTCKQIIQMAREAGAKNVYFCSAAPAVRYPNVYGIDMPSAHELIAHNRTTQDVADLIGADWLVYQDLNDLIEAVSGSKKIKIDNFDCSVFDGKYVTGDIDEHYLNRIESARNDASKIKTQAVSAIIDLYNN

SEQ ID NO: 30465 - DNA, 1518 bp, Haemophilus influenzae 86-028NP
  CDS (1)..(1518): transl_table=11
atgtgtggtattgtcggtattgttagccaaagtccggttaatgaatctatttatgcagcattaactcttttgcaacatcgtggacaagatgcggcgggtattgtaacggttgatgatgaaaaccgtttccgcttacgtaaagctaatggcttagtcagcgatgtgttccgtcaagagcatatgctacgcttgcaaggaaatgctggattagggcatattcgctatcctacggcaggaagttctagcgtctcagaggcacaacctttttatgtaaattctccctatggtgtcactttggtgcataacggcaatttaaccaactcagtggagttaaaagaaaaagtctttaaaactgcccgccgtcacgtaaacactaattcagattctgaacttcttcttaatattctcgctaatcatcttgatcacattcctcaaaaccatcttgatccacaagatattttctatgctgttcgtaaaactcacaatgatattcgtggtgcttatgcctgcgtagcgatgattattggacacggaatggttgcatttagagatccttttggtattcgtcctttggtgttgggtaaacgtgaagaaaatggcaaaactgattatatgttcgcctctgaaacagtagctttagatattgtgggtttcgagtttgtgcgtgatattgctgcgggcgaagccgtttatgtgacatttgatggcgagctttattcacaacaatgtaccgaaagtgcggtgttaaatccttgtatttttgagtatgtttattttgcacgcccagattcaacgattgatggtgtctctgtttatgcggcacgtgttcatatgggggaaaaactcgggaaaaaaattgcaaaagaatgggcggatgaaattgataatattgatgtggtcattcctattcctgaaacctccacagatattgcgttacaaatagctcgtgttctagggaagccttatcgacaaggatttgtgaaaaatcgctatgttggtcgtacctttattatgccaggtcaagcacagcgtattagttctgttcgtcgcaaattgaataccattaaagctgaatttaaagataaaaatgtgttattggtggacgattctatcgttcgtggcacaacctctgagcaaattgttgaaatggctcgctcagctggtgcgaagaaaatttactttgcctctgcagctcctgaaattcgttatccgaatgtatatggtattgatatgccgagttgtgatgaactgatcgcttacggtcgaaatgttgaggaaattgcacatttgatcggcgtagataaattaattttccaagatctgaccgcacttactgaatctgttcaattggaaaatccagccattcaaggttttgattgttcagtattcacaggcgaatatattacaggcgatattagtcctgaatatcttgataaaatcgcacttcaacgcaacgatagtgcaaagaaaaaacgtgaaaaacaagcatccaatcttgaaatttataatgaacaataa

SEQ ID NO: 30466 - protein, 505 aa, Haemophilus influenzae 86-028NP
MCGIVGIVSQSPVNESIYAALTLLQHRGQDAAGIVTVDDENRFRLRKANGLVSDVFRQEHMLRLQGNAGLGHIRYPTAGSSSVSEAQPFYVNSPYGVTLVHNGNLTNSVELKEKVFKTARRHVNTNSDSELLLNILANHLDHIPQNHLDPQDIFYAVRKTHNDIRGAYACVAMIIGHGMVAFRDPFGIRPLVLGKREENGKTDYMFASETVALDIVGFEFVRDIAAGEAVYVTFDGELYSQQCTESAVLNPCIFEYVYFARPDSTIDGVSVYAARVHMGEKLGKKIAKEWADEIDNIDVVIPIPETSTDIALQIARVLGKPYRQGFVKNRYVGRTFIMPGQAQRISSVRRKLNTIKAEFKDKNVLLVDDSIVRGTTSEQIVEMARSAGAKKIYFASAAPEIRYPNVYGIDMPSCDELIAYGRNVEEIAHLIGVDKLIFQDLTALTESVQLENPAIQGFDCSVFTGEYITGDISPEYLDKIALQRNDSAKKKREKQASNLEIYNEQ

SEQ ID NO: 30467 - DNA, 1488 bp, Corynebacterium jeikeium K411
  CDS (1)..(1488): transl_table=11
ttgctgagtccattcgacgaccggggcgaaactgagccccgggaagaatgtggcgtattcggagtatgggcaccgggggaggacgtttctaagctgacctactacggcctctacgccttgcagcatcgtggccaggaggccgcaggtattgcggtgggcgatggcgaccagatcgttgtattcaaggatctggggcttgtcagccaggtcttcgacgaacagtcgctggaggccctgaaggggcacatcggcttgggacataaccgctacaccaccgccggtggaaatagctgggaaaatgcgcagcccatgttccgaatggcccccgatggcacggacgtagcgctggggcacaatggcaacctggtggatcaccgggagctgacccaggaggccgcccgtctgggactggtggatccaaaggaaaacccctccgattccctggtgatgtgtgccctgctggctgccgacacacgcgaaggtcacggggtagaagaagcagcgatggagctgttccccaaggtcaagggtgcattctgtgtgctgttcaccgacggtgacgcgctgtatgcggcgcgcgacccgcagggcgtgcggccgctgtccatcggccagctggcaggtggcggctgggttgtggcttctgaaaccgcggcgctggacatcgtgggtgcgcgtttcgtccgcgatgtggagccgggcgagctggtgatcgtcgacggcgatggcgtgcgctcccgccgcttcgccgagaccgcccacaagggctgcgtgtttgagtacgtatacctggcgcgccccgattccgtgatccgcggccgctcggtcaatggcgcgcgtctgcagatcggccggaaactggcggaggaagccccggcggacggcgacctggtcatccccgttccggaatccggcaccccggcggcggtgggatatgcccaggcttcgcgcatccccttcggccaggggctgatgaagaacgcctatgtggggcgcacctttatccagccttcgcagacgatccgtcagctgggcattcgcttgaagctcaacccgctgcgcgaggttatcgagggcaagcgcctggtcgttgtcgacgattcgatcgtgcgtggcaacacccagcgcgctctcatcaagatgctgcgtgaagcgggagcgaaggaagttcacgtccgcatcgcttcgccgccggtgaagtggccgtgcttctacggcatcgactttgcctcgcccaccgagctcattgcgaataacgttgacgccgcagacccggtggaagggatccgcaaggaaatcgatgcggattccctagccttcgtctcgaccgaggcgatgatagaggcgtcacaacaaagcagcgacgagctgtgcgcggcgtgcttcgatggcgtgttccccctaggcatgccgagcgacaacccgaattcagcgctggtcgaaacaatgctgaagcaacaggctaagaaagcgagtactaagccatga

SEQ ID NO: 30468 - protein, 495 aa, Corynebacterium jeikeium K411
MLSPFDDRGETEPREECGVFGVWAPGEDVSKLTYYGLYALQHRGQEAAGIAVGDGDQIVVFKDLGLVSQVFDEQSLEALKGHIGLGHNRYTTAGGNSWENAQPMFRMAPDGTDVALGHNGNLVDHRELTQEAARLGLVDPKENPSDSLVMCALLAADTREGHGVEEAAMELFPKVKGAFCVLFTDGDALYAARDPQGVRPLSIGQLAGGGWVVASETAALDIVGARFVRDVEPGELVIVDGDGVRSRRFAETAHKGCVFEYVYLARPDSVIRGRSVNGARLQIGRKLAEEAPADGDLVIPVPESGTPAAVGYAQASRIPFGQGLMKNAYVGRTFIQPSQTIRQLGIRLKLNPLREVIEGKRLVVVDDSIVRGNTQRALIKMLREAGAKEVHVRIASPPVKWPCFYGIDFASPTELIANNVDAADPVEGIRKEIDADSLAFVSTEAMIEASQQSSDELCAACFDGVFPLGMPSDNPNSALVETMLKQQAKKASTKP

SEQ ID NO: 30469 - DNA, 1485 bp, Staphylococcus haemolyticus JCSC1435
  CDS (1)..(1485): transl_table=11
gtgtttaactacagtggattaaacgaagaatgtggtgtgttcggcatttggaatcattcagaagccgctcaattaacctatatgggacttcacagtttacaacatcgtggtcaagaaggtgcaggtattgttgtatcagatggagaaattttaaaaggtgaacgaggtcttggattgttaacagaagcaattaaaggtgatcaaatggatcaacttaaagatggacacaacgccattggccatgttcgctatgccacatcaggtaataaagggattgaaaatatacaaccatttttatatcacttttacgatatgagcgttgcgatttgccacaatggtaatttaattaatgcccagacgttacgtcaatatttggaaaaacatggtgcaatcttccattcttcatctgacactgaagtgattatgcatttaatacgcagaagtaaagcaccaacttttgaagaagcgttaaaagagagcttgcgacaaattaaaggcggattcacatttgcaatacttactaaagatgcattatatggagcagtagatcctaacgctatccgtccactggtagtaggtaaaatgcaagatgacacgtacatcttagctagtgaaacatgtgccattgatgtattaggtgctgaatatgtgcaagatatccatgctggagaatatgttgttattaataatgaaggtattgaagtgaaatcatatacgagtcatacaaatacggctatttcagctatggaatatatttatttcgctcgtcctgattctactattgctggcaaaaatgttcatgctgttcgtaaagcatctggaaaaaaattagcacaagaaagccctgcaaatgcagatatggttattggtgtacccaactcatcattatcagctgcaagtgggtatgctgaagaaagtcacctaccttatgaaatggggttggtgaagaaccaatatgtagctcgcacatttatccaaccgactcaagagttaagagaacaaggtgtccgcgttaaattgtcggcagtcaaggatatcgtagaaggtaaacgaattgtattagttgatgattcaattgtgcgtggaacaacgagtaaacgtattgtcagaatgttaaaggactccggagctaaagaggttcatgtaagaatcgcttctccagaatttatgttcccaagcttttacggtatagatgtttcaacgactgctgaactcatttctgcaagtaagtcacctaaagaaatttgtgattatattggtgcagactcattatcatatttaagcgtagacggtctaattgaatcgattggattagattatgacgcaccgtatagtggtttatgtgtagagagctttacaggtgattatccagcaggactatttgattatgaagataaatattataagaacttaagtcaacgtcaacaggattatattaataatcataaacactactttgatagagagggtaatattcatgtctaa

SEQ ID NO: 30470 - protein, 494 aa, Staphylococcus haemolyticus JCSC1435
MFNYSGLNEECGVFGIWNHSEAAQLTYMGLHSLQHRGQEGAGIVVSDGEILKGERGLGLLTEAIKGDQMDQLKDGHNAIGHVRYATSGNKGIENIQPFLYHFYDMSVAICHNGNLINAQTLRQYLEKHGAIFHSSSDTEVIMHLIRRSKAPTFEEALKESLRQIKGGFTFAILTKDALYGAVDPNAIRPLVVGKMQDDTYILASETCAIDVLGAEYVQDIHAGEYVVINNEGIEVKSYTSHTNTAISAMEYIYFARPDSTIAGKNVHAVRKASGKKLAQESPANADMVIGVPNSSLSAASGYAEESHLPYEMGLVKNQYVARTFIQPTQELREQGVRVKLSAVKDIVEGKRIVLVDDSIVRGTTSKRIVRMLKDSGAKEVHVRIASPEFMFPSFYGIDVSTTAELISASKSPKEICDYIGADSLSYLSVDGLIESIGLDYDAPYSGLCVESFTGDYPAGLFDYEDKYYKNLSQRQQDYINNHKHYFDREGNIHV

SEQ ID NO: 30471 - DNA, 1335 bp, Sulfolobus acidocaldarius DSM 639
  CDS (1)..(1335): transl_table=11
gtgattagcaagataaaggaacattgcggaatagtcggaattcacaatgttcccgatgcaccaagaattgtatatgagactttgaagtttctccaacatagaggtcaggaatcggctggaataacattcctcgataaggatcgacttagtactgttaagggactaggacttgtggaagacgcattagacccaataattcttaaatcgtcaaacttctctattggtcacgtaagatactcgactacaggacggggagtaatagatgaagctcagcccctaagcgacggtaaaatcgctctagcgtttaatggaactattccaaattacattaattataacgtgaggattgatactgaattcatttatgaagtactgaaaaaccaagaagatataaggcaagggataagaaaattggtggacgtagcagatggtggttattccttagttgtcttaaccaataagggtgaactaatcggtctaagagatcccaaaggctttagacctttggttttaggtaaattaggctcaggctatattatagcgtctgaagattctgcaataaggcagttgggaggaatagtgattagggatgttaaacccggtgagatgatatacatcaagaatggctcaattgaaagcgagatcgtagctagggacgaagttcatttttgttccttcgagtatatttacttctctagggctgactcaataatagacggagtttcagtctatagggctagagtgaggttaggcgagatattagctgagaaccatccagcgaaagcagatattgtggttcctgtaccggagtcctctgtgccaattgccctagggttttcaaggaaatctggaattcctctggaatatggattggtcagaacgtctgtatctaagagatcttttataatgccttcccaggataagagggaaagtattgttgaggagaaattcggagttgttggtgaggtggtaagaaacaagaaaattatattaatagatgattctatagttagaggcacaacaatgaaaaaattagtgaaactaattagagaaaatggtgcaagtgagattcatgtgagaataggttcacctatgatcaggtatccctgctatatgggtatagactttccgaacaagaaggaattaatcgcaaatgataaaaacgagatggagattgcaaagtcaattggagcagattctgttgaatacctctctatagatgagatgattaaggcaattggtagacaagatttatgtcacgcatgtttttcaggtatgtatcctcttaaacattcgtatgatttttctaaactcagtgtaagtatgaaagggtga

SEQ ID NO: 30472 - protein, 444 aa, Sulfolobus acidocaldarius DSM 639
MISKIKEHCGIVGIHNVPDAPRIVYETLKFLQHRGQESAGITFLDKDRLSTVKGLGLVEDALDPIILKSSNFSIGHVRYSTTGRGVIDEAQPLSDGKIALAFNGTIPNYINYNVRIDTEFIYEVLKNQEDIRQGIRKLVDVADGGYSLVVLTNKGELIGLRDPKGFRPLVLGKLGSGYIIASEDSAIRQLGGIVIRDVKPGEMIYIKNGSIESEIVARDEVHFCSFEYIYFSRADSIIDGVSVYRARVRLGEILAENHPAKADIVVPVPESSVPIALGFSRKSGIPLEYGLVRTSVSKRSFIMPSQDKRESIVEEKFGVVGEVVRNKKIILIDDSIVRGTTMKKLVKLIRENGASEIHVRIGSPMIRYPCYMGIDFPNKKELIANDKNEMEIAKSIGADSVEYLSIDEMIKAIGRQDLCHACFSGMYPLKHSYDFSKLSVSMKG

SEQ ID NO: 30473 - DNA, 1215 bp, Sulfolobus acidocaldarius DSM 639
  CDS (1)..(1215): transl_table=11
atggcaggtatactaggtgtatatgcatttgataaaatctggaacataagtaagtttttgtactacggtataataggcttgcaacatagaggctattcaagaagtggtatctcgacattaagcgataaaggattttttaccatctcaggagactcagcacctgaagacttagagcttccagagattcagggatgggctggtgtcgcatatacaggattagaaaagaagtatccttataccacagattatggggttttatccatagatggagtagtgaagactgatctcaatgaactcagtaaaaagctatacaaggatcctgagactgccctaatggaagctgatggagtcttctctttagtcttcctatcaaaagacggaagaatgatcggttatagggatgaacttggagtaaagccactggaaataggaggtttcggatttgatctagccatactgtcttctgaaacaccaggtatttcagtgattggtggtgagttgaaaagggaaataaagccaggagaactagtttatatagattcatattctgtgtcgtacaagagacttaaggaatcatcgtcctctagatattgctctattgatatagtttatcagtcaaggatagacagttacgtttttgatggtaatatctacgatataagggtcaggataggtgaacagttagctgaagagaggaaaattgaaggagatgtggtaataggagttccagacactgcaataccatacgcaataggctattcccgtaaatccggaataccattctctttaggcttcaccaggacaggcagtcctataaggactatgttagcctcggatgatttcctcaaggttattggtgttcagttaaagcttaatcccataaagtctgccgttaagggaaaaagagtaatattaattgatgattctatggtaactggaagaacattaaagaacaccatctttaacttaagagtattaggagccaaggaagtacatgtgctaattggcagtcctaagctaattgccaaatgcccctatggtatgcaagttcctgaagaaaaggagctcatagcagccaatcttccggataacgaaataactaaagttatgggtgcagactcaatatattggctaagtcttgagggactttacaaagtagttggtcatagaaatttatgcgttggttgcatgactaacctctttcctaaatggtga

SEQ ID NO: 30474 - protein, 404 aa, Sulfolobus acidocaldarius DSM 639
MAGILGVYAFDKIWNISKFLYYGIIGLQHRGYSRSGISTLSDKGFFTISGDSAPEDLELPEIQGWAGVAYTGLEKKYPYTTDYGVLSIDGVVKTDLNELSKKLYKDPETALMEADGVFSLVFLSKDGRMIGYRDELGVKPLEIGGFGFDLAILSSETPGISVIGGELKREIKPGELVYIDSYSVSYKRLKESSSSRYCSIDIVYQSRIDSYVFDGNIYDIRVRIGEQLAEERKIEGDVVIGVPDTAIPYAIGYSRKSGIPFSLGFTRTGSPIRTMLASDDFLKVIGVQLKLNPIKSAVKGKRVILIDDSMVTGRTLKNTIFNLRVLGAKEVHVLIGSPKLIAKCPYGMQVPEEKELIAANLPDNEITKVMGADSIYWLSLEGLYKVVGHRNLCVGCMTNLFPKW

SEQ ID NO: 30475 - DNA, 1506 bp, Pseudomonas fluorescens Pf-5
  CDS (1)..(1506): transl_table=11
atgtgtggcatcgtcggtatcgtcggtaagtcgaacgtcaatcaggcgctgtatgacgcgctaaccgtcctccagcaccgcggccaggacgctgccggtatcgtgaccagccatgatggccggttattcctgcgcaaggacaacggcctggtgcgtgatgtgttccagcagcggcacatgcagcgcctggtaggccatatgggcatcggccatgtccgctatccaaccgcgggcagctcgacctcggccgaggctcagccgttctacgtcaactcgccttacggcatcaccctggcgcacaacggcaacctgaccaatgtggagcagttggccaaggagatctacgagtccgacctgcgccacgtcaacaccaactccgactctgaagtgctgctcaacgtgtttgcccacgagctggcccagcgcggcaagttgcagcctaccgaggaagacgtgtttgccgccgtcaccgacgtgcacaaccgttgcgtgggtggctacgcggtggtggccatgatcaccggctacggcattgtcggtttccgtgacccccacggtatccgtccgatcgtcttcggccagcgtcataccgacgaaggcgtggaatacatgatcgcctcggaaagcgtttccctggatgtgctgggtttcaccctgattcgcgacctggctccgggcgaagcggtctacatcactgaagagggcaagctctacacccgccagtgcgccaccaacccgcaactcacgccgtgcatcttcgaacacgtatatctggcccgtccggattcgatcattgatggcgtctcggtgtacaaggcgcgcctgcgcatgggtgagaaactggcagagaagatcctgcgcgagcgtcctgagcacgatatcgacgtggtgatcccgattccggataccagccgcactgcggcgctggagctggcgaaccatctgggggtcaagttccgcgaaggtttcgtcaagaaccgctacataggccgtaccttcatcatgccgggccaggcggcgcggaagaaatccgtacgccagaagctcaatgcgatcgaactggaatttcgcggcaagaacgtgatgctggtggacgactccatcgtccgtggcaccacctgcaagcagattatccagatggcccgtgaagcgggcgcgaagaacgtctacttctgctcggctgcacctgccgtgcgttacccgaacgtgtatggcatcgacatgccgagcgcccacgagttgatcgcccacaatcgttcgacccaggacgtggcagacctgatcggcgccgactggctgatctaccaggacttgccggacctgatcgaggcggtcggtggtggcaagatcaagatcgagaacttcgactgcgcggtgttcgacggcaagtacgttaccggcgatgtcgacgaggcctacctgaacaagatcgagaacgctcgtaacgatgcgtccaaggccaagacccaggcggtcagcgccatcatcgatctgtacaacaactga

SEQ ID NO: 30476 - protein, 501 aa, Pseudomonas fluorescens Pf-5
MCGIVGIVGKSNVNQALYDALTVLQHRGQDAAGIVTSHDGRLFLRKDNGLVRDVFQQRHMQRLVGHMGIGHVRYPTAGSSTSAEAQPFYVNSPYGITLAHNGNLTNVEQLAKEIYESDLRHVNTNSDSEVLLNVFAHELAQRGKLQPTEEDVFAAVTDVHNRCVGGYAVVAMITGYGIVGFRDPHGIRPIVFGQRHTDEGVEYMIASESVSLDVLGFTLIRDLAPGEAVYITEEGKLYTRQCATNPQLTPCIFEHVYLARPDSIIDGVSVYKARLRMGEKLAEKILRERPEHDIDVVIPIPDTSRTAALELANHLGVKFREGFVKNRYIGRTFIMPGQAARKKSVRQKLNAIELEFRGKNVMLVDDSIVRGTTCKQIIQMAREAGAKNVYFCSAAPAVRYPNVYGIDMPSAHELIAHNRSTQDVADLIGADWLIYQDLPDLIEAVGGGKIKIENFDCAVFDGKYVTGDVDEAYLNKIENARNDASKAKTQAVSAIIDLYNN

SEQ ID NO: 30477 - DNA, 1536 bp, Psychrobacter arcticum 273-4
  CDS (1)..(1536): transl_table=11
atgtgtggagtcgttggggtcgcagctcatgagccggtcaaccaaattttgtatgatgccttaaccatgttgcagcaccgtgggcaagatgcggcaggtattgtgactttacaggatggacgtttatatttacgtaaagaaaacggcatggtacgtgacgtctttatgagtcgccatatgttaaagctggtcggtaaatttggtatcggacatgtgcgttatccaactgctggaacgtctagcagtgctgaagcacagcctttttatgtcaactcgccttacggtattacccttgcacataatggtaatttgaccaatgctgagagcttggcaaaatcgctttatcaagaagatcgccgccatttaaataccgactcagattctgaggtattgctcaatgtgcttgcacatgagatgcaaaatctaggaaaaactcatccaacgcctactgatatctttgaagcagtcacagcggtttatagtcgtgttgaaggcgcttacggtgtggtcgctctgattaccggtcatggtttgctagcattccgtgatccaaatggtattcgaccgcttatctttggtaagcgcatggctgctaatggcggcacagaatacatggtggcatcagaatcggttgccttaacaggttcaggttttagtattgtgcgtgatgttaagcctggcgaagctatctttattgatctagatcataaactgcatacgcatcagtgcgtcgagcaaaaagaatatacgccatgtatctttgaatacgtttattttgcccgtccagattcaattatggataatatttctgtctacaaatcgcgcttacgtatgggcgaaaaactggctgataaaatccttgctgaatggggtgaagatcatgatatcgatgtcgtcattcctattccagatacctcgcgcacctcagcgatggagctggcgctaaagatgaatgtgaagtatcgtgaagggtttatgaaaaaccgctatatcggtcgtacctttattatgccaggtcagcagcaacgcaaaaagtcagtacgtcaaaagctcagtgcggtaccattagagtttaaaggtaaaaacgtactcttggttgatgattctatcgttcgcggtaccacttgccatgagattatccaaatggcacgcgatgcaggcgctcgtaaagtattctttgccagtgcatcgccaccggttaaatatccaaacgtctatggtattgatatgccagtgcgtagcgagctgatcgcatcagggcatagcgttgaagaggtacgagaaattattggcgctgaccgtttaattttccaagatttggatgatttgattgaggcggtaaaagatactaagcatagcaaagttgaaggctttgattgtgcggtattcaatggctgttatatcaccggtcaaatcaacgaagcgtatcttgagcatctgcaagagcagcgtaacgacactgctaaaaagggtaaagaaggggtacaagtagtggctgatacaccagtagatatgatgggggtagaagagctttag

SEQ ID NO: 30478 - protein, 511 aa, Psychrobacter arcticum 273-4
MCGVVGVAAHEPVNQILYDALTMLQHRGQDAAGIVTLQDGRLYLRKENGMVRDVFMSRHMLKLVGKFGIGHVRYPTAGTSSSAEAQPFYVNSPYGITLAHNGNLTNAESLAKSLYQEDRRHLNTDSDSEVLLNVLAHEMQNLGKTHPTPTDIFEAVTAVYSRVEGAYGVVALITGHGLLAFRDPNGIRPLIFGKRMAANGGTEYMVASESVALTGSGFSIVRDVKPGEAIFIDLDHKLHTHQCVEQKEYTPCIFEYVYFARPDSIMDNISVYKSRLRMGEKLADKILAEWGEDHDIDVVIPIPDTSRTSAMELALKMNVKYREGFMKNRYIGRTFIMPGQQQRKKSVRQKLSAVPLEFKGKNVLLVDDSIVRGTTCHEIIQMARDAGARKVFFASASPPVKYPNVYGIDMPVRSELIASGHSVEEVREIIGADRLIFQDLDDLIEAVKDTKHSKVEGFDCAVFNGCYITGQINEAYLEHLQEQRNDTAKKGKEGVQVVADTPVDMMGVEEL

SEQ ID NO: 30479 - DNA, 1482 bp, Candidatus Pelagibacter ubique HTCC1062
  CDS (1)..(1482): transl_table=11
atgaaaaaaactatcaagattccaaagaaaaaattcaagatttataatcccaaattaaaagaagaatgtggtgtctttggcgtaagtaacaataaagattcagccgcactaaccgctttaggattacatgctctgcaacatagaggtcaagaaggctgtggaatagtaacatttgatggaaaaaaatattactctgaaaaaagatttggcttagttggagataattttaataaagagaaagtgttaaatagtttacctggtgattatgctattggtcataacagatatagtacaactggtgaaaacactttaagaaatatacagcctttttttgcagatacaaatgctggaggtatcggtgtagctcataatggaaatttaactaattcaataactcttcgaaatagattggttcaagatggtgcaatatttcatactacatctgacacagaaacaattgttcaattaattgctaaatcaaaaagaaacaaaacaattgataaagttatagatgccatattccaaatacaaggtggttacgcgcttgtcatgctaacacaaaatactttaattggtgtaagagatcctcatggtatcagaccattagtaattgggaaaatcaaagatagctatgtctttgcttctgaaacatgtgcactagatataattggtgcaaaatatattcgagatgtagaaaacggtgaggttgtttatatagagaataatgaactaaaaagcatcaaacccttccctgctagaaaagttcgtccgtgcgtttttgagtatatttattttgcaagaccagacagtttactaaatggtaaatctgcttatgaacatagaaaacaatttgggattgaacttgcaaaagaaaacaaaatcaaagcagatattgtagttcctgtaccagactctggtaatgcagcagcccttggttttgctcaacacttaggaattaactttgaattaggtttgattagaaatcattatgttggtcgaacctttattgaacctagtcaaaaaattagaagtcttggtgtaaaattaaaattaaatgcaaatcaatcaactattaaggataagataattattttaatagatgactcgcttgtaagagggacaacttctcataaaattgtgaaaatgttatatgatgcaggagccaaagaagttcatgtaaaaattgcctgtccagaaattaggtttcctgatttttatggtgtggatactcctactaaaaaagagttacttgctgcaaataaaactaatgacgaaatttgtgaatatattggtgctaaatcattagattttttatccttagaaggtgtttatagagcaatgggttttaacaaaagagataataattatcctcaattaacagatcattattttacaggtgaatatcctgttaaacctatagatgaattaggggatgataagatcactcaattatcattactaagcaccgcttcaaataactaa

SEQ ID NO: 30480 - protein, 493 aa, Candidatus Pelagibacter ubique HTCC1062
MKKTIKIPKKKFKIYNPKLKEECGVFGVSNNKDSAALTALGLHALQHRGQEGCGIVTFDGKKYYSEKRFGLVGDNFNKEKVLNSLPGDYAIGHNRYSTTGENTLRNIQPFFADTNAGGIGVAHNGNLTNSITLRNRLVQDGAIFHTTSDTETIVQLIAKSKRNKTIDKVIDAIFQIQGGYALVMLTQNTLIGVRDPHGIRPLVIGKIKDSYVFASETCALDIIGAKYIRDVENGEVVYIENNELKSIKPFPARKVRPCVFEYIYFARPDSLLNGKSAYEHRKQFGIELAKENKIKADIVVPVPDSGNAAALGFAQHLGINFELGLIRNHYVGRTFIEPSQKIRSLGVKLKLNANQSTIKDKIIILIDDSLVRGTTSHKIVKMLYDAGAKEVHVKIACPEIRFPDFYGVDTPTKKELLAANKTNDEICEYIGAKSLDFLSLEGVYRAMGFNKRDNNYPQLTDHYFTGEYPVKPIDELGDDKITQLSLLSTASNN

SEQ ID NO: 30481 - DNA, 1518 bp, Colwellia psychrerythraea 34H
  CDS (1)..(1518): transl_table=11
atgtgtggtattgttggtattgtcggtaaaactcctgttagtcagcatatatatgatggactaactgtacttcagcatcgtggtcaagatgctgctggtattgtaacaattcataataatactttcaggctaagaaaaggtaatgggttagtgaaagatgtttttcatacccgccatatgcttcgcctacaaggtaatattggtattggtcacattcgctatccaacagcgggcacttctagctcttcagaagcacaacctttttatgccaactcaccttttggtttgtcattggcacataatggtaacttaaccaacgctgaagaattaagaacatggttatttgatgaagctcgtcgccatgtgaacacaacttcagattctgaggttctgttaaatatcctagcgcatgaattacagcaaagtgaaaacattgcgctaacaccggaagatattttcactgcagttgctaaagtccataaacgtgttcgtggcgcatatgctactgtagcgcttattgttggtcacggtatgattgcttttcgtgaccctaacggaattcgtcctttagtttttggtaaaagagaaactgaattgggcgttgagtatatggttgcgtctgaatcagttgcgctagatgcatgttcttttgaatttgtacgtgatgttgctccaggtgaaactatatttttctctgaagatggcctaattcacagtctgcaatgtgctgaaaatcctgtttatagcccatgtatatttgaatttgtatactttgctcgccctgattcaaccatggataaaatgtctgtttatgcctctcgtgtagaaatgggaactaagttaggcgagaaaattgccgaggaatggcaagatattgatattgatgttgttattcctatccctgaaacatcttgcgatattgccttacaaatagcaaagcagcttaacttaccttaccgacaaggttttgttaaaaaccgatacatcggtcgtacttttattatgccgggtcaagagcaacgtaaaaaatcagttcgtcaaaagcttaacgctattgcaacggaatttaagggtaaaaatgttttactagttgacgattctgttgttcgaggcactacctcggagcagataattgatatggcgcgtgcctcaggtgcaaaaaatgtctattttgcttcagcagcacctgaagtaagattccctaatgtctatggtatagatatgccaagtgctaatgaactcattgcacatggtcgtgaattggatgatatttgtagtttaattggtgcagataaattaatatttcaatctcttgaggacttaatctctgcagttagcgttggcaatccagacatcaaaacttttgatacttctgtatttgatggtaactatgtcaccaatgatatcgaccaagcatatttagaaagattagatgcattgcgtaataatacgagtaaagaagaatcagacaaaaatgctgattctattattgatatgcataatgaaggtgcagagtag

SEQ ID NO: 30482 - protein, 505 aa, Colwellia psychrerythraea 34H
MCGIVGIVGKTPVSQHIYDGLTVLQHRGQDAAGIVTIHNNTFRLRKGNGLVKDVFHTRHMLRLQGNIGIGHIRYPTAGTSSSSEAQPFYANSPFGLSLAHNGNLTNAEELRTWLFDEARRHVNTTSDSEVLLNILAHELQQSENIALTPEDIFTAVAKVHKRVRGAYATVALIVGHGMIAFRDPNGIRPLVFGKRETELGVEYMVASESVALDACSFEFVRDVAPGETIFFSEDGLIHSLQCAENPVYSPCIFEFVYFARPDSTMDKMSVYASRVEMGTKLGEKIAEEWQDIDIDVVIPIPETSCDIALQIAKQLNLPYRQGFVKNRYIGRTFIMPGQEQRKKSVRQKLNAIATEFKGKNVLLVDDSVVRGTTSEQIIDMARASGAKNVYFASAAPEVRFPNVYGIDMPSANELIAHGRELDDICSLIGADKLIFQSLEDLISAVSVGNPDIKTFDTSVFDGNYVTNDIDQAYLERLDALRNNTSKEESDKNADSIIDMHNEGAE

SEQ ID NO: 30483 - DNA, 1509 bp, Pseudomonas syringae pv. phaseolicola 1448A
  CDS (1)..(1509): transl_table=11
atgtgtggcatcgtcggtatcgtcggcaagtcgaacgtcaatcaggcgctgtatgacgcgcttaccgtcctccagcaccgcggccaggacgctgccggtatcgtaaccagccacgatggccggttattcctgcgcaaggacaacggattggtgcgtgatgtgtttcatcaacgccatatgcagcgcttggtcgggcatatgggcatcggtcatgtgcgctatccaacggcgggcagctcgacgtctgcagaggcccagccgttctacgtcaactcgccttatggcatcacgttggcgcacaacggcaacctcaccaacgtcgaacaactggccaaggagatttacgaatccgacctgcgccatgtgaacaccaattccgattcggaagtgctgctcaacgttttcgcccatgagctggccgtgcgtggcaagttgcagccgaccgaagaggatatcttcgccgcagtgaccgacgtgcataatcgctgccgtggcggctatgcggtcgtggcaatgatcaccggctacggcattgtcggtttccgtgacccggacgccattcgtcctatcgtgtttggccagcgtcataccgacgaaggcgtcgaatacatgatcgcatcggaaagcgtgtcgctggacgtgctcggctttaccctgattcgcgacctggcaccgggcgaagcggtctacatcactgaagacggcaagctgcatacccgtcagtgtgcggccaaccccaaatatgcaccgtgcatcttcgaacacgtttatctggcacgtcctgactcgatcatcgacggcatttcggtctacaaggcgcgtttgcgcatgggcgagaagctggccgacaagatcctgcgcgagcgtccggatcacgatatcgatgtggtcatcccgattccggacaccagccgtaccgctgcgctggagctggccaatcatctgggcgtcaagttccgcgaaggtttcgtcaagaaccgctacatcggccggaccttcatcatgccgggccaggcagcacgcaagaaatccgtgcgtcagaagctcaacgcaatcgagctggagttccgcggcaagaacgtgatgctggtggatgactccatcgtgcgcggcacgacctgcaaacagatcatccagatggcccgtgaagccggtgccaagaatgtctacttctgttcggcggccccggccgtgcgctaccccaacgtctacggcatcgacatgccgagtgctcacgagctgatcgcccacaaccgttccactcaggacgttgccgaccttatcggtgccgactggctggtttatcaggatctgaatgacctgatcgaagcggtcagcggcagcaagaaaatcaagatcgacaacttcgattgctcggttttcgacggcaagtacgtgaccggtgacatcgacgagcattatctgaacaggatcgagagcgcgcgtaacgacgcctccaagatcaagactcaggccgtgagcgcgatcatcgatctgtacaacaactaa

SEQ ID NO: 30484 - protein, 502 aa, Pseudomonas syringae pv. phaseolicola 1448A
MCGIVGIVGKSNVNQALYDALTVLQHRGQDAAGIVTSHDGRLFLRKDNGLVRDVFHQRHMQRLVGHMGIGHVRYPTAGSSTSAEAQPFYVNSPYGITLAHNGNLTNVEQLAKEIYESDLRHVNTNSDSEVLLNVFAHELAVRGKLQPTEEDIFAAVTDVHNRCRGGYAVVAMITGYGIVGFRDPDAIRPIVFGQRHTDEGVEYMIASESVSLDVLGFTLIRDLAPGEAVYITEDGKLHTRQCAANPKYAPCIFEHVYLARPDSIIDGISVYKARLRMGEKLADKILRERPDHDIDVVIPIPDTSRTAALELANHLGVKFREGFVKNRYIGRTFIMPGQAARKKSVRQKLNAIELEFRGKNVMLVDDSIVRGTTCKQIIQMAREAGAKNVYFCSAAPAVRYPNVYGIDMPSAHELIAHNRSTQDVADLIGADWLVYQDLNDLIEAVSGSKKIKIDNFDCSVFDGKYVTGDIDEHYLNRIESARNDASKIKTQAVSAIIDLYNN

SEQ ID NO: 30485 - DNA, 1512 bp, Streptococcus pyogenes MGAS6180
  CDS (1)..(1512): transl_table=11
ttgtgcgaaaaactttctattttcgctttacttgacagcctttgtatcgaggtaaaaatgacatacgaagtaaaatctctaaatgaagaatgtggagtctttggtatctggggacatcctcaggcagctcaagtcacttactttgggcttcatagccttcaacatcgcggtcaagaaggagctggtattgtttcaaatgacaatgggaaactctatggttatcgaaatgttgggctcctttctgaagtttttaagaatcaatctgaattagataatttaactgggaatgcggctattggacatgttcggtatgctactgcaggttctgcagatattcgcaatattcagccttttctttataaatttcatgacgggcaatttgctttatgccataatggtaatttgacaaatgctatttccttaaggaaagaattagaaaagcaaggtgcaattttcaatgcctcctcagatactgaaattttgatgcacttgattcgtcgaagccataactcaagtttcatgggaaaggtaaaagaagctctaaatacagtaaagggtggctttgcctatctactgatgacagaaaataaactcattgctgctcttgaccctaatgcctttcgtcctttgtcaattggacaaatgcaaaatggtgcctgggttatttccagtgagacctgtgcttttgaggtggtaggcgcaaaatgggttagagatgttgaacctggcgaagttattcttatagacgatcgtggtattcaatgtgatcgttatactgatgaaacgcaactggcaatttgttcgatggaatatgtctattttgcaaggccggattcaactatacatggtgttaatgttcatacggctcgaaaaaatatgggaaagcgtcttgcacaagaatttaaacaggatgctgatattgtaattggtgtcccaaattcgtccttatcggctgctatgggctttgctgaagaatccggattaccaaatgagatgggtcttgtaaaaaatcagtatacgcagcgaacctttattcaaccgacacaagaattaagggaacaaggtgttcgaatgaaactatcagcggtatctggtgttgtcaaaggaaagcgcgttgttatgattgatgactcaattgtaagaggaacgacttctagaaggattgtcggattattaagagaagcaggagctagtgaagtacatgttgctatagctagtccagaattaaagtatccttgtttttatggtattgatattcaaacaagacgagaattaatttcagcaaatcacgctgctgacgaagtgtgtgatattattggcgcagatagtctgacctatctctcactagatgggttgattgaatcaattggactcgaaacaaaagcaccaaatggtggtttatgcgtagcttactttgatggacattatccaacaccgctttatgattatgaagaagaatacctcagaagtttagaagaaaaaacaagtttttatattcaaaaagtgaaataa

SEQ ID NO: 30486 - protein, 503 aa, Streptococcus pyogenes MGAS6180
MCEKLSIFALLDSLCIEVKMTYEVKSLNEECGVFGIWGHPQAAQVTYFGLHSLQHRGQEGAGIVSNDNGKLYGYRNVGLLSEVFKNQSELDNLTGNAAIGHVRYATAGSADIRNIQPFLYKFHDGQFALCHNGNLTNAISLRKELEKQGAIFNASSDTEILMHLIRRSHNSSFMGKVKEALNTVKGGFAYLLMTENKLIAALDPNAFRPLSIGQMQNGAWVISSETCAFEVVGAKWVRDVEPGEVILIDDRGIQCDRYTDETQLAICSMEYVYFARPDSTIHGVNVHTARKNMGKRLAQEFKQDADIVIGVPNSSLSAAMGFAEESGLPNEMGLVKNQYTQRTFIQPTQELREQGVRMKLSAVSGVVKGKRVVMIDDSIVRGTTSRRIVGLLREAGASEVHVAIASPELKYPCFYGIDIQTRRELISANHAADEVCDIIGADSLTYLSLDGLIESIGLETKAPNGGLCVAYFDGHYPTPLYDYEEEYLRSLEEKTSFYIQKVK

SEQ ID NO: 30487 - DNA, 1455 bp, Streptococcus pyogenes MGAS5005
  CDS (1)..(1455): transl_table=11
atgacatacgaagtaaaatctctaaatgaagaatgtggagtctttggtatctggggacatcctcaggcagctcaagtcacttactttgggcttcatagccttcaacatcgcggtcaagaaggagctggtattgtttcaaatgacaatgggaaactctatggttatcgaaatgttgggctcctttctgaagtttttaagaatcaatctgaattagataatttaactgggaatgcggctattggacatgttcggtatgctactgcaggttctgcagatattcgcaatattcagccttttctttataaatttcatgacgggcaatttgctttatgccataatggtaatttgacaaatgctatttccttaaggaaagaattagaaaagcaaggtgcaattttcaatgcctcctcagatactgaaattttgatgcacttgattcgtcgaagccataactcaagtttcatgggaaaggtaaaagaagctctaaatacagtaaagggtggctttgcctatctactgatgacagaaaataaactcattgctgctcttgaccctaatgcctttcgtcctttgtcaattggacaaatgcaaaatggtgcctgggttatttccagtgagacctgtgcttttgaggtggtaggcgcaaaatgggttagagatgttgaacctggcgaagttattcttatagacgatcgtggtattcaatgtgatcgttatactgatgaaacgcaactggcaatttgttcgatggaatatgtctattttgcaaggccggattcaactatacatggtgttaatgttcatacggctcgaaaaaatatgggaaagcgtcttgcacaagaatttaaacaggatgctgatattgtaattggtgtcccaaattcgtccttatcggctgctatgggctttgctgaagaatccggattaccaaatgagatgggtcttgtaaaaaatcagtatacgcagcgaacctttattcaaccgacacaagaattaagggaacaaggtgttcgaatgaaactatcagcggtatccggtgttgtcaaaggaaagcgcgttgttatgattgatgactcaattgtaagaggaacgacttctagaaggattgtcggattattaagagaagcaggagctagtgaagtacatgttgctatagctagtccagaattaaagtatccttgtttttatggtattgatattcagactcgtcgtgagttgatttcagccaatcactctgttgatgaagtgtgtgatattattggcgcagatagtctgacctatctctcactggatgggttgattgaatcaattggactcgaaacaaaagcaccaaatggtggtttatgcgtagcttactttgatgggcattatccaacaccgctttatgattatgaagaagaatacctcagaagtttagaagagaaaacaagtttttatattcaaaaagtgaaataa

SEQ ID NO: 30488 - protein, 484 aa, Streptococcus pyogenes MGAS5005
MTYEVKSLNEECGVFGIWGHPQAAQVTYFGLHSLQHRGQEGAGIVSNDNGKLYGYRNVGLLSEVFKNQSELDNLTGNAAIGHVRYATAGSADIRNIQPFLYKFHDGQFALCHNGNLTNAISLRKELEKQGAIFNASSDTEILMHLIRRSHNSSFMGKVKEALNTVKGGFAYLLMTENKLIAALDPNAFRPLSIGQMQNGAWVISSETCAFEVVGAKWVRDVEPGEVILIDDRGIQCDRYTDETQLAICSMEYVYFARPDSTIHGVNVHTARKNMGKRLAQEFKQDADIVIGVPNSSLSAAMGFAEESGLPNEMGLVKNQYTQRTFIQPTQELREQGVRMKLSAVSGVVKGKRVVMIDDSIVRGTTSRRIVGLLREAGASEVHVAIASPELKYPCFYGIDIQTRRELISANHSVDEVCDIIGADSLTYLSLDGLIESIGLETKAPNGGLCVAYFDGHYPTPLYDYEEEYLRSLEEKTSFYIQKVK

SEQ ID NO: 30489 - DNA, 1518 bp, Dechloromonas aromatica RCB
  CDS (1)..(1518): transl_table=11
atggcgacaacgccggtcaatcagctgctttacgatggtctgatggtgcttcagcatcgtggccaggatgcggccggcatcgcgacggcggaaggtaacaccttccacctgcacaaggggcctggtctggtgcgtgacgttttccgcactcgcaacatgcgtgccctgccgggcaactgcggcatcggtcatgttcgttatccgaccgctggctcggcctacaatttcgccgagtcacaacccttctacgttaattcaccgtttggcctggtgcttggccataacggcaacctgaccaatgccgagcaactcaagggcgagatgttccgcctcgatcgccggcacatcaataccaattccgactccgaagtgctgctcaatgtgctggcccatgagctgcagtcatcggcgcatggttatgagcttgatgttgatgccatcttccaggctgtgggcggcgtgcatcgccgctgccgtggcgcttacgccgtcgtggtgctgattgccggttatggcctgcttgctttccgtgacccgcacggcattcgcccgctgatctacggtcagaacgaaacaccggaaggcatggaatacctcgtctcttccgagtccgtggcgctcgatacactcggtttcaagatggtgcgcgacatcgagccgggcgaagccattttcatcgacttcaatcatcagttgcatagccgtcagtgcgcgcagcagccgatgtacgccccgtgtatcttcgagtacgtctatctggctcggccggataccgtgatcgacggcgtttcggtctatgaagcccgcctggcgatgggcgaactgttggccgagaaggtcaagaagcatatcccgatcgaggaaatcgacgtcgtcattccgattcccgactccagtcgcccgtcggccatgcaactggcgcaggtgctcaacattccgttccgcgagggcttcgtcaagaatcgctatgtcggtcgtaccttcatcatgccggggcaggccatgcgcaagaagtcggtgcgccagaaactgaacaccgtcggccaggagttcaagggcaagcgggtgctgctggtcgatgactccatcgtccgcggcacgaccagccacgaaattgtcgaaatggcccgtgcggcaggtgccgtcaaggtctatttcgcttcggcggcgccaccggtgcgcttcccgaacgtttatggcatcgatatgccgacccgctccgaactgattgccaccgggcggaccgatgcccagatcgctgccgaaattggcgccgatgccctggtttatcaggatcttgaagcgctgaagcagtccatcaccaacctgcgggccgacctgaccgtattcgatgcttcctgcttcgacggctgctacatcaccggcgacattgatgactactacctcgatgcagtcgagggcaagcgtggcggcaagccggtcaagaacgatgatgacggcgacggtcgctcttcgcagcagatggtgctgggcctggcgaatggtgggcaggagtaa

SEQ ID NO: 30490 - protein, 505 aa, Dechloromonas aromatica RCB
MATTPVNQLLYDGLMVLQHRGQDAAGIATAEGNTFHLHKGPGLVRDVFRTRNMRALPGNCGIGHVRYPTAGSAYNFAESQPFYVNSPFGLVLGHNGNLTNAEQLKGEMFRLDRRHINTNSDSEVLLNVLAHELQSSAHGYELDVDAIFQAVGGVHRRCRGAYAVVVLIAGYGLLAFRDPHGIRPLIYGQNETPEGMEYLVSSESVALDTLGFKMVRDIEPGEAIFIDFNHQLHSRQCAQQPMYAPCIFEYVYLARPDTVIDGVSVYEARLAMGELLAEKVKKHIPIEEIDVVIPIPDSSRPSAMQLAQVLNIPFREGFVKNRYVGRTFIMPGQAMRKKSVRQKLNTVGQEFKGKRVLLVDDSIVRGTTSHEIVEMARAAGAVKVYFASAAPPVRFPNVYGIDMPTRSELIATGRTDAQIAAEIGADALVYQDLEALKQSITNLRADLTVFDASCFDGCYITGDIDDYYLDAVEGKRGGKPVKNDDDGDGRSSQQMVLGLANGGQE

SEQ ID NO: 30491 - DNA, 1455 bp, Thermobifida fusca YX
  CDS (1)..(1455): transl_table=11
gtgtcgcaacccgacggccgcctcagcctggacatcgatcctttagaacgcggaccgcaggacgcctgcggagtgttcggggtctgggctcccggcgaagaagtaagcaaactgacctacttcggtctctacgcgctccagcaccgcggccaagagtccgcgggcatcgccctcagcaacggtgagcggatcgtcgtctacaaagacatggggctcgtgtcccaggtcttcaacgaagtcaccctggactccctcaaagggcacctggcgatcggccactgccgctactccactaccggctcatccgtctgggagaacgcgcaacccacgttcttcagcgcgcgggagggcggtctcgcgctcggccacaacggcaacctgatcaacaccccggagctcgcggcgctgctgccgtcggatcgcctgagcgcgaccacggacaccgaggtgctcacccgtctgctcgccgccgccccgcaccgcaccaccgaggaagccgccctcgacgtgctgcccaaagtcaagggcgcattctccctggtcttcatggacgagcacaccctgtacgcggctcgcgacccccagggaatccgcccgctggtcctgggccgcctcgacaccgggtgggtcgtggccagcgagaccgcggcgctcgacatcgttggtgcttccgtggtgcgcgaggtcgaaccgggagagctgctggtcatcaacgcggacggcgtcgcttcccggcgtttcgccccggccgagcccaaaggctgcctgttcgaatacgtctacctggcccgtcccgacaccacgatcgcgggacgcaacgtcaacagcgcccgcgtcgaagtggggcggcggctggcccggcagcacccggccgatgcagacgtggtcatccccgtccccgaatcgggcacgcccgcggccgtgggctacgccgaaagcagcggcatcccgttcgcccaagggctggtgaagaactcctatgtgggccgcacgttcatccagccgagccagacgctgcgccagcgcggcatccggctcaagctgaacccgctgcgcgaagtcatcgaaggcaagcggctggtcgtcgtcgacgactcgatcgtgcggggcaacacccagcgggccctggtgcggatgctgcgcgaggcgggcgctgccgaggtccacgtccggatctccagcccgcccgtgatgtggccctgctactacggcatcgacttcgccaccaaagccgaactgatcgcgggtagcctctccgtcgaagagatctgccaatccatcggcgcagactcgctcggcttcatcgatctcgatgaactggtcgcagccaccagagtcgagaagaaccggctgtgccgggcctgcttcgacggcgtctacccggtcgaggtcgacgaggactcccgcggcaagtacctgttggagaagtcctgcggcgcccctaagcgcccctag

SEQ ID NO: 30492 - protein, 484 aa, Thermobifida fusca YX
MSQPDGRLSLDIDPLERGPQDACGVFGVWAPGEEVSKLTYFGLYALQHRGQESAGIALSNGERIVVYKDMGLVSQVFNEVTLDSLKGHLAIGHCRYSTTGSSVWENAQPTFFSAREGGLALGHNGNLINTPELAALLPSDRLSATTDTEVLTRLLAAAPHRTTEEAALDVLPKVKGAFSLVFMDEHTLYAARDPQGIRPLVLGRLDTGWVVASETAALDIVGASVVREVEPGELLVINADGVASRRFAPAEPKGCLFEYVYLARPDTTIAGRNVNSARVEVGRRLARQHPADADVVIPVPESGTPAAVGYAESSGIPFAQGLVKNSYVGRTFIQPSQTLRQRGIRLKLNPLREVIEGKRLVVVDDSIVRGNTQRALVRMLREAGAAEVHVRISSPPVMWPCYYGIDFATKAELIAGSLSVEEICQSIGADSLGFIDLDELVAATRVEKNRLCRACFDGVYPVEVDEDSRGKYLLEKSCGAPKRP

SEQ ID NO: 30493 - DNA, 1527 bp, Ralstonia eutropha JMP134
  CDS (1)..(1527): transl_table=11
atgtgcggtatcgtcggcgcggtctctacctcgcccgtcaaccaattgatttacgacagcctgctgttgttgcaacaccgcggacaggatgctgccggcatcgccaccgccaacggcagtactttccacatgcacaaggccaacggcctcgtgcgcgacgtgttccggacccgcaatatgcgcggcctgccgggcaccgccggcatcggtcaggtgcgttacccgaccgcgggctccgcctccagcgaagaagaggcacagccgttctacgtcaatgcgccgtacggcatcatcctggcccacaacggcaacctgaccaactggcagcaactgcgcgaggaaatgttccgccgcgaccgccgccacatcaatacgcactcggataccgaggtgctgctcaatgtgctcgctgacgaactgcagcgcgcgagccagggcatggcgctggatccggaaacgatcttcaaggccgtttccggcatgcaccgccgcgtgaagggctcgtacgccattgccgcgcagatcgccggttacggcatgcttgccgtgcgcgatccgttcggcatccgcccgctgagtcttggcagcgtggacacgcccaccggcaaggaatggatggtggcgtcggagtcggtggcgctggaaggcatcggctatcgcatggagcgcgacgtggcgcccggcgaggccatcttcatcgacctcgacggcaagctgtacagcaagcagtgcgcggacaaccccgtgctgacgccgtgcatcttcgagtacgtctacctggcccgtccggattcgtgcatcgatggcgtgcccgtctatgacgcccgcctgcgcatgggcgactacctggccgaaaagatccgccaggaagtgtcggccggcgacatcgacgtggtcatgccgattcccgattccagccgcccggccgccatgcaggtagccaaccggctgggcgtgggctatcgcgaaggtttcttcaagaaccgctacgtgggccgcaccttcatcatgccgggccaggcggtgcgcaagaagtcggtgcgccagaagctcaacgcgatggccgtcgagttcaagggcaagaacgtgctgatcgtcgatgactcgatcgtgcgcggcaccacgtcgttcgagatcgtgcagatggcgcgcgacgccggcgccaacaaggtcatcttcgcctcggccgcgccgccggtgaagtacccgaacgtgtacggcattgacatgccgacgcgcagcgagttggtggcccatggccgcacgcacgaagagatcgccaagatcatcggcgccgacaagctggtgtaccaggacgtggaagcgatgaagcaggctgtacgcgacatcaaccccgcgttgaacgacttcgacgcgtcgtgcttcgatggccgctacgttaccggcgacatcgacgaggcctacctggatcgcctggaaacggcgcgcagcttggctgatcgcgaaggcaccggagacatggagcgctcgcaactgcacctgcagcgttcgggcggcaacgagtaa

SEQ ID NO: 30494 - protein, 508 aa, Ralstonia eutropha JMP134
MCGIVGAVSTSPVNQLIYDSLLLLQHRGQDAAGIATANGSTFHMHKANGLVRDVFRTRNMRGLPGTAGIGQVRYPTAGSASSEEEAQPFYVNAPYGIILAHNGNLTNWQQLREEMFRRDRRHINTHSDTEVLLNVLADELQRASQGMALDPETIFKAVSGMHRRVKGSYAIAAQIAGYGMLAVRDPFGIRPLSLGSVDTPTGKEWMVASESVALEGIGYRMERDVAPGEAIFIDLDGKLYSKQCADNPVLTPCIFEYVYLARPDSCIDGVPVYDARLRMGDYLAEKIRQEVSAGDIDVVMPIPDSSRPAAMQVANRLGVGYREGFFKNRYVGRTFIMPGQAVRKKSVRQKLNAMAVEFKGKNVLIVDDSIVRGTTSFEIVQMARDAGANKVIFASAAPPVKYPNVYGIDMPTRSELVAHGRTHEEIAKIIGADKLVYQDVEAMKQAVRDINPALNDFDASCFDGRYVTGDIDEAYLDRLETARSLADREGTGDMERSQLHLQRSGGNE

SEQ ID NO: 30495 - DNA, 1488 bp, Staphylococcus saprophyticus subsp. saprophyticus ATCC 15305
  CDS (1)..(1488): transl_table=11
atgtatgacagcaacggattaaatgaagaatgtggcgtgtttggcatatggaatcatccggaatctgctcaattaacctatatgggactacacagtttgcaacatcgtggtcaagaaggtgctggaatcgtttgttcaaatggtgaagtgcttaaaggtgaacgtggtttaggtttattgacagatgcgatatcagatacacaaatggaatcatttaaaacatatcaacatgcaattgggcatgtgagatacgcaacatccgggaataaaggtatagagaatattcaaccgtttttatatcatttttatgatatgagtgttgcagtttgtcataatggtaatcttatcaatgcgcaaagtctaaaaaaatctttagaacatcaaggctctatttttcactcttcttcagatactgaagttatcatgcacttgatacgcagaagtaaagcacctacatttgaagatgcttttcaagaaagtttaagaaaaataaaaggcggatttacttttgcggtactaactaaagacgctttatatggtgcagttgaccctaatgcgattcgaccattagctgttggtaaaatgaaaaatggttcatatattattgccagtgaaacatgtgcaatcgatgtcctaggtgctgaatttgtaagagatattcatgctggagaatatgtagtcatcaatgatgatgggatcagagtcgaatcttatacgcgtcatacaacgacggctatttcagctatggagtatatttactttgctagacctgattcaaccattgccggtaaaaatgttcatgctgttagaaaacagtctggtaagcaattagcgaaagaaagtccagcatcaaatgcggacatggttattggtgtacctaattcttcactttcagcagcatctggttatgccgaagagagtagactgccgtatgaaatgggtcttgttaaaaatcaatatgttgcaagaacatttattcaaccgacacaagaattacgtgaacaaggcgtccgcgtaaaattatctgctgtaaaagatattgtctatgataaaaatattgtcttagtagatgattcgattgtcagaggtactacgagtaaacgtatagtacaaatgttgaaagacgcaggcgctaaggaagttcatgtacgcattgcttctcctgagtttatgtttccaagtttttatggcatagatgtttcaacaacggcagagcttatttcatcaaataaatcgcccgaggagattagtgattatattggagcagattcactggcttatttaacagtcgaaggtctaattgattctattggacttgattgcgatgcgccttatagtggactttgtgttgaaagtttcacaggtgattatcctgcaggtttatatgattatgagcaagattatgtagcgcatttaagtgaacgtcaaaaagcgtacttagcaaatcatcaacaatactttgatagagagggtaatttaaatgtctaa

SEQ ID NO: 30496 - protein, 495 aa, Staphylococcus saprophyticus subsp. saprophyticus ATCC 15305
MYDSNGLNEECGVFGIWNHPESAQLTYMGLHSLQHRGQEGAGIVCSNGEVLKGERGLGLLTDAISDTQMESFKTYQHAIGHVRYATSGNKGIENIQPFLYHFYDMSVAVCHNGNLINAQSLKKSLEHQGSIFHSSSDTEVIMHLIRRSKAPTFEDAFQESLRKIKGGFTFAVLTKDALYGAVDPNAIRPLAVGKMKNGSYIIASETCAIDVLGAEFVRDIHAGEYVVINDDGIRVESYTRHTTTAISAMEYIYFARPDSTIAGKNVHAVRKQSGKQLAKESPASNADMVIGVPNSSLSAASGYAEESRLPYEMGLVKNQYVARTFIQPTQELREQGVRVKLSAVKDIVYDKNIVLVDDSIVRGTTSKRIVQMLKDAGAKEVHVRIASPEFMFPSFYGIDVSTTAELISSNKSPEEISDYIGADSLAYLTVEGLIDSIGLDCDAPYSGLCVESFTGDYPAGLYDYEQDYVAHLSERQKAYLANHQQYFDREGNLNV

SEQ ID NO: 30497 - DNA, 1389 bp, Ehrlichia canis str. Jake
  CDS (1)..(1389): transl_table=11
atgcagtttaaagaagtatatgaagaatgtggtatattcgccatacaaaacaacagacgtgctgcagtgaactgtatcttaggactacatgcacttcaacacagaggtcaagaatcatttggcatagtaacgtcagaagataacaagctttattgtcactattccaatgaacaagttaatagcatgtttaatcagcaacccaaaataaatttactactagggaaatctgcgattggacatgtacgttattctacaagtggtagtaaaattggtgtgcaaccaataactttagattgtaaattcgggaaattggcaatagcacataatggtaatcttaccaacgcaacacaaataagaaactcattaactgaaaaaggatgcatattttcatccgacatagatacagaagtaatcgcacatttaatcgctattaatacacaggctactctgttaaataacatcacaaatgcactaaaaactatcaatggtgcatactcactagtaattcttgtaaatggtaccataatatgctgccgtgacccagctggtattagacctctagtattaggcatattagataattcatacattgtagcttcagaaacttgttctctagacatagttggagcacaatttgtaagagagatatcaccaggagaactgattataattgatcaaaataatactctaacaagttcttttccatttaaaaaacaaaaatcaagtttttgcattttcgaatatgtatattttgcacgaccagacagtataataaacaataaatctgtatatgaaatacgtaaaaacataggaaaagaactcgcaatagaaaatcctgtaccaaaagatacacatatggtagtaccagtaccagactctggagtaccagctgcattaggattctcagaatatacaaaaataccttttgaatttggaattattagaaatcattacgtaggaagaacttttatccagcctagcaactacgttcgtaatatgggagtaaaacttaaacataacgctaatgcttctattttgaaagacaaaataataatcctaatagatgacagtcttgttagaggtacaacattaaaaaacatcataacattactacacaaagcgcaagttaaagaaatacatctcaggatttctagcccaccaactataaactcttgcttttacggaatagatacaccagaagagtcaaagttaatagcaaataagttatcaactacagaaatcaaaaatgaacttggctgtgatagtatatattttctaagtataaatggcctttacaaagcaatcaataacacaactaggaataatagttctcctcaatactgtgatgcttgtttcactggagattatcctataggaaaaattgagtaa

SEQ ID NO: 30498 - protein, 462 aa, Ehrlichia canis str. Jake
MQFKEVYEECGIFAIQNNRRAAVNCILGLHALQHRGQESFGIVTSEDNKLYCHYSNEQVNSMFNQQPKINLLLGKSAIGHVRYSTSGSKIGVQPITLDCKFGKLAIAHNGNLTNATQIRNSLTEKGCIFSSDIDTEVIAHLIAINTQATLLNNITNALKTINGAYSLVILVNGTIICCRDPAGIRPLVLGILDNSYIVASETCSLDIVGAQFVREISPGELIIIDQNNTLTSSFPFKKQKSSFCIFEYVYFARPDSIINNKSVYEIRKNIGKELAIENPVPKDTHMVVPVPDSGVPAALGFSEYTKIPFEFGIIRNHYVGRTFIQPSNYVRNMGVKLKHNANASILKDKIIILIDDSLVRGTTLKNIITLLHKAQVKEIHLRISSPPTINSCFYGIDTPEESKLIANKLSTTEIKNELGCDSIYFLSINGLYKAINNTTRNNSSPQYCDACFTGDYPIGKIE

SEQ ID NO: 30499 - DNA, 1434 bp, Methanosarcina barkeri str. fusaro
  CDS (1)..(1434): transl_table=11
ttgaaagaagaatgtggcgttgcaggcataattctaccaggcgataggccgcaatccaatactgtcgcattcaagctgtattacgccttgtatgccctccagcatagaggacaggaatccactggcataatggtatatgatggtacatcctctcattccattaaaggcatgggtctcgtccctgatgtgtataacaaagattctcttgggcacctggttggaaatgtaggagtagggcatgtccgctactcaaccaccggaggatcaaaaatcgaaaattgccagccctttgttctgaaattcaaaggaggagcagttgcaattgcccataacgggaacctggttaatgccagaacgctcaaggatgaactggagtgtgaaggccgtatctttatcagtgagtccgatacagaagttattggccaccttcttgtaaaagaactgataagacacgaccctatagaatcaatccggaatgtcatgcgtaagcttgtcggttcctattccctggttatccatatcggcggtgttctgtatgctgtgcgtgaccctctcggtcttaagccgctctgctttggggaagtcgatggtggatatgcagtattctcggaaagcgtagcccttgatacccttaacggcacccttatcagggatgtacggccaggtgaggtaatagtttttacaggcgacagctttgagagctaccagataggaaacgagcctcatcccgcacattgtgtgtttgagttcatttattttgcaagacccgattctattattgacggaaaactggtctacaaagttcgggaaaatatcgggagagagcttgccagagaacatccggtagaggctgatgttgtttcacctgtcccggactctgggattacttccgcaatcggctacgccagggagtcaggcaccaaataccttgaaggcttgatgaagaaccgttatatagggcgtacatttatcctgcctggccaagagctgcgtgaaaccgcagttcggcttaaaatgaatgctatccaggataatgttaaagacaaacgtgttgttctggttgacgacagtattgtccgtggtacaacctccaggcggattatagatatggtccgcagggcaggtgcttcagaaatccatgcaaggataggaagtccagcaattattgctccctgttatctgggtatagatatggccaccaggcaagaacttatcgcctcttataagaccgtaaaagaggttgaaggccttattaatgcggattcactcggatatctaagtattgacggacttatgagggctcttgggcgcgataagtgcgacatgtgccttggctgccttacaggtgagtatcctgtcgaaattcctggagaaaactgcataaggaagcagacacgtctggatgattttaacaataaccaggaaagttcctga

SEQ ID NO: 30500 - protein, 477 aa, Methanosarcina barkeri str. fusaro
MKEECGVAGIILPGDRPQSNTVAFKLYYALYALQHRGQESTGIMVYDGTSSHSIKGMGLVPDVYNKDSLGHLVGNVGVGHVRYSTTGGSKIENCQPFVLKFKGGAVAIAHNGNLVNARTLKDELECEGRIFISESDTEVIGHLLVKELIRHDPIESIRNVMRKLVGSYSLVIHIGGVLYAVRDPLGLKPLCFGEVDGGYAVFSESVALDTLNGTLIRDVRPGEVIVFTGDSFESYQIGNEPHPAHCVFEFIYFARPDSIIDGKLVYKVRENIGRELAREHPVEADVVSPVPDSGITSAIGYARESGTKYLEGLMKNRYIGRTFILPGQELRETAVRLKMNAIQDNVKDKRVVLVDDSIVRGTTSRRIIDMVRRAGASEIHARIGSPAIIAPCYLGIDMATRQELIASYKTVKEVEGLINADSLGYLSIDGLMRALGRDKCDMCLGCLTGEYPVEIPGENCIRKQTRLDDFNNNQESS

SEQ ID NO: 30501 - DNA, 1419 bp, Dehalococcoides sp. CBDB1
  CDS (1)..(1419): transl_table=11
ttgcatgaatcttgcggcgttttcggtgtatttgcccccggtcaggatgtagcccgactcacatttttcgctctgtttgccttgcagcacagagggcaggaaagttcaggcatatctacatctgatggacaggagcttaagcttcattcccagatgggtctggtttcccatattttcactgaagatatacttaaaaaactggacggccatattgccataggccacaaccgctattccaccaccggttcaagccagcagattaacgcccagccctttgtaatggggcagggagataatgttatagccatagcccataatggcaacatcgtaaattccgaagctttgaatacagaacttacctctcagggatacacctttaagacatccactgataccgaaataatcagccagcttatcctttcatctattgaaactgactgggtcaaacggatacgttatgccatgaaccgcctgaaaggggctttttcctgcacccttatgaccaaagacaccctatttgccatgcgtgactcactgggtgtccgtcccctgtgcttgggtaaaattcagggcggttatgtagtcacttctgaaagctgtgctcttgaccatatcggagctgatttcgtgcgtgaaatagagccgggcgagattgtagctataaacggaaacggcataaccagttttaaacagcaaagctccagacgggctttgtgtatatttgagttcatttattttgcccgccccgatagcctgatagacgggcgtcttttgtattccgcccgccaagccatgggggtagaactggccaaagaatacccggtagatgcagacctggttataggcgtacctgactctgccacggctgccggtatcggctatgccgtaggttcaggcattcctccagccgaaggccttattaaaaaccgctacatggggcgaacctttattcagcctgaccagcgtctgcgtgatttgggcgtgaaactaaagttcaatccccttaagagcgttctggaagataagcgggtagtactggtagatgacagcatagtccggggaactaccaccccacaggttatccgcctgttacgtaaagccggcgccaaagaagtccatatgcgggtatgcgcaccccccataaccaacccatgtttcttcggggtagatatggccacccgttcagaacttattgccgccagaatgagcatacctgagatacaaaaatacataggtgcagattcacttggctatcttagcctgcccgggttgataaatgccgtggggctgcctgagaagaatttctgtctggcctgtttcaccggcgaatatgccctgccagttcaactggaaatggataaatttgcacttggcaatcaacgacacaactgttgccagatgccttcacccgaaagctag

SEQ ID NO: 30502 - protein, 472 aa, Dehalococcoides sp. CBDB1
MHESCGVFGVFAPGQDVARLTFFALFALQHRGQESSGISTSDGQELKLHSQMGLVSHIFTEDILKKLDGHIAIGHNRYSTTGSSQQINAQPFVMGQGDNVIAIAHNGNIVNSEALNTELTSQGYTFKTSTDTEIISQLILSSIETDWVKRIRYAMNRLKGAFSCTLMTKDTLFAMRDSLGVRPLCLGKIQGGYVVTSESCALDHIGADFVREIEPGEIVAINGNGITSFKQQSSRRALCIFEFIYFARPDSLIDGRLLYSARQAMGVELAKEYPVDADLVIGVPDSATAAGIGYAVGSGIPPAEGLIKNRYMGRTFIQPDQRLRDLGVKLKFNPLKSVLEDKRVVLVDDSIVRGTTTPQVIRLLRKAGAKEVHMRVCAPPITNPCFFGVDMATRSELIAARMSIPEIQKYIGADSLGYLSLPGLINAVGLPEKNFCLACFTGEYALPVQLEMDKFALGNQRHNCCQMPSPES

SEQ ID NO: 30503 - DNA, 1521 bp, Thiobacillus denitrificans ATCC 25259
  CDS (1)..(1521): transl_table=11
atgtgcggggtaatcggagtcgtcgccaacacggcggtcaatcagcttttgtacgacgggctgatggtgttgcagcatcgcggacaggatgctgcgggcatcgtgaccgccgaggaaaaccgttttcacatgcacaaggcgcccgggctcgcgcgcgacgtcttccgcacacgcgacatgcgcaacctgctcggcgacatgggcgtcgcacacgtgcgctatcccaccgcgggcagtgcgtcgtcgtcggccgaatcgcagccgttctacgtgaactcgccctacggcatcgtgctcgggcacaacggcaacctgacgaacacgcatgaactgaaggaatcgttgttccgcagcgatctgcgccacgtcaacaccaactccgactccgaggtcctgctcaatgtactggcgcacgagctccacgtccgcgcgtccgggcagcagctgagcctcgatacgatcttcggcgcggtcgccggcgtccacgcgcgctgcaagggcgcctacgccgtgaccgcgttcatcgccggctacggcctgctggccttccgcgatccgcacggcatccgcccgctggtgatcggcatcaacgaccaggtcacgccgcacgagtacatcgtcgcgtccgagagcgtcgcgatcgatacgctcggcttccgcctgctgcgcgacgtcgcgcccggcgaggccgtgttcatcgactacgagcgtcggctgcacagccgccagtgcagcgacaaccccgtgctcaacccctgcattttcgaatacgtctatctggcccgcccggattcggtcatggacggaatctcggtctacagcacgcgcctcgcgatgggcgtgtcgctcgcggaaaaaatccgccgcgaattcggccacctgcagatcgacgtcgtgatcccgatccccgacaccagccgcccgtcggcgcttcaattggcgaaccatctcgcggtgccgtaccgtgagggcttcatcaagaaccgctacatcggccgcactttcatcatgccggggcaggcgctgcgcaagaagtcggtgcggcagaagctcaacgcgatcgccgaggagttcaagggcaagaacgtcctgctcgtcgacgattcgatcgtccgcggcacgacgagccgggagattgtccagatggcgcgcgacgcgggtgcggagaaggtctatttcgcgtccgcctcgccgcctgtgcgcttctgtaacgtctacggcatcgacatgccgtcgcgccgcgaactcattgccaacggccgcaatgacgaggaaatcgcgcgtgagatcggctgcgacgcgctgatctatcaggatctcgacgcgatggtcgaggtggtgcgcgccgccaacccggcgatccgcgagttcgacacctcgtgcttcaacggctgctacatcaccggcgacatcacgcccgagtacctcgactacgtcgaggccgcgcgcgacggcgaaagcccgccgccgtcggcgctgtcgacccagcagctcgacctcaacctcgcgacgggcagttga

SEQ ID NO: 30504 - protein, 506 aa, Thiobacillus denitrificans ATCC 25259
MCGVIGVVANTAVNQLLYDGLMVLQHRGQDAAGIVTAEENRFHMHKAPGLARDVFRTRDMRNLLGDMGVAHVRYPTAGSASSSAESQPFYVNSPYGIVLGHNGNLTNTHELKESLFRSDLRHVNTNSDSEVLLNVLAHELHVRASGQQLSLDTIFGAVAGVHARCKGAYAVTAFIAGYGLLAFRDPHGIRPLVIGINDQVTPHEYIVASESVAIDTLGFRLLRDVAPGEAVFIDYERRLHSRQCSDNPVLNPCIFEYVYLARPDSVMDGISVYSTRLAMGVSLAEKIRREFGHLQIDVVIPIPDTSRPSALQLANHLAVPYREGFIKNRYIGRTFIMPGQALRKKSVRQKLNAIAEEFKGKNVLLVDDSIVRGTTSREIVQMARDAGAEKVYFASASPPVRFCNVYGIDMPSRRELIANGRNDEEIAREIGCDALIYQDLDAMVEVVRAANPAIREFDTSCFNGCYITGDITPEYLDYVEAARDGESPPPSALSTQQLDLNLATGS

SEQ ID NO: 30505 - DNA, 1518 bp, Haemophilus influenzae R2866
  CDS (1)..(1518)
atgtgtggtattgtcggtattgttagccaaagtccggttaatgaatctatttatgcagcattaacccttttgcaacatcgtggacaagatgcggcaggtattgtaacggttgatgatgaaaaccgttttcgcttacgtaaagctaatggtttagtcagtgatgtgttccgtcaagaacatatgctacgattgcaaggaaatgctggattggggcatgttcgctatcctacagcggggagttctagcgtctcagaggcacagcctttttatgtgaattctccctatggtgtcactttagtgcataacggcaacttaaccaactcagtggagttaaaagaaaaggtctttaaaactgctcgccgccatgtaaacactaattcagattccgaacttcttcttaatattctcgccaatcacctcgatcacattcctcaagatcacctcgatccacaagatattttctatgctgttcgtaaaactcacaaggatgttcgcggtgcttatgcttgtttagcgatgattattgggcatggcatggttgcgtttcgtgatccttttggcattcgtcctttggtgttgggtaaacgcgaagaaaatggcaaaaccgattatatgtttgcctctgaaacagtggccttagatattgttggtttcgagtttgtgcgtgatattgctgcaggcgaagccgtttatgtgacgtttgatggcgagctttattcacaacaatgtgctgaaagtgcggtgttaaatccttgtatttttgagtatgtttattttgcacgcccagattcaacgattgatggcgtctctgtttatgctgcgcgtgttcacatgggcgaaaaactcggacaaaaaattgcaaaagaatgggctgatgaaattgataatattgatgtggtcattcccgttcctgaaacctccacagatattgcgttacaaatagctcgtgtactagggaagccttatcgccaaggatttgtgaaaaatcgctatgttggtcgtacctttattatgccaggtcaagcacagcgtattagttctgttcgtcgcaaattgaataccattaaagctgaatttaaagataaaaacgtgttattggtggacgattctatcgttcgtggcacaacctctgagcaaattgttgaaatggctcgctcagctggtgcgaagaaaatttactttgcctctgctgctcctgaaattcgttatccgaatgtatatggtattgatatgccgagttgtgatgaactgatcgcttatgggcgaaatgttgatgaaattgcacatttgatcggcgtagataaattaattttccaagatctgaccgcacttactgaatctgttcaattggaaaatccagccattcaaggttttgattgttcagtattcacaggcgaatatattacaggcgatattagtcctgaatatcttgataaaatcgcacttcaacgcaacgatagtgcaaagaaaaaacgtgaaaaacaagcatccaatcttgaaatttataatgaacaataa

SEQ ID NO: 30506 - protein, 505 aa, Haemophilus influenzae R2866
MCGIVGIVSQSPVNESIYAALTLLQHRGQDAAGIVTVDDENRFRLRKANGLVSDVFRQEHMLRLQGNAGLGHVRYPTAGSSSVSEAQPFYVNSPYGVTLVHNGNLTNSVELKEKVFKTARRHVNTNSDSELLLNILANHLDHIPQDHLDPQDIFYAVRKTHKDVRGAYACLAMIIGHGMVAFRDPFGIRPLVLGKREENGKTDYMFASETVALDIVGFEFVRDIAAGEAVYVTFDGELYSQQCAESAVLNPCIFEYVYFARPDSTIDGVSVYAARVHMGEKLGQKIAKEWADEIDNIDVVIPVPETSTDIALQIARVLGKPYRQGFVKNRYVGRTFIMPGQAQRISSVRRKLNTIKAEFKDKNVLLVDDSIVRGTTSEQIVEMARSAGAKKIYFASAAPEIRYPNVYGIDMPSCDELIAYGRNVDEIAHLIGVDKLIFQDLTALTESVQLENPAIQGFDCSVFTGEYITGDISPEYLDKIALQRNDSAKKKREKQASNLEIYNEQ

SEQ ID NO: 30507 - DNA, 1515 bp, Microbulbifer degradans 2-40
  CDS (1)..(1515)
atgtgcggaatagtgggtatagttggtaagagcgatgtgaacgtagcgctgtacgacgcgttaacgatgctacaacatcgtggccaggatgccgcaggaattatgacttgccataacggcaaattggctcaacaaaaggctgttggcttagtaaaagacgtgtttcgtacgcgtcatatgcagcgcctagtgggcaacatgggtattgggcatgtgcgctatccaacggcaggcagctctggcccagctttggcgcagccgttttacgttaactcaccatacggaattgccttggcgcataacggtaaccttactaataccgagaaagttagcgaagacttgtttaaagaagatctacgtcatgtaaacacagagtccgattctgaagttttacttaacgtttttgctcacgaattgcagcttcaaggtaaattgcgacctgcaccagaagatatctttaatgccgttgccagagtgcataagcgcattcgcggtggctatgcggttgtatctatgattgcaagctacggcgtcgtagctttccgcgacccccacggtattcgtccgctggtattcggtgagcgtattaccgataaaggcaccgagtatatgatcgcctcagagagtgtttcgctggatgtgctgggctttcgcttaatccgcgatgttgcaccgggcgaggccatttttgtaacggttgatggcgaactgcatacacgtcaatgcgccgaaaaccccagtttgcgcccgtgtatattcgaacacgtgtactttgctcgtccagattccattatggatggcgtatctgtatataagtctcgcttgcgtcagggtgagaaactagcagagaaaattttgcgtgaaacgcctaatcacgacatagatgtggttattcctatcccagatagcagccgtgttgctgggcaagcattagctcaaaatttaggcgttaagttccgtgaaggcttggttaaaaaccgctatattggtcgtacttttattatgccgggccagcagcagcgtaagaaatcagtgcgtcaaaagttgaacgtaattgatttggagttccgcggtaaaaatgtactgttagtagatgactccatagtacgtggcaccacttgccagcaaataatccaaatggcgcgtgatgcaggtgcggccaaagtgtattttgcttctgcggcaccagctgtgaagtaccctaatgtttatggtattgatatgccaaccgccgcagagcttattgctcacggtcgtacagaagaagaagtgtgcaaggagattggcgccgactggctaatttaccaagatttagaagacttaatcgccgcttctagcgagggtagcccagacgttacccagtttgaatgtgctgtatttaatggcaactacgtaactggggatgtaacccccgagtatcttaaaaagttggaagatcgccgcaacgactcatcaaaaatgcgggatcaaagccagtctaacaatgccatggtgggtattcacaacgacggttaa

SEQ ID NO: 30508 - protein, 504 aa, Microbulbifer degradans 2-40
MCGIVGIVGKSDVNVALYDALTMLQHRGQDAAGIMTCHNGKLAQQKAVGLVKDVFRTRHMQRLVGNMGIGHVRYPTAGSSGPALAQPFYVNSPYGIALAHNGNLTNTEKVSEDLFKEDLRHVNTESDSEVLLNVFAHELQLQGKLRPAPEDIFNAVARVHKRIRGGYAVVSMIASYGVVAFRDPHGIRPLVFGERITDKGTEYMIASESVSLDVLGFRLIRDVAPGEAIFVTVDGELHTRQCAENPSLRPCIFEHVYFARPDSIMDGVSVYKSRLRQGEKLAEKILRETPNHDIDVVIPIPDSSRVAGQALAQNLGVKFREGLVKNRYIGRTFIMPGQQQRKKSVRQKLNVIDLEFRGKNVLLVDDSIVRGTTCQQIIQMARDAGAAKVYFASAAPAVKYPNVYGIDMPTAAELIAHGRTEEEVCKEIGADWLIYQDLEDLIAASSEGSPDVTQFECAVFNGNYVTGDVTPEYLKKLEDRRNDSSKMRDQSQSNNAMVGIHNDG

SEQ ID NO: 30509 - DNA, 1341 bp, Campylobacter upsaliensis RM3195
  CDS (1)..(1341): transl_table=11
atgtgtgcagttgtgggagtgattaattcatcaaatgctagcacttatgcatactatgcactttttgctatgcaacacagaggacaagaggcaagcggaataagtgtgagtgatggagagaaaataagaaccattaaggctaagggggaagtgagtcaaatttttaatggggagaatttgaaaaatctaaacggaagcctagccataggacacaatcgctattctaccgctggaaattcaagccttaatgacgcccagcccatagccgccacttgtatcctaggcgacatagccctagcacataatggaaatttggttaataaagaagagattagaaatgagcttattaaagacggagccattttccgcactaatatggacacagaaaatgtcgtgcatttaatcgctaaaagcaaaaaagaaagcttgaaggaaagatttgtagaaagtttgcaaaaatgcgttggggcgtattgcttcgttttgactgatagaaataggctttatgtgatgcgagatcgctttggtgtgcgtccgctttccttagggcgtttaaaggatggaggctatatcgtggctagtgaaacttgtgcttttgatttgatagaggctgagtttatccgcgatgtaaaacccggcgaaatgctcatttttacgcaaggagaggaggaatttgaaagcttgcagcttttcaaagaagagcctagaatttgtgcttttgaatatatttattttgctcgtcctgatagcatagtcgaggggaaaagcgtgtatgaagtgcgtaagaaaatgggcgagaatttagcgaaaaaattcactcacaaagccgattttgtcgtgcctgtgccagatagtggagtgagtgccgctataggctttgcacaatttttaaaacttccacttgaaatggcaatcgttagaaatcactatgtaggacgcaccttcatcgaacccacccaagaattgcgtaatcttaaggttaaattaaaactcaaccctatgcgccctgttttagagggcaaagagatagttgttattgatgatagtatagtgcgtggaacgacctcaaagaaaatcatttctcttttacgcgcagctggagcgaaaacaattcaccttgccatagcttgccctgagattaaattcccagacctttacggcatagacacgccgacttttgaagaattaattagtgctaataaaagcagcgaagaggtgagggagtattgcggtgcagatactttgagctttttaagcatagaagagcttgttaaaagcatagggaccgaaagggcttactctctcattagctttgatggggattattttattaaggagtga

SEQ ID NO: 30510 - protein, 446 aa, Campylobacter upsaliensis RM3195
MCAVVGVINSSNASTYAYYALFAMQHRGQEASGISVSDGEKIRTIKAKGEVSQIFNGENLKNLNGSLAIGHNRYSTAGNSSLNDAQPIAATCILGDIALAHNGNLVNKEEIRNELIKDGAIFRTNMDTENVVHLIAKSKKESLKERFVESLQKCVGAYCFVLTDRNRLYVMRDRFGVRPLSLGRLKDGGYIVASETCAFDLIEAEFIRDVKPGEMLIFTQGEEEFESLQLFKEEPRICAFEYIYFARPDSIVEGKSVYEVRKKMGENLAKKFTHKADFVVPVPDSGVSAAIGFAQFLKLPLEMAIVRNHYVGRTFIEPTQELRNLKVKLKLNPMRPVLEGKEIVVIDDSIVRGTTSKKIISLLRAAGAKTIHLAIACPEIKFPDLYGIDTPTFEELISANKSSEEVREYCGADTLSFLSIEELVKSIGTERAYSLISFDGDYFIKE

SEQ ID NO: 30511 - DNA, 1521 bp, Lactococcus lactis subsp. cremoris SK11
  CDS (1)..(1521)
atgtctgatgaaatgacaagcgcaacatttactgaacaagagtggtcgcattttgagaaaaaaagtttgaatcaaactgaagccgatgagctccgcgactggtcgcggtttgaagcgaagacattaaatgaagaatgtggacttttcggcgtttggggacatcctgatgccgctcgtctaacctattttggtcttcacgctttgcaacatcgcgggcaagaaggcgcaggaattctggtcaataacaacggcaagctcaatcgtcatcgtggtttaggtttggtcaccgaagtttttcgtgacgaaaaagatttggaagaactgacaggttcatctgccattggtcatgtccgctatgcgacggctggctcggcaaatattaataatgttcagccattccagtttgaatttcatgacggatcacttggacttgcccacaatggaaatttaactaacgctcaatccttgcgctgtgaacttgaaaaatctggagcaatattttctagtaattcagacacagaaatcctcatgcacttgattcgccgtagtcatcatccagaatttatgggcagagtcaaagaagcacttaatacggtcaaaggtggctttgcctatcttattatgactgaaaattcaattgtcgcagctcttgaccctaatggatttcggccactttcaatcggtaaaatgagcaacggtgcgcttgtcgtggcctcagaaacttgtgctttcgatgttgttggcgccacttggattcaagatgttcaacccggtgaaatcattgaaattaatgacgacggcattcatgtggaccaattttctgacagcaccaacatgactatttgttcaatggaatacatctatttcgctcgtcctgacagcaatatcgctggagttaatgttcatactgccagaaaacgttcaggaaaaattttagcccaagaagccaaaattgacgctgatattgtcattggtgtccctaattcatcactcagtgccgcttcaggctacgctgaagaatcgggcttgccttacgaaatggggctgattaaaaatcaatatgtggcaagaactttcattcaaccgactcaagaacttcgtgaacaaggcgttcgcatgaaattgagtgctgttcgaggtgttgtagaaggaaaacgtgtcatcatggttgatgacagcattgtgcgtggaacgaccagccgtcgcattgtcaaactcctcaaagatgcaggcgcagccgaggttcatgtggcaatcgccagtcccgctctcaaatatccttgcttttacggcattgacatccaagatcgtgacgaactcatcgcagccacacacacgactgatgaaatcagagaagctatcggagcggatagtctgacctatctcagccagtcagggcttgtcgaggcgatcggtcacgataaactttgcttgtcatattttgacggcgaatatccaacaccgctttatgattatgaagcagactatttggaatctttggcaaaaaatggtctgaaataa

SEQ ID NO: 30512 - protein, 506 aa, Lactococcus lactis subsp. cremoris SK11
MSDEMTSATFTEQEWSHFEKKSLNQTEADELRDWSRFEAKTLNEECGLFGVWGHPDAARLTYFGLHALQHRGQEGAGILVNNNGKLNRHRGLGLVTEVFRDEKDLEELTGSSAIGHVRYATAGSANINNVQPFQFEFHDGSLGLAHNGNLTNAQSLRCELEKSGAIFSSNSDTEILMHLIRRSHHPEFMGRVKEALNTVKGGFAYLIMTENSIVAALDPNGFRPLSIGKMSNGALVVASETCAFDVVGATWIQDVQPGEIIEINDDGIHVDQFSDSTNMTICSMEYIYFARPDSNIAGVNVHTARKRSGKILAQEAKIDADIVIGVPNSSLSAASGYAEESGLPYEMGLIKNQYVARTFIQPTQELREQGVRMKLSAVRGVVEGKRVIMVDDSIVRGTTSRRIVKLLKDAGAAEVHVAIASPALKYPCFYGIDIQDRDELIAATHTTDEIREAIGADSLTYLSQSGLVEAIGHDKLCLSYFDGEYPTPLYDYEADYLESLAKNGLK

SEQ ID NO: 30513 - DNA, 1023 bp, Chromohalobacter salexigens DSM 3043
  CDS (1)..(1023): transl_table=11
atgtgcggtatcgtgggcctcatggccaatcaggcggtcaatcagtcgctgtatgacgcgctgacagtgctccaacaccgtggccaggatgccgccgggatgatgacatggcatgagggacgcttcctgttgcgcaagagcaacgggctggtgcgggatgtcttccacacgcgtcacatgacgcgcctgcgcggcaacatgggcatcgggcatatccgctatcccaccgcgggctcgtcgagcgaagcggagtcgcagccgttctacgtcaattcgccctacgggatctccctggcgcacaacggcaacctgaccaactccgaacagctcaagcgcgagctgttcttttccgacctgcgccacatcaacaccagctccgactcggaagtgctgctcaacgtcttcgcgcacgagctcggcaagcagggacatcacctgacacccgacgatatcttcgatgcggtgcgtcgggtgcaccgccgttgccaagggggctacgccgcggtggccttcatcaacggtttcggcatggtggcgtttcgcgacccccatggcatccgcccggtggtctacggcacgcgcgacaccgaggaaggccaggaggtgatgatcgcctccgaatcggtggcgctggacgtggggggcttcgagctgtgccgcgacctggcgccgggcgaggcgatcttcatcgaaaccgatggcaaccgcgtgcacacccagcagtgtgccgatcgcccccgcctgacaccctgcatcttcgagcacgtctacctggcgcgtcccgattcgatcctcgacggcgcctatgtctacggcacgcgcatggaaatggggcgcaagctgggcgatcgcatcctgcgcgactggccggaacatgacatcgacgtggtgatcccgatccccgacacctcgcgtacctcggcgctggaactggcgcagcacctgggcgtcacctatcgcgaaggcttcatgaagaaccgctacatcgggcggaccttcatcatgcccggccagacccagtag

SEQ ID NO: 30514 - protein, 340 aa, Chromohalobacter salexigens DSM 3043
MCGIVGLMANQAVNQSLYDALTVLQHRGQDAAGMMTWHEGRFLLRKSNGLVRDVFHTRHMTRLRGNMGIGHIRYPTAGSSSEAESQPFYVNSPYGISLAHNGNLTNSEQLKRELFFSDLRHINTSSDSEVLLNVFAHELGKQGHHLTPDDIFDAVRRVHRRCQGGYAAVAFINGFGMVAFRDPHGIRPVVYGTRDTEEGQEVMIASESVALDVGGFELCRDLAPGEAIFIETDGNRVHTQQCADRPRLTPCIFEHVYLARPDSILDGAYVYGTRMEMGRKLGDRILRDWPEHDIDVVIPIPDTSRTSALELAQHLGVTYREGFMKNRYIGRTFIMPGQTQ

SEQ ID NO: 30515 - DNA, 1515 bp, Shewanella amazonensis SB2B
  CDS (1)..(1515): transl_table=11
atgtgtggtatcgtcggaatagttggccattcctcggttaatcagaccatctatgacgcactgacagtgcttcaacaccgtggtcaggatgcagccgggatagtcacggtagacaatgacgcgttcaggctccgtaaggcgaacggactggtgcgtgatgtgtttgaacccaaacacatgcagcgcctgcagggtaacgccggtatcggccatgtgcgttatcccaccgccgggagctccagctcctcagaagcccagcctttttacgttaactcgccttttggtatttctctggcgcacaacggcaacctgaccaacactcaagacctgtcggctcgtcttaagcagcagcgtcgacacgtgaataccacgtcggattctgaagtgctgctgaacctgctcgccgatgagctgcagcaggtacagagcgcccatctgagcgccgatcaggtgtttgatgccgtggcaaaagtgcacgcccaaacccgtggtgcttacgcggtagtggccatgattgttggcgaaggtcttgtggccttccgtgaccccaatggcattcgcccgctggtgcttggcaaaaatgaaaccgccaccggcacagagtacatggtggcctcagagagtgtggccctggatgccgtgggttttgaagtcattcgtgatgttgcgccgggcgaagccgtatacgtcaccctcgacggtcagctgtttacccgtcagtgcgccgaagcgccgctctattcgccctgtattttcgaatttgtttactttgcccgtccagactccaccatcgacaaggtgtctgtgtacgccagccgggtaaatatgggcgccaaactgggcgagaaaatcaagaaagaatggtacgacaacgacatcgatgtggttatccccattcctgaaacctcctgtgatatcgcactggaaattgcccgtgttatggacttgccttaccgtcagggctttgtaaagaaccgctacattggccgtaccttcatcatgcctggtcagcaggagcgtaagaagtcagtgcgccgtaaactcaatgccatcaacaccgagtttaagggcaagaatgtgcttttggtggacgactccatcgtgcgtggtaccacgtcagagcaaatcatcgagatggcccgcgaagccggtgccaagaaggtgtatttcgcctctgctgcccctgaaattcgtttccccaacgtgtacggcatcgatatgcccacttccaatgagctgattgcccacggacgtgatgcggatgaaattgccaaactgattggtgccgatggtatcatcttccaggatttgactgatctggttgaagctgtgcgtatggaaaaccccgaaatcaagcgttttgaaacatcggtgtttgacggtgattacatcactggtgatgtgactcaggcgtatcttgaccacctcactcagctgagaaacgatgatgccaaggcaaatcgcaacagcgatgtgggcacgaatctcgagctgcacaacgtctgtcacccgtaa

SEQ ID NO: 30516 - protein, 504 aa, Shewanella amazonensis SB2B
MCGIVGIVGHSSVNQTIYDALTVLQHRGQDAAGIVTVDNDAFRLRKANGLVRDVFEPKHMQRLQGNAGIGHVRYPTAGSSSSSEAQPFYVNSPFGISLAHNGNLTNTQDLSARLKQQRRHVNTTSDSEVLLNLLADELQQVQSAHLSADQVFDAVAKVHAQTRGAYAVVAMIVGEGLVAFRDPNGIRPLVLGKNETATGTEYMVASESVALDAVGFEVIRDVAPGEAVYVTLDGQLFTRQCAEAPLYSPCIFEFVYFARPDSTIDKVSVYASRVNMGAKLGEKIKKEWYDNDIDVVIPIPETSCDIALEIARVMDLPYRQGFVKNRYIGRTFIMPGQQERKKSVRRKLNAINTEFKGKNVLLVDDSIVRGTTSEQIIEMAREAGAKKVYFASAAPEIRFPNVYGIDMPTSNELIAHGRDADEIAKLIGADGIIFQDLTDLVEAVRMENPEIKRFETSVFDGDYITGDVTQAYLDHLTQLRNDDAKANRNSDVGTNLELHNVCHP

SEQ ID NO: 30517 - DNA, 1497 bp, Prosthecochloris aestuarii DSM 271
  CDS (1)..(1497): transl_table=11
atgtgcggagtgttcggtgtctacaattctaaaactcccgctgaagataccttttacgggttatattcattgcaacacagaggtcaggaagccgcaggaattgttgtagcagattacggtgaagacaaaaagaaaacaatctaccggcagcataaagcaatgggtctggttgcggaagtcttcaaggatgaaaagctcttcgacaaacttcacggtcatgcagctataggccataatcgttactcgacgacaggggcctcaaaatcgaccaacaacatccagcctttctcgctcatctaccgctcaggaaatctcgctatagctcacaatggaaatctgaccaatgcccgggcacttcgaaaagagctgacagaaaaaggggtcatcttccaggcctcgtcagacacggaagtcattccgcatctggcagccttaagccccgaaaatgaacccatccatcagatctaccacgcgctaagacaggtacagggcgccttctccatcgtcattctcgcaaacgaccaactcattgccgcacgcgacccatacggcgtcaggccacttgcccttggaaagaaagtcgatcccgataccggagaagcatcattttacatcgccagtgaaacctgcgcgttcgacattctatcagttgaatatctcagagatgtcgaacctggcgaaattctgctcatcgacagagtatcgacccgaacacataaaccaaaatcgctctatctgccgccgtcaaaacgcaaagctcgctgtattttcgaatatgtctactttgctcgtccagacagtacgatctttcagaactccgtcgataaaatccgtcgaaacctcggcaaaaaccttgcccgggaatcaaccgtccagcaatccaacgaagacaaacatctgattgtcgccagcgttccggactcgtcaaataccgctgctctcggttttgtgcgtgaaagcaataaaatcaaccgtccagcccgtttcgaacacggtctcatccgcaaccactatgtaggaagaaccttcattcagcctggaaaggcaagcagagagattaaagttcgctccaaatacaacatcatccggggggttctgcagaatcgtcagattatcctgatcgacgactcgatcgttcgcggaacaacagcacgaatgcttataaaactcattcgggaagcaaaccccaaagaaatccacctccacatcagctcgccaccgatcaccaacccctgcttctacggcatggacttccctaccaagggccagctcctgaccaatctgttcatcggcgccgcaagcgaacaggaggaagttgaaagcatcagacaatatatcggtgtagactcgctcaaatacctctctctgcagggtctgctcaacagcgtcccgcaattcgatcatgaaacctgcagttactgcacggcctgtttcacaggagactaccccatcaagatcgaagacgcaacgaccgataaagaagaaaacgacgtataa

SEQ ID NO: 30518 - protein, 498 aa, Prosthecochloris aestuarii DSM 271
MCGVFGVYNSKTPAEDTFYGLYSLQHRGQEAAGIVVADYGEDKKKTIYRQHKAMGLVAEVFKDEKLFDKLHGHAAIGHNRYSTTGASKSTNNIQPFSLIYRSGNLAIAHNGNLTNARALRKELTEKGVIFQASSDTEVIPHLAALSPENEPIHQIYHALRQVQGAFSIVILANDQLIAARDPYGVRPLALGKKVDPDTGEASFYIASETCAFDILSVEYLRDVEPGEILLIDRVSTRTHKPKSLYLPPSKRKARCIFEYVYFARPDSTIFQNSVDKIRRNLGKNLARESTVQQSNEDKHLIVASVPDSSNTAALGFVRESNKINRPARFEHGLIRNHYVGRTFIQPGKASREIKVRSKYNIIRGVLQNRQIILIDDSIVRGTTARMLIKLIREANPKEIHLHISSPPITNPCFYGMDFPTKGQLLTNLFIGAASEQEEVESIRQYIGVDSLKYLSLQGLLNSVPQFDHETCSYCTACFTGDYPIKIEDATTDKEENDV

SEQ ID NO: 30519 - DNA, 1515 bp, Shewanella frigidimarina NCIMB 400
  CDS (1)..(1515): transl_table=11
atgtgtggtatcgtcggaatagtaggaaaatcaacagttaatcagaccatttatgatgcgctgactgtgctccaacatcgtggtcaagacgcagcaggtattgtgacggttgacatgaatgcgtttcgtttacgcaaagcaaacggcttagtcaaagatgtgtttgaacctaaacatatgcagcgtttacaaggcaatgccggtattggacatgttcgttatcctaccgctggcagctcgagtgcatcagaggcacaaccgttttatgttaactcgccatttggtatttcgttagcgcataacggtaacttgactaatacgattgaactggctgctagcctagtcacaaagcgtcgtcatgttaacactacctcagattctgaaatcttgttaaatctgttagccgatgaattacaagaaacgcgcagtttaactttaagtgccgacgaagtgtttgacgcagttgctaaagtacatgcgcaaacgcgtggtgcttatgcggtagttgcgatgattattggccaaggtttagtggcatttcgtgacccatttggtattcgtcctttggtattgggtaaacacgaaaccgcaacgggtaccgagtatatggttgcttcagaaagtgttgctttagacgctgttggttttgaagtgatgcgtgacgtagcacctggtgaagctgtttatatttctcttgatggccagttatttacccgtcaatgtgcagcagacccaagctatgccccatgtattttcgaattcgtgtattttgcacgtcccgattcgagcattgataaagtgtctgtttatgcaagccgtgtaaacatgggcgctaaattaggcgaaaaaattaagaaagaatgggaagatcacgacattgatgttgttattcctattcctgagacttcgtgcgatatcgcattagaaattgcacgttgcatggatttaccgtaccgccaaggttttgtgaaaaatcgttatattggtcgtacgtttattatgcctgggcagttagagcgtaaaaaatcagtacgtcgtaaactgaatgcgattaataccgaatttaaaggtaaaaacgtattattggttgatgactcgattgtacgtggtactacgtctgaacagatcattgaaatggcgcgtgaagctggagcaaagaaagtatactttgcatcagcagcaccggaaatccgtttcccgaatgtgtatggtattgatatgccaacgtctaatgagcttattgctcatggccgtgatgcagacgaaattgccaaaatcattggtgccgatggcattattttccaagacttaagcgacttaattgaagcggtaagaatggaaaatccagagattaagcgtttcgaaacatcagtgttcgacggtcattatattaccaacgacgttgaccaagcttacttggatcatttaacgcagttacgtaacgatgatgccaaagccaatcgctcaaaagacattggcactaacttagaaatgcacaacgagtgtcatccataa

SEQ ID NO: 30520 - protein, 504 aa, Shewanella frigidimarina NCIMB 400
MCGIVGIVGKSTVNQTIYDALTVLQHRGQDAAGIVTVDMNAFRLRKANGLVKDVFEPKHMQRLQGNAGIGHVRYPTAGSSSASEAQPFYVNSPFGISLAHNGNLTNTIELAASLVTKRRHVNTTSDSEILLNLLADELQETRSLTLSADEVFDAVAKVHAQTRGAYAVVAMIIGQGLVAFRDPFGIRPLVLGKHETATGTEYMVASESVALDAVGFEVMRDVAPGEAVYISLDGQLFTRQCAADPSYAPCIFEFVYFARPDSSIDKVSVYASRVNMGAKLGEKIKKEWEDHDIDVVIPIPETSCDIALEIARCMDLPYRQGFVKNRYIGRTFIMPGQLERKKSVRRKLNAINTEFKGKNVLLVDDSIVRGTTSEQIIEMAREAGAKKVYFASAAPEIRFPNVYGIDMPTSNELIAHGRDADEIAKIIGADGIIFQDLSDLIEAVRMENPEIKRFETSVFDGHYITNDVDQAYLDHLTQLRNDDAKANRSKDIGTNLEMHNECHP

SEQ ID NO: 30521 - DNA, 1704 bp, Vigna unguiculata
  CDS (1)..(1704)
atggccgcgtctaatctctccaccctctgctcctcttcacactccaaaccctctttccctttcttcaacacacaaagcttcagcgtcaacactaacactctttttctcaacaccaccaccaactcctttcaaacccttctctctcattccacccgctacactctgcctctcccatgcaccaaaaccacaaacactttcgcctccttcaatgatgacgaaaagcctcgcgaagagtgcggcgttgtgggcatctacggcgacccagaagcctcccgtctctgctccctcgccctccacgccctccagcaccgcggccaggaaggcgccggcatcgtcgccgtcgacaacaacgtcctccacacagtcaacggcgttggcctcgtttctgacgtcttcgacgagactaagctctctcagctacccggctcctgcgccattggccacgtccgctactccaccgcgggacactccaggctctgcaacgtccaacccttcgtcgccggctaccgcttcggctccgtcgccgtctcgcacaatggaaacttcgtgaactaccggtccctgcgcgccaaactggaagacaacgggtccatcttcaacacgacctccgacaccgacgtggtgctccacctgatcgccacctccaagcacagacctttcctactgagaatcgtggatgcctgcgagaatctgaagggcgcgtactccctggtgttcctcacggaggacaagctggtggccgtgaaggaccccttcgggttccgaccgttggtgatgggaaggagaagcaacggcgctgtggttttcgcctcggagacatgcgcgctggatttgatcgaagcgacgtacgagcgagaggtgaacccgggtgaggttgtggtggtggaccacaccggaatccaatccctctgcctcgtgactcatccggagccaaagcaatgcatcttcgagcacatatacttcgcgcttcccaactctgttgtcttcgggaggtccgtgtacgagtccaggagaaaattcggggaaatactggccaccgagagccccgtcgagtgcgacgtagtgatcgcggttcctgattccggggtggtggctgcgcttggctacgctgcaaaagctggggttccctttcagcaggggttgataaggtcgcactatgtggggaggaccttcatcgagccctcgcagaaaataagagattttggggtgaagctgaagctgtttccggtgcgtggcgtgcttgaagggaagagggttgtggtggtggatgaatccattgtgaggggcaccacattgtccaagattgtgaggctgataaaggaagcgggtgccaaagaggtccacatgaggattgcgtgtccacccattgttgggtcctgttactacggcgtcgacacccccagtaaggaggagttgatttccaacaggatgagtgtggaggagataagagagtttattgggtctgattccctcgcttttcttcccttggacacgttgaagaggttgttggaggatgatgctcctaactactgctatgcttgcttctccggaaaataccctgttcagccggaggaacttaaaaccagcaacctcaatgagtttgattgggacgatgctttgaatgggagtttgaaatctattgagaacgagggttgggttagaaaccaggagggagtgtctgagaataagattgttagtgtctga

SEQ ID NO: 30522 - protein, 567 aa, Vigna unguiculata
MAASNLSTLCSSSHSKPSFPFFNTQSFSVNTNTLFLNTTTNSFQTLLSHSTRYTLPLPCTKTTNTFASFNDDEKPREECGVVGIYGDPEASRLCSLALHALQHRGQEGAGIVAVDNNVLHTVNGVGLVSDVFDETKLSQLPGSCAIGHVRYSTAGHSRLCNVQPFVAGYRFGSVAVSHNGNFVNYRSLRAKLEDNGSIFNTTSDTDVVLHLIATSKHRPFLLRIVDACENLKGAYSLVFLTEDKLVAVKDPFGFRPLVMGRRSNGAVVFASETCALDLIEATYEREVNPGEVVVVDHTGIQSLCLVTHPEPKQCIFEHIYFALPNSVVFGRSVYESRRKFGEILATESPVECDVVIAVPDSGVVAALGYAAKAGVPFQQGLIRSHYVGRTFIEPSQKIRDFGVKLKLFPVRGVLEGKRVVVVDESIVRGTTLSKIVRLIKEAGAKEVHMRIACPPIVGSCYYGVDTPSKEELISNRMSVEEIREFIGSDSLAFLPLDTLKRLLEDDAPNYCYACFSGKYPVQPEELKTSNLNEFDWDDALNGSLKSIENEGWVRNQEGVSENKIVSV

SEQ ID NO: 30523 - DNA, 1473 bp, Corynebacterium ammoniagenes
  CDS (1)..(1473): transl_table=11
gtgaatttagatgaccaaggcgagcaagaaccccgcgaagagtgcggtgtctttggcgtctgggctcctggtgaagatgttgcgacactgacctactttggtctgttcgcattgcagcatcgtgggcaggaagctgcaggtatcggcgtcggtgatggagaccgcctcgttgtcttcaaaaacatgggcttggtctcgaatattttcgatgagtccattttaaattccctccatggctccgtgggcgtggggcatacgcgctactcgactgccggtggcaaagagtggtcgaatgtccagccgatgtttaataccacctcaaatggggtagacatcgctttgtgccacaacggcaacttggtgaactaccaagaactgcgcgatgaagcagtagctctgggactttaccgagagaatgaaaaatccctgtcggattccatgatcatgacagctttgctggcgcacggagtcggggaaggcaactctgtctttgacgccgctaagcaactgctgccaagcatcaaaggcgctttttgcttgacctttaccgatggcaagaccttgtacgccgcgcgtgacccgcacggtgtacgccccttggtcattggccgcttggcgcaaggctgggttgttgcttccgaaacctgtgcgctggatatcgtgagcgcacagtttatccgtgaggtagagcccggtgaacttatctctgtcaatgaggcaggaatccacagcgaaaaattcgctgagccgaagcgccagggctgcgtctttgaatacgtctacttggcacgtccagacaccgtgatcaaaggccgcaacgttcacgcgacgcgcgtggatattggtcgcgcacttgcgaaatctcaccctgcgccagaagctgacatggtcatccccgtgccagaatccggaaacccggcagctgttggctacgcccgggaatcgggcctgacatttgcgcacggcttggtcaaaaacgcctacgtgggtcgaaccttcattcagcccacccagaccttgcgccagctgggtattcgcctcaagctcaaccccctgcgcgaggtcatcgagggcaagtcactcgttgttgtagatgactctattgtccgcggcaacacccaacgcgcgctggtgcgcatgctgcgtgaagcaggcgctgctgaagtgcacgtgcgcattgcttcaccgccagtcaaatggccttgtttctacggcattgacttcgcctcgcctggtgaattgattgctaatatcaagccttctgatgatcctcaggtagtaaccgatgcagtgtgcgaagctatcggagcagactctttagggtttgtatctgtagatgagatggttgaggcaacgcaccaacctatcaattccttgtgtaccgcttgctttgatggcaactacgaactcggacttccgaccgctaaccccaatgctgacgctgtgcgaactttgctcagccaaaagaactga

SEQ ID NO: 30524 - protein, 490 aa, Corynebacterium ammoniagenes
MNLDDQGEQEPREECGVFGVWAPGEDVATLTYFGLFALQHRGQEAAGIGVGDGDRLVVFKNMGLVSNIFDESILNSLHGSVGVGHTRYSTAGGKEWSNVQPMFNTTSNGVDIALCHNGNLVNYQELRDEAVALGLYRENEKSLSDSMIMTALLAHGVGEGNSVFDAAKQLLPSIKGAFCLTFTDGKTLYAARDPHGVRPLVIGRLAQGWVVASETCALDIVSAQFIREVEPGELISVNEAGIHSEKFAEPKRQGCVFEYVYLARPDTVIKGRNVHATRVDIGRALAKSHPAPEADMVIPVPESGNPAAVGYARESGLTFAHGLVKNAYVGRTFIQPTQTLRQLGIRLKLNPLREVIEGKSLVVVDDSIVRGNTQRALVRMLREAGAAEVHVRIASPPVKWPCFYGIDFASPGELIANIKPSDDPQVVTDAVCEAIGADSLGFVSVDEMVEATHQPINSLCTACFDGNYELGLPTANPNADAVRTLLSQKN

SEQ ID NO: 30525 - DNA, 1536 bp, Arabidopsis thaliana
  CDS (1)..(1536)
atggagtctcctcctacttctcctctccttcaccatccgaagaacaattctcatgccccttttgattaccacaacgacgaagacgacgaaaagcctcgagaagagtgcggtgtcgtcggaatctatggagatccagaagcttcacgactcttttacttagctctccacgcacttcagcatcgtggtcaagaaggtgcaggtattgtaacagtaagtcccgagaaagttcttcaaaccattacaggtgttggtttagtctctgaggttttcaacgaatcaaaacttgatcaattacctggtgaatttgctattgcccatgttcgttactcaacagctggagcttctatgctcaaaaatgttcagcctttcgtcgccggttatcgattcggttccatcggtgttgcccacaatggtaatttagtaaattacaaaactttgagagctatgcttgaagagaacggttctatcttcaatactagctctgatactgaggttgtgcttcatttgattgctatttctaaagctagacctttttttatgaggattattgatgcttgtgagaaacttcaaggtgcttattcaatggtgtttgttactgaggataagcttgttgctgttcgtgatccttatgggtttagacccttagttatgggtaggagaagtaatggagctgttgttttcgcttcggagacttgtgctcttgatttgattgaagctacttatgagagagaggtttatcctggtgaggttttggttgtggataaggatggtgtcaagtctcagtgtttgatgcccaagtttgagcctaagcaatgtattttcgaacatatctacttctcgttgcctaactcgattgtgtttggtcggtccgtgtatgaatctaggcatgtgtttggtgagattttggcaactgagtcgcctgttgagtgcgatgttgtcatcgctgtgcctgactctggtgttgtggctgctctcgggtacgctgcgaaatccggtgtgccgtttcaacaggggttgattaggtctcattatgtagggaggacgttcattgagccgtcacagaagattagagactttggtgtgaagcttaagttgtctcctgttcgtggtgttttagaagggaagagagttgttgtggtggatgattcgattgttagaggcacaacttcgtctaagattgtgcgtttattgagagaagctggtgcgaaagaggttcatatgaggattgctagtcctcctatagtagcttcttgttactatggtgttgatacgcctagctcagaggagttgatatccaacagattgagtgttgaggagattaacgagttcatcgggagtgactctcttgcgtttctgtcgtttgataccttaaagaaacacttggggaaagactctaagagcttctgctatgcgtgcttcacgggtgactatcccgtgaagccaacagaagttaaggtgaaacgaggaggaggggatttcattgatgacggtctcgttggtagcttcgaaaacatcgaagcaggttgggttcgataa

SEQ ID NO: 30526 - protein, 511 aa, Arabidopsis thaliana
MESPPTSPLLHHPKNNSHAPFDYHNDEDDEKPREECGVVGIYGDPEASRLFYLALHALQHRGQEGAGIVTVSPEKVLQTITGVGLVSEVFNESKLDQLPGEFAIAHVRYSTAGASMLKNVQPFVAGYRFGSIGVAHNGNLVNYKTLRAMLEENGSIFNTSSDTEVVLHLIAISKARPFFMRIIDACEKLQGAYSMVFVTEDKLVAVRDPYGFRPLVMGRRSNGAVVFASETCALDLIEATYEREVYPGEVLVVDKDGVKSQCLMPKFEPKQCIFEHIYFSLPNSIVFGRSVYESRHVFGEILATESPVECDVVIAVPDSGVVAALGYAAKSGVPFQQGLIRSHYVGRTFIEPSQKIRDFGVKLKLSPVRGVLEGKRVVVVDDSIVRGTTSSKIVRLLREAGAKEVHMRIASPPIVASCYYGVDTPSSEELISNRLSVEEINEFIGSDSLAFLSFDTLKKHLGKDSKSFCYACFTGDYPVKPTEVKVKRGGGDFIDDGLVGSFENIEAGWVR

SEQ ID NO: 30527 - DNA, 1835 bp, Mus musculus
  CDS (120)..(1673)
ggggaaggaggcagtcagtagcgcgagcctcttgaggcgttcgatagcggagcggacagctggttggtgcttggaccacgccgcggcagcaggtccctccacgtgctttccgaggcgccatggagctggaggagttggggatccgcgaggaatgtggtgtgtttgggtgcatcgcttctggagactggcccacgcagctagatgtgccgcatgtgatcactctgggactcgtggggctacagcaccgaggtcaggagagcgctggtattgtgaccagtgatgggagtgcagtgcctaaattcagggtgcataagggaatgggtcttgtaaaccatgtttttaccgaagacaatttgaagaaattgtatgactcaaaccttggaatcggacatacgaggtacgccaccacgggaaagtgtgagctggaaaactgccagccattcgtagttgagacgcttcacggaaaaatagctgtggcccataacggggaactggtgaacgccgctcggttgcggaagaagcttctgcggcagggtattgggctttccacgtcctctgatagtgaaatgattacccagttactcgcatacacccctcctcaagaaaaagatgatgctccagactgggtagcaagaattaagaacttaatgaaagaagcgcccgcagcatactccctggttataatgcacagggacttcatttacgcggtgcgagatccatatggaaatcgtcctctctgcatcgggcgtcttatgccagtctctgatgtaaatgacaaagagaaaaaatcctcagaaactgaaggatgggtggtgtcctcagagtcttgcagctttttatccatcggtgccagatattgccatgaagtcaaacccggagaaattgtagaaatatccagacatggtatcagaactcttgatataattccaaggtctaacggagacccagtggctttttgtatttttgaatatgtttattttgcaagaccagatagtatgtttgaagaccaaatggtttatacagtaaggtaccggtgtggtcagcagctggcaattgaagcacccgtggaggcggacttggttagcacagttccagagtctgctacgcctgcagcgctgggatatgcaacaaagtgtgggctgccttatgtggaagtgctgtgtaagaaccggtatgtaggaagaaccttcattcaaccaaacatgaggttaagacaactcggtgttgcaaagaagtttggcgtgttgtctgacaactttaaaggcaaaagaatcgttctcatagatgattcgattatgaggggcaatactatctcacccatcataaaactcctcaaagaatccggtgcaaaagaggtgcacattcgagtcgcttcaccaccaataaaatatccgtgcttcatgggaataaacattcctacaaaagaagagctcatagccaataagccagaatttgattgtcttgcagagtacctcggagcaaacagcgttgtgtatctgtcagtggaaggactggtttcatctgtgcaacaagaaataaaatttaagaagcagaaagtgaaaaaacatgatattgcaattcaagaaaatggaaatggtttggaatattttgaaaagacgggacactgtacagcttgcctcactgggcagtaccctgtggagctggaatggtagctgcctggacagatgtgttgcttccagactgtagggtcatcaagaagtggtctacatactgttgttactcaggtggtaccaagtggataccacatgcttatgtatgtatactttaagctttgagattttctgaggttattattaaattgctatattgaaccc

SEQ ID NO: 30528 - protein, 517 aa, Mus musculus
MELEELGIREECGVFGCIASGDWPTQLDVPHVITLGLVGLQHRGQESAGIVTSDGSAVPKFRVHKGMGLVNHVFTEDNLKKLYDSNLGIGHTRYATTGKCELENCQPFVVETLHGKIAVAHNGELVNAARLRKKLLRQGIGLSTSSDSEMITQLLAYTPPQEKDDAPDWVARIKNLMKEAPAAYSLVIMHRDFIYAVRDPYGNRPLCIGRLMPVSDVNDKEKKSSETEGWVVSSESCSFLSIGARYCHEVKPGEIVEISRHGIRTLDIIPRSNGDPVAFCIFEYVYFARPDSMFEDQMVYTVRYRCGQQLAIEAPVEADLVSTVPESATPAALGYATKCGLPYVEVLCKNRYVGRTFIQPNMRLRQLGVAKKFGVLSDNFKGKRIVLIDDSIMRGNTISPIIKLLKESGAKEVHIRVASPPIKYPCFMGINIPTKEELIANKPEFDCLAEYLGANSVVYLSVEGLVSSVQQEIKFKKQKVKKHDIAIQENGNGLEYFEKTGHCTACLTGQYPVELEW

SEQ ID NO: 30529 - DNA, 1677 bp, Mus musculus
  CDS (1)..(1677)
atggagctggaggagttggggatccgcgaggaatgtggtgtgtttgggtgcatcgcttctggagactggcccacgcagctagatgtgccgcatgtgatcactctgggactcgtggggctacagcaccgaggtcaggagagcgctggtattgtgaccagtgatgggagtgcagtgcctaaattcagggtgcataagggaatgggtcttgtaaaccatgtttttaccgaagacaatttgaagaaattgtatgactcaaaccttggaatcggacatacgaggtacgccaccacgggaaagtgtgagctggaaaactgccagccattcgtagttgagacgcttcacggaaaaatagctgtggcccataacggggaactggtgaacgccgctcggttgcggaagaagcttctgcggcagggtattgggctttccacgtcctctgatagtgaaatgattacccagttactcgcatacacccctcctcaagaaaaagatgatgctccagactgggtagcaagaattaagaacttaatgaaagaagcgcccgcagcatactccctggttataatgcacagggacttcatttacgcggtgcgagatccatatggaaatcgtcctctctgcatcgggcgtcttatgccagtctctgatgtaaatgacaaagagaaaaaatcctcagaaactgaaggatgggtggtgtcctcagagtcttgcagctttttatccatcggtgccagatattgccatgaagtcaaacccggagaaattgtagaaatatccagacatggtatcagaactcttgatataattccaaggtctaacggagacccagtggctttttgtatttttgaatatgtttattttgcaagaccagatagtatgtttgaagaccaaatggtttatacagtaaggtaccggtgtggtcagcagctggcaattgaagcacccgtggaggcggacttggttagcacagttccagagtctgctacgcctgcagcgctgggatatgcaacaaagtgtgggctgccttatgtggaagtgctgtgtaagaaccggtatgtaggaagaaccttcattcaaccaaacatgaggttaagacaactcggtgttgcaaagaagtttggcgtgttgtctgacaactttaaaggcaaaagaatcgttctcatagatgattcgattgtgaggggcaatactatctcacccatcataaaactcctcaaagaatccggtgcaaaagaggtgcacattcgagtcgcttcaccaccaataaaatatccgtgcttcatgggaataaacattcctacaaaagaagagctcatagccaataagccagaatttgattgtcttgcagagtacctcggagcaaacagcgttgtgtatctgtcagtggaaggactggtttcatctgtgcaacaagaaataaaatttaagaagcagaaagtgaaaaaacatgatattgcaattcaagaaaatggaaatggtttggaatattttgaaaagacgggacactgtacagcttgcctcactgggcagtaccctgtggagctggaatggtggctgcctggacagatgtgttgcttccagactgtagggtcatcaagaagtggtctacatactgttgttactcaggtggtaccaagtggataccacatgcttatgtatgtatactttaagctttga

SEQ ID NO: 30530 - protein, 558 aa, Mus musculus
MELEELGIREECGVFGCIASGDWPTQLDVPHVITLGLVGLQHRGQESAGIVTSDGSAVPKFRVHKGMGLVNHVFTEDNLKKLYDSNLGIGHTRYATTGKCELENCQPFVVETLHGKIAVAHNGELVNAARLRKKLLRQGIGLSTSSDSEMITQLLAYTPPQEKDDAPDWVARIKNLMKEAPAAYSLVIMHRDFIYAVRDPYGNRPLCIGRLMPVSDVNDKEKKSSETEGWVVSSESCSFLSIGARYCHEVKPGEIVEISRHGIRTLDIIPRSNGDPVAFCIFEYVYFARPDSMFEDQMVYTVRYRCGQQLAIEAPVEADLVSTVPESATPAALGYATKCGLPYVEVLCKNRYVGRTFIQPNMRLRQLGVAKKFGVLSDNFKGKRIVLIDDSIVRGNTISPIIKLLKESGAKEVHIRVASPPIKYPCFMGINIPTKEELIANKPEFDCLAEYLGANSVVYLSVEGLVSSVQQEIKFKKQKVKKHDIAIQENGNGLEYFEKTGHCTACLTGQYPVELEWWLPGQMCCFQTVGSSRSGLHTVVTQVVPSGYHMLMYVYFKL

SEQ ID NO: 30531 - DNA, 1554 bp, Mus musculus
  CDS (1)..(1554)
atggaactggaggagttggggatccgcgaggaatgtggtgtgtttgggtgcatcgcttctggagactggcccacgcagctagatgtgccgcatgtgatcactctgggactcgtggggctacagcaccgaggtcaggagagcgctggtattgtgaccagtgatgggagtgcagtgcctaaattcagggtgcataagggaatgggtcttgtaaaccatgtttttaccgaagacaatttgaagaaattgtatgactcaaaccttggaatcggacatacgaggtacgccaccacgggaaagtgtgagctggaaaactgccagccattcgtagttgagacgcttcacggaaaaatagctgtggcccataacggggaactggtgaacgccgctcggttgcggaagaagcttctgcggcagggtattgggctttccacgtcctctgatagtgaaatgattacccagttactcgcatacacccctcctcaagaaaaagatgatgctccagactgggtagcaagaattaagaacttaatgaaagaagcgcccgcagcatactccctggttataatgcacagggacttcatttacgcggtgcgagatccatatggaaatcgtcctctctgcatcgggcgtcttatgccagtctctgatgtaaatgacaaagagaaaaaatcctcagaaactgaaggatgggtggtgtcctcagagtcttgcagctttttatccatcggtgccagatattgccatgaagtcaaacccggagaaattgtagaaatatccagacatggtatcagaactcttgatataattccaaggtctaacggagacccagtggctttttgtatttttgaatatgtttattttgcaagaccagatagtatgtttgaagaccaaatggtttatacagtaaggtaccggtgtggtcagcagctggcaattgaagcacccgtggaggcggacttggttagcacagttccagagtctgctacgcctgcagcgctgggatatgcaacaaagtgtgggctgccttatgtggaagtgctgtgtaagaaccggtatgtaggaagaaccttcattcacccaacactgaggttaagacaactcggtgtcgcaaagaagtttggcgtgtcgtctgacaactttaaaggcaaaagaatcgttctcatagatgattcgattgtgaggggcaatactatctcacccatcataaaactcctcaaagaatccggtgcaaaagaggtgcacattcgagtcgcttcaccaccaataaaatatccgtgcttcatgggaataaacattcctacaaaagaagagctcatagccaataagccagaatttgattgtcttgcagagtacctcggagcaaacagcgttgtgtatctgtcagtggaaggactggtttcatctgtgcaacaagaaataaaatttaagaagcagaaagtgaaaaaacatgatattgcaattcaagaaaatggaaatggtttggaatattttgaaaagacgggacactgtacagcttgcctcactgggcagtaccctgtggagctggaatggtag

SEQ ID NO: 30532 - protein, 517 aa, Mus musculus
MELEELGIREECGVFGCIASGDWPTQLDVPHVITLGLVGLQHRGQESAGIVTSDGSAVPKFRVHKGMGLVNHVFTEDNLKKLYDSNLGIGHTRYATTGKCELENCQPFVVETLHGKIAVAHNGELVNAARLRKKLLRQGIGLSTSSDSEMITQLLAYTPPQEKDDAPDWVARIKNLMKEAPAAYSLVIMHRDFIYAVRDPYGNRPLCIGRLMPVSDVNDKEKKSSETEGWVVSSESCSFLSIGARYCHEVKPGEIVEISRHGIRTLDIIPRSNGDPVAFCIFEYVYFARPDSMFEDQMVYTVRYRCGQQLAIEAPVEADLVSTVPESATPAALGYATKCGLPYVEVLCKNRYVGRTFIHPTLRLRQLGVAKKFGVSSDNFKGKRIVLIDDSIVRGNTISPIIKLLKESGAKEVHIRVASPPIKYPCFMGINIPTKEELIANKPEFDCLAEYLGANSVVYLSVEGLVSSVQQEIKFKKQKVKKHDIAIQENGNGLEYFEKTGHCTACLTGQYPVELEW

SEQ ID NO: 30533 - DNA, 1554 bp, Homo sapiens
  CDS (1)..(1554)
atggagctggaggagttggggatccgagaggaatgtggcgtgttcgggtgcatcgcctcaggagagtggcccacgcagctggatgtaccgcatgtgatcactctgggactcgtggggctgcagcaccggggtcaggagagtgctggtattgtgactagtgatgggagttccgtgccaacattcaaatcacacaagggaatgggtcttgtaaatcacgtctttactgaagacaatttgaaaaaattatatgtttcaaatcttggaattggacacaccaggtatgccaccacaggaaaatgtgaactagaaaattgtcagcccttcgttgttgaaacacttcatgggaagatagctgtggcacataatggcgaattggtaaatgctgctcgattaaggaaaaagcttctgcgtcatggtattggtctgtctacaagttctgatagtgaaatgattacccagttactggcgtatacccctcctcaggaacaagatgacaccccagactgggtagccaggattaaaaacttgatgaaggaagcacccacagcatactccctgcttataatgcacagagatgttatttatgcagtacgagatccttatggaaatcgtcccttatgcattggtcgtcttattccagtgtctgatataaatgacaaagagaaaaaaacatcagaaacagaaggatgggtggtgtcttcagaatcttgtagcttcttatctgttggtgcaagatattaccgtgaagtcttgcctggagaaattgtggaaatatccagacacaatgtccaaactcttgatattatatcaaggtctgaaggaaacccagtggctttttgtatctttgaatatgtttattttgcaagaccagacagtatgttcgaagaccaaatggtttatacagtaagataccgttgtggccagcagctagcgattgaagcacctgtggatgcagatttggttagcactgttccagaatctgctacgcctgctgctcttgcttacgcaggaaagtgtggacttccatatgtggaggtgctgtgtaaaaaccggtatgtagggagaaccttcattcagccaaacatgaggttaagacaacttggtgttgcaaaaaaatttggagtattgtcagacaactttaaaggcaaaagaattgttcttgtagatgattcaattgtcagaggcaataccatctcacctataataaaactgctcaaagaatctggtgcaaaagaggtacacattcgagtagcttcaccaccaattaaatatccatgcttcatgggaataaacattcctacaaaagaagagctcattgccaataaaccagaatttgatcaccttgcagaatatctaggagcaaacagtgttgtgtatctgtcagtagaaggactggtttcatctgtacaagaagggataaagtttaaaaaacagaaagagaaaaagcacgatattatgatccaagaaaatggaaatggtctggaatgttttgaaaagagtggtcattgtacagcttgtctcactggaaaatatcctgtagaattagaatggtag

SEQ ID NO: 30534 - protein, 517 aa, Homo sapiens
MELEELGIREECGVFGCIASGEWPTQLDVPHVITLGLVGLQHRGQESAGIVTSDGSSVPTFKSHKGMGLVNHVFTEDNLKKLYVSNLGIGHTRYATTGKCELENCQPFVVETLHGKIAVAHNGELVNAARLRKKLLRHGIGLSTSSDSEMITQLLAYTPPQEQDDTPDWVARIKNLMKEAPTAYSLLIMHRDVIYAVRDPYGNRPLCIGRLIPVSDINDKEKKTSETEGWVVSSESCSFLSVGARYYREVLPGEIVEISRHNVQTLDIISRSEGNPVAFCIFEYVYFARPDSMFEDQMVYTVRYRCGQQLAIEAPVDADLVSTVPESATPAALAYAGKCGLPYVEVLCKNRYVGRTFIQPNMRLRQLGVAKKFGVLSDNFKGKRIVLVDDSIVRGNTISPIIKLLKESGAKEVHIRVASPPIKYPCFMGINIPTKEELIANKPEFDHLAEYLGANSVVYLSVEGLVSSVQEGIKFKKQKEKKHDIMIQENGNGLECFEKSGHCTACLTGKYPVELEW

SEQ ID NO: 30535 - DNA, 1686 bp, Arabidopsis thaliana
  CDS (1)..(1686)
atggcggccacctgcagcatctcttcttctctatctctcaatgctaaacccaacaagctctctaacaacaacaacaacaataagcctcaccgtttcctccgtaatcccttccttaacccctcctcctcctctttctctcctcttccggcttctatctcctcttcttcttcttctccttcgtttccgctcagagtttcaaaccctcttacccttttggcggcagacaacgatgattatgacgagaagcctcgggaagagtgtggagttgtcggaatctacggtgactcagaagcttcacgactctgttacttagctctccatgcgcttcagcatcgaggtcaagaaggtgcaggtattgttaccgttagtaaagataaggttcttcagaccattacaggtgttggtttggtctctgaggttttcagtgaatccaaactcgatcaattaccaggagacatagccattggtcatgtcaggtactcgactgctggttcttctatgctcaagaacgttcagccgtttgttgctggttatcgatttggctctgttggtgttgctcacaatggcaatttagtgaattacacgaaattgagagctgatttagaggaaaatggttcgattttcaatactagctctgatactgaggttgtgcttcatttgattgccatttctaaagctagaccctttttcatgagaattgttgatgcttgtgagaagcttcaaggtgcttattcgatggtgtttgtgactgaggataagcttgttgctgttcgtgacccacatgggtttaggcctttagttatgggtaggagaagtaatggagctgttgtgtttgcttctgagacttgtgctcttgatttgattgaagctacttatgagagagaggtttatcctggtgaggttttagttgtggataaagatggtgtcaaatgtcagtgtttgatgcctcatcctgagccaaagcaatgcattttcgaacatatttacttctcgttgcctaattcgattgtctttggtcggtctgtgtatgagtctaggcatgtctttggtgagattttagctactgagtcacctgttgattgtgatgtggtgatcgctgtgcctgactcgggtgttgtggctgctcttggttacgcggctaaagctggtgtagcgtttcagcaaggtttgattaggtctcattatgttggaaggactttcattgagccgtctcagaaaatcagagattttggagtgaagctgaagctatcgccagtccgaggagttttagaagggaaaagagttgttgttgttgatgattcgattgttagaggaacaacttcgtccaagattgtgcgtttattgagagaagcgggtgcgaaagaggttcacatgaggatcgcgagtcctcctattattgcatcttgttactacggagtggacacgcctagctcaaatgagttgatatcgaataggatgagtgttgatgaaatcagggattacatcggatgtgattcccttgcgtttttgtcgtttgagacgttaaagaaacatttgggggaagattctagaagcttctgctatgcatgcttcacgggggactatccggtgaagcctacagaggataaggtgaagcgaggaggagattttatcgatgatggtctcgttggaggaatccacaacattgaaggaggttgggtacggtag

SEQ ID NO: 30536 - protein, 561 aa, Arabidopsis thaliana
MAATCSISSSLSLNAKPNKLSNNNNNNKPHRFLRNPFLNPSSSSFSPLPASISSSSSSPSFPLRVSNPLTLLAADNDDYDEKPREECGVVGIYGDSEASRLCYLALHALQHRGQEGAGIVTVSKDKVLQTITGVGLVSEVFSESKLDQLPGDIAIGHVRYSTAGSSMLKNVQPFVAGYRFGSVGVAHNGNLVNYTKLRADLEENGSIFNTSSDTEVVLHLIAISKARPFFMRIVDACEKLQGAYSMVFVTEDKLVAVRDPHGFRPLVMGRRSNGAVVFASETCALDLIEATYEREVYPGEVLVVDKDGVKCQCLMPHPEPKQCIFEHIYFSLPNSIVFGRSVYESRHVFGEILATESPVDCDVVIAVPDSGVVAALGYAAKAGVAFQQGLIRSHYVGRTFIEPSQKIRDFGVKLKLSPVRGVLEGKRVVVVDDSIVRGTTSSKIVRLLREAGAKEVHMRIASPPIIASCYYGVDTPSSNELISNRMSVDEIRDYIGCDSLAFLSFETLKKHLGEDSRSFCYACFTGDYPVKPTEDKVKRGGDFIDDGLVGGIHNIEGGWVR

SEQ ID NO: 30537 - DNA, 1527 bp, Brachydanio rerio
  CDS (1)..(1527)
atggagtttgaggagtcgggcatcggagaggagtgcggggtgttcggatgtgtggcggcgggcgaatggccaacacaactggaggtcgcgcagattctgacacttggacttgttgctttacagcacaggggtcaggaaagtgctggaattgtcacaagtactggaacaaaccccccaacattctccaccctgaagggaatgggtttagtgaatacagcttttaaaccagaggatttgctgaaactgcgctatggtaaccttggcattggacacacacggtactccaccacgggcatctcagagctgcataactgccagccttttgttgtagacaccctgcatggcaagattgcagtggcacacaatggagaactggtcaatgcctccgcactgcgcaagaaggttatgcgccatggtgttggtctgtccacctgttcagacagtgaactcatcacccagctccttgctttgactccacccatggaggaactcgacaatcctgattgggtcgctcgtattaaaaacctcatgacagagacgcctacatcatactcgctgcttgtgatgtataaagatgtgatctatgctgtgagagacccctatggaaacagacctctctgtatcggacgtttagtgccaatctccaaactgcacagctcaggtgctggagaagcagacacagaaggctgggtggtttcatctgagtcctgtagctttcaatctattggagcaaagtattatcgtgaagtaaagcctggagagattgtccagatatcaaaaaatggtgtagagagtctaagtgttgtgccacgaccagaaggagatcttcctgcattttgtatatttgaatatgtttacttcgccaggccagactccatgtttgaaggtcagatggtgtacacagtgaggcagcgctgtgggcgtcagttggccattgaggctcccactgatgctgatgtggtcagcactgttccagaatcagccacgcctgcagcattaggatacgcacaacaatctggccttccgtatgtagaggtgctttgtaaaaaccgatatgtgggtagaaccttcattcaaccaaacactcgcctgcgtcagcttggagtggccaagaagttcggggcattgactgacaactttgctggcaaacgagtggtgctcattgatgattccattgtgaggggaaacactatttcacctattataaaactgctgaaggaagcaggggcaacagaggtccatattcgagttgcatctcctcccatccggttcccatgttacatgggaatcaacattcctaccaaagaagagctaattgcaaacaaaccagagtttaaggatatagctggttatattggtgctacaagtgtgcgctatctgtccgttgaaggcctgttatctgctgttcaaggtgggattgagtcgcatggaaaagacgagaggatcagctccaccactaagaccactagaattggccactgtacagcctgcctcacaggaaaatacccagtggagctggagtggtga

SEQ ID NO: 30538 - protein, 508 aa, Brachydanio rerio
MEFEESGIGEECGVFGCVAAGEWPTQLEVAQILTLGLVALQHRGQESAGIVTSTGTNPPTFSTLKGMGLVNTAFKPEDLLKLRYGNLGIGHTRYSTTGISELHNCQPFVVDTLHGKIAVAHNGELVNASALRKKVMRHGVGLSTCSDSELITQLLALTPPMEELDNPDWVARIKNLMTETPTSYSLLVMYKDVIYAVRDPYGNRPLCIGRLVPISKLHSSGAGEADTEGWVVSSESCSFQSIGAKYYREVKPGEIVQISKNGVESLSVVPRPEGDLPAFCIFEYVYFARPDSMFEGQMVYTVRQRCGRQLAIEAPTDADVVSTVPESATPAALGYAQQSGLPYVEVLCKNRYVGRTFIQPNTRLRQLGVAKKFGALTDNFAGKRVVLIDDSIVRGNTISPIIKLLKEAGATEVHIRVASPPIRFPCYMGINIPTKEELIANKPEFKDIAGYIGATSVRYLSVEGLLSAVQGGIESHGKDERISSTTKTTRIGHCTACLTGKYPVELEW

SEQ ID NO: 30539 - DNA, 1722 bp, Nicotiana tabacum
  CDS (1)..(1722)
atggccgccaccgtctccaccgcctctgccgccgccaccaacaaatctcctctttcacagccccttgacaaacccttttgctccctatctcaaaagctcttatctttatcccctaaaacccatcctaaaccctacagaactctcatcaccgcctcttccaaaaaccccttaaacgacgtcatttcgtttaagaaatcagctgacaataccttggactcctattttgacgatgacgataaaccccgtgaagagtgcggcgttgtgggcatctatggcgactcagaagcttcacgcctttgctatttagcacttcacgcgcttcaacaccgtggccaagaaggcgccggcattgtcgccgttaacgacgacgttcttaagtcaattacaggtgttgggttagtatccgacgtgttcaatgagtcaaagcttgaccaactccctggtgacatggcaattggccacgtaaggtactctactgctggctcttctatgttaaaaaatgttcagccttttgttgctagttataaatttgggtcagttggtgttgcccataatggtaatttagtgaattataagttactgcgtagtgaactagaggaaaatgggtcaatttttaatacaagttctgatactgaggttgtacttcaccttattgctatatctaaagctaggccatttttattgaggattgttgaggcttgtgaaaaaattgaaggtgcttattctatggtgtttgttactgaggataagttggttgccgtaagggatcctcatgggtttaggccattggttatgggtaggagaagtaatggtgctgttgttttcgcgtctgagacgtgtgctttggatttgattgaggctacttatgagagggaggtgaatcctggtgaggttgttgttgtggataaagatggggttcagtctatttgtttgatgcctcatcccgagcgtaaatcttgtatctttgagcatatttactttgctctgcctaattcggtcgtgtttgggaggtctgtgtacgagtctaggcgtgctttcggggagattcttgctactgaagctcccgtggaatgtgatgttgtgatagcagttcctgactcgggtgtcgtggctgcgctcggttatgctgctaaagcaggggtaccgtttcaacaaggtttgattaggtcgcattatgttggtaggacgttcatcgagccatcgcagaagataagggatttcggggtgaagcttaagctgtcgccggttagggcggtgttggagggaaaaagagttgtggtcgtggatgattcgatcgttagaggaacgacctcgtccaagattgtgaggctgttaaaggaggcgggtgcgaaagaggttcatatgaggattgcaagcccaccaattatagcttcttgttattatggagtggatactcctagttcagatgagttgatatcaaataggatgagtgtggaggagattaaggagttcattggatcggattcgcttgcttttctgccaatggatagcttgaataagctcttaggcaatgattctaaaagcttttgctatgcttgcttttcgggcaattacccagtcgagccgacgggtaaggttaaaaggataggggatttcatggatgatggattaagtggagatatggattccattgatggtggatggctaccaggaagtagtagggttcaaaagactatcttgaatgaagttagaaccagctaa

SEQ ID NO: 30540 - protein, 573 aa, Nicotiana tabacum
MAATVSTASAAATNKSPLSQPLDKPFCSLSQKLLSLSPKTHPKPYRTLITASSKNPLNDVISFKKSADNTLDSYFDDDDKPREECGVVGIYGDSEASRLCYLALHALQHRGQEGAGIVAVNDDVLKSITGVGLVSDVFNESKLDQLPGDMAIGHVRYSTAGSSMLKNVQPFVASYKFGSVGVAHNGNLVNYKLLRSELEENGSIFNTSSDTEVVLHLIAISKARPFLLRIVEACEKIEGAYSMVFVTEDKLVAVRDPHGFRPLVMGRRSNGAVVFASETCALDLIEATYEREVNPGEVVVVDKDGVQSICLMPHPERKSCIFEHIYFALPNSVVFGRSVYESRRAFGEILATEAPVECDVVIAVPDSGVVAALGYAAKAGVPFQQGLIRSHYVGRTFIEPSQKIRDFGVKLKLSPVRAVLEGKRVVVVDDSIVRGTTSSKIVRLLKEAGAKEVHMRIASPPIIASCYYGVDTPSSDELISNRMSVEEIKEFIGSDSLAFLPMDSLNKLLGNDSKSFCYACFSGNYPVEPTGKVKRIGDFMDDGLSGDMDSIDGGWLPGSSRVQKTILNEVRTS

SEQ ID NO: 30541 - DNA, 1641 bp, Neurospora crassa
  CDS (1)..(1641)
atgtgtggtattctcgcccttatcctcgcggataccgatgcgtcggacgcctctgccgatttgcacgagagcttgtactatcttcaacaccgtggtcaagatgcctgtggtatcgcgacctgtggttctggaggtagaatctttcagtgcaagggcaatggcatggcctccaaggtctttgacgacggcaagcgcacggtagaccttcccggctacatgggcattgcccatcttcgttacccgactgccggaactagctctagcgccgagagtcagcctttttacgtcaactcgccctacggcatctgcttcgcgcacaacggtaacctcatcaacgctcccgccctgcgcagctatctcgaccaagaggcccatcgtcatgtgaacaccgactcggacagcgagctgatgctcaacgtctttgccaacgccctgaacgagaccggcaaggcccgtgtcaacaccgacgacatcttcagtgccctcaagaagacgtacgagaggtgccaaggtggctgggccgtcactgctatgattgctggcttcggtatcttcgccttccgtgatcaatacggcatccgccccctcattatgggatcgcgtccctccagcaccctcgaaggcggtatcgactacatgttcgcttccgagagcattgctcttcgtcagctgggcttcagcaacttccaggatatcctcccgggacaagccgtgttcatccaaaagaacgggcagcctcaattccaccaggttgttgagcaaaaggcttactcccccgatatcttcgagtacgtttacttcgcccgcccggataccatcatggatggaatctccgtgcaccgcagcaggcagaacatgggcgtgaagcttgccaacaaggtcaaggagatcctcggagaggagggtgtcaaggagattgatgtgatcattcccgtcccggagaccagtaatactgccgctgccgtggtatcagagcagcttcggaaacccttctctaacggtttcgtcaagaaccgttacgtctaccgcaccttcatcttgcccggtcagaaggccaggcaaaagagcgtccggagaaagctcagcgccatggagtccgagttcaaggaccgtgtcgtcctgctcgtggacgactccattgtccgtggcaccaccagtagggagattgtgagcatggctcgtgaggctggtgcccgcaaggttatctttgctagctgtgctcctcccatcatctacccccacatttacggtatcgatctcgcttctccacaggagctcatcgcccacgagaagacaagaagcgacatcgccaagcacatcaatgccgatgatgtcatttaccaggaccttgccgaccttaaggcggcctgtactgaggcctctcctgatcaccagaagatcaccgactttgaagtgggtgtgttctgcggcaaataccagaccgacatccctgaaggttacttcgaccacctgaacgagagccgtggcacgaagcggaaggccgccgttgtgaacggcaccaacaaggtcttggtcgccaatagcggcccggtcaatgtttctacacccgaaccccctgcgctcatggagaaccccgagaacaggcaggatatcagcatccacaacattgccaactcctaa

SEQ ID NO: 30542 - protein, 546 aa, Neurospora crassa
MCGILALILADTDASDASADLHESLYYLQHRGQDACGIATCGSGGRIFQCKGNGMASKVFDDGKRTVDLPGYMGIAHLRYPTAGTSSSAESQPFYVNSPYGICFAHNGNLINAPALRSYLDQEAHRHVNTDSDSELMLNVFANALNETGKARVNTDDIFSALKKTYERCQGGWAVTAMIAGFGIFAFRDQYGIRPLIMGSRPSSTLEGGIDYMFASESIALRQLGFSNFQDILPGQAVFIQKNGQPQFHQVVEQKAYSPDIFEYVYFARPDTIMDGISVHRSRQNMGVKLANKVKEILGEEGVKEIDVIIPVPETSNTAAAVVSEQLRKPFSNGFVKNRYVYRTFILPGQKARQKSVRRKLSAMESEFKDRVVLLVDDSIVRGTTSREIVSMAREAGARKVIFASCAPPIIYPHIYGIDLASPQELIAHEKTRSDIAKHINADDVIYQDLADLKAACTEASPDHQKITDFEVGVFCGKYQTDIPEGYFDHLNESRGTKRKAAVVNGTNKVLVANSGPVNVSTPEPPALMENPENRQDISIHNIANS

SEQ ID NO: 30543 - DNA, 1620 bp, Drosophila virilis
  CDS (1)..(1620)
atggcgcaaagtgaatgtggaaatttctgtggtaagccaaatgccaatcgggcaacggaaacagttgctgccaggaaagtatttcccgataagatctacaaatcggtgcagccaaagggagaccatgtgacgggcatgacctgcgaatgcggtgtatttggcgccattgcctgtggcgattatcctacacagctggacatcgcacaaatgatctgcctgggcctggtggcgctgcagcatcgcggccaggagtcggcgggcattgtgaccagcctgggcaagagctccaagaacttcggcgtgcacaagggcatgggcatgatcaacaacatcttcaacgacaaggccatacgcaagctcaagggcaacctgggcattggccacacacgctactcaacggcagctgcctccgaggtggtcaattgccagccctttgtggtgcacacggcgcacggtgcgctggcgattgcccacaacggcgagctggtcaactgtgagtcgctgcgtcgcgaggtgctcgaacggggcgtcggcctgtccacgcacagcgacagcgaactgattgcccagtcgctgtgctgtgcgccggaggatgtctcggagcacgacggacccaattggccggcacgcatacgccattttatgacgctggcgccgctctcctactcactggtggtcatgcacaaggacaagatctatgctgtgcgcgattcctatggcaatcggccgctctgcctgggcaagattgtgcccttcgatgcgggccatgccaatatcgaggatcagctagccgagggctgggtggtgagcagcgagagctgcggatttctctccataggcgcgcgctacgtgcgcgaagtggagccgggcgagattatcgaactgtcgcgcaacggctaccggaccgtggacattgtggagcggccggactacaagcgcatggccttctgcatcttcgagtatgtttactttgcgcgcagcgactccatgtttgaaggccagatggtctactcggcgcggctgcagtgcggccggcagctggcacgggaatcgccgctggacgcggatctggtcagctctgtgccggagtcaggcactgcggcggcccatggctatgcacgtgagtcgggtctgaactttggcgaggtcctgtgcaagaatcgttatgtgggacgcaccttcatccagccctcgacgcgtttgcgccaactgggcgtggccaagaagtttggcgctctggcccaaaatgtggagggcaagcgcattgtgctcgtcgacgactcgattgtgcgtggcaatacaattggccccattattaagctgctgcgcgatgccggcgccatcgaggtgcacatccgcattgccagcccgccgctgcagtatccctgctacatgggcatcaatatacccacgcgcgaggagctcattgccaacaagctgaacgcaacgcagctggccaaccatgtcggtgccgacagtctggcctacctcagcgtggagggcctgatcaaggcggtgcagatgaacaaaacgcacgtgaatcccatcaagtccggctactgcaccgcctgcctcaccggcgagtatccgggcggtctgcccgaggagctcagctggtag

SEQ ID NO: 30544 - protein, 539 aa, Drosophila virilis
MAQSECGNFCGKPNANRATETVAARKVFPDKIYKSVQPKGDHVTGMTCECGVFGAIACGDYPTQLDIAQMICLGLVALQHRGQESAGIVTSLGKSSKNFGVHKGMGMINNIFNDKAIRKLKGNLGIGHTRYSTAAASEVVNCQPFVVHTAHGALAIAHNGELVNCESLRREVLERGVGLSTHSDSELIAQSLCCAPEDVSEHDGPNWPARIRHFMTLAPLSYSLVVMHKDKIYAVRDSYGNRPLCLGKIVPFDAGHANIEDQLAEGWVVSSESCGFLSIGARYVREVEPGEIIELSRNGYRTVDIVERPDYKRMAFCIFEYVYFARSDSMFEGQMVYSARLQCGRQLARESPLDADLVSSVPESGTAAAHGYARESGLNFGEVLCKNRYVGRTFIQPSTRLRQLGVAKKFGALAQNVEGKRIVLVDDSIVRGNTIGPIIKLLRDAGAIEVHIRIASPPLQYPCYMGINIPTREELIANKLNATQLANHVGADSLAYLSVEGLIKAVQMNKTHVNPIKSGYCTACLTGEYPGGLPEELSW

SEQ ID NO: 30545 - DNA, 1635 bp, Drosophila virilis
  CDS (1)..(1635)
atgtcaagcagcagcagcagcagcaacaattcgcagcagcagccgcagcagcagcagcagcaacatgtgcgcattgagagccgcgatcaacaggtggaggccgagttgcccacgccgttgaccattgctgaaagtaaggagctaaccggtttgacgcatgagtgcggcgtttttggtgcgattgcctgcggcgactggccaacccagattgatattgctcacgtgatctgcttgggtctggtggcattgcagcaccgtgggcaggagtcggcgggcattgcgaccagcgagggcaagtgttccaagaacttcaatgtgcacaagggcatgggcatgatcagcaccctgttcaacgacgattcgatgaagaagctgcgtggcaatctgggcattgggcatacacgctactccacggccggcgcctcggaggtggtcaattgccagccgtttgtggtgcacacggcgcatggcgccatggcgctggcccacaacggcgagctggtcaacaatgaatctctgcgtcgcgaggtgctgggccgcggcgtcggcctgtccacgcacagcgacagcgagctgatagctcagtcgctttgctgtgcaccggagggcgtctccgagcacgatggacccaactggccggcgcgcattcggcatttcatgatgctggcgccattgtcctattcgctggtcatcatgctcacggataagatctacgctgtgcgcgatacgtacggcaaccgaccgctgtgcattggcaaaatcgtgcccatcaacacgggccatgcgggccacagcacggagacacctgctgatggctgggtggtgtccagcgagagctgcggcttcttgtccattggtgcgcgctatgtgcgcgaagtggagccgggcgagattgtcgagctgacacgcaatggctatcgcaccgttgacattgtggagcgtccggacttcaagcgcatggccttctgcatctttgagtatgtgtactttgcccgcggcgacagcatcttcgaggatcagatggtgtactcagtgcgcttggagtgcggtcgccagctgtggcgcgaggcacccgttgaagcagacattgtcagctcagtgccagagtcgggcacggccgcagcgcatggctatgcgcgcgagtcgaacctcgagttcgccgaggttctgtgccggaatcgttatgtgggacgcacctttatacagccctcgacacggctgcgccaactgggcgtggccaagaagttcggcgcactgtccgagaacgtggccggcaagcggctggtgctcatcgacgattcgattgtgcgcggcaacacaatcggaccaataatcaagctgctgcgcgacgctggggcccgcgaggtgcacatacgcatcgccagccccccgctgcagtatccctgctacatgggcatcaatatacccacgcgcgaggagctgatcgccaacaagctgaacgccaagcaactggcccgtcatgtgggcgccgacagtctggcatatctgagtgtcgccggcctggtacagacggtgcagcgcaagcatgtggcatctggcaaggcgacgggtcattgcaccgcctgtctgacgggcgaatatcctggcggactgccggacgagctaagctggtag

SEQ ID NO: 30546 - protein, 544 aa, Drosophila virilis
MSSSSSSSNNSQQQPQQQQQQHVRIESRDQQVEAELPTPLTIAESKELTGLTHECGVFGAIACGDWPTQIDIAHVICLGLVALQHRGQESAGIATSEGKCSKNFNVHKGMGMISTLFNDDSMKKLRGNLGIGHTRYSTAGASEVVNCQPFVVHTAHGAMALAHNGELVNNESLRREVLGRGVGLSTHSDSELIAQSLCCAPEGVSEHDGPNWPARIRHFMMLAPLSYSLVIMLTDKIYAVRDTYGNRPLCIGKIVPINTGHAGHSTETPADGWVVSSESCGFLSIGARYVREVEPGEIVELTRNGYRTVDIVERPDFKRMAFCIFEYVYFARGDSIFEDQMVYSVRLECGRQLWREAPVEADIVSSVPESGTAAAHGYARESNLEFAEVLCRNRYVGRTFIQPSTRLRQLGVAKKFGALSENVAGKRLVLIDDSIVRGNTIGPIIKLLRDAGAREVHIRIASPPLQYPCYMGINIPTREELIANKLNAKQLARHVGADSLAYLSVAGLVQTVQRKHVASGKATGHCTACLTGEYPGGLPDELSW

SEQ ID NO: 30547 - DNA, 1470 bp, Thermoplasma volcanium
  CDS (1)..(1470): transl_table=11
gtggacaccacacctataacgtcaggactaagaggtgctcccactgtggattcccggccccaaggatcagatcctataaatgggcaaaagccaagtgaagattgcgcagttgtggggttcaaggggaagataaacgcctataaccccataataactgcacttcgaacattgcaacatagaggccaggaatcggctggtatggctgtttttgacggcaagaaggtaacgttgaaaaaaggaagtggcctagtaacagatgtttttaatcctgcaaccgacgatattaaaggttacgtgggagtaggccatacacgttattcaactgctggatcaaaaaatgtggttaatgctgggccatttgtaatgaactcttctttcggttacataaccatatcccacaacggtgagatagtaaacgctgatgaattgcgtgattccatgaaaaaagaagggatcacgttccagagcgattcagatacagaggttatgctggcagagctttcgagaaatatctcaaagtatggcctaaaaagaggattcgaacagtccatggagagcctaaggggagcttatgcatgcgcaataagcataaatgatcgcctctacgccgtaagggacccaaatgggataaggcctctggttatagggaagaataacgacggatacatagtagcttcagaaagctgcgcaatagatgctctcgaaggcacgttaataaaaaacatcgaaccaggggaagtagttgagatatctgacgaaggcataagaacaattgtaagcaaatctgcaaatcgaatagcccactgcatgtttgagtatgtatatttctcaaggccggatagcgttatagacggcataaacgtttatgccgccagggtaaacatgggcagaatacttgctaaggagagcccagttgaagctgacatagtcgtccctgttccagattcagggcgttctcaagcaataggttattccatggaatctggaatgccttacacagaggggctgattaagaataggtattcggagaggaccttcataatgcctactcagagcgataggaaggccgcgatacatttgaagctaaatcctatacgcgaagtgatagggggaaagaaggtagtgcttgtagatgatagcatagtccgtggaaacactatgaggttcatcgtcggcctaatgaggaaatatggcgcaaaggagatacatgtcagaattggatcgccgcatataatcgcaccatgctattttggtgtcgacatgaagacgaaggatcaattcatagcgcgcggtaaaaccgatgaggagataaacagagaaatcggggccgattcactcgcgtttctttcagttgacggcctcaaacaggcgatatctatgaaaaacaataacctgtgccttgggtgcctcacaggagaatatcctatagatatatcaaagaaactcgcagaaaatattacttcttactag

SEQ ID NO: 30548 - protein, 489 aa, Thermoplasma volcanium
MDTTPITSGLRGAPTVDSRPQGSDPINGQKPSEDCAVVGFKGKINAYNPIITALRTLQHRGQESAGMAVFDGKKVTLKKGSGLVTDVFNPATDDIKGYVGVGHTRYSTAGSKNVVNAGPFVMNSSFGYITISHNGEIVNADELRDSMKKEGITFQSDSDTEVMLAELSRNISKYGLKRGFEQSMESLRGAYACAISINDRLYAVRDPNGIRPLVIGKNNDGYIVASESCAIDALEGTLIKNIEPGEVVEISDEGIRTIVSKSANRIAHCMFEYVYFSRPDSVIDGINVYAARVNMGRILAKESPVEADIVVPVPDSGRSQAIGYSMESGMPYTEGLIKNRYSERTFIMPTQSDRKAAIHLKLNPIREVIGGKKVVLVDDSIVRGNTMRFIVGLMRKYGAKEIHVRIGSPHIIAPCYFGVDMKTKDQFIARGKTDEEINREIGADSLAFLSVDGLKQAISMKNNNLCLGCLTGEYPIDISKKLAENITSY

SEQ ID NO: 30549 - DNA, 1536 bp, Mycobacterium smegmatis
  CDS (1)..(1536): transl_table=11
gtgatcggccacgacgacaacgagtccgaaaatgaaccccgtgaggaatgtggcgtcttcggcgtctgggccccgggcgaagaagttgccaagctgacctactacggcctctacgccctgcagcaccgcgggcaggaagccgcgggtatcgcggtcgccgatggctcccaggtgctggtcttcaaggatctgggcctggtcagtcaggtgttcgacgagcagaccctggccgcgatgccgggtcacgtcgccgtcggccactgccggtactccaccaccgggtccacgacctgggagaacgcgcaacccgtgttccgcaacaccgcggcaggcaccggcgtcgccctcggacacaacggaaacctcgtcaacacggccgaactcgccgcccgtgcccgcgacaacggcctgatcgaactcaagggtggcccggcggccaccaccgactccgacatcctcggtgcgctgctcgcgcacggcgccgccgacgcgacgctcgagcaggccgcgctcgaactgctgccgaccgtccgcggcgcgttctgcctgacgttcatggacgagaacacgctgtacgccgcgcgcgacccgcacggtgtgcggccgctgtcgctgggccggctggaccgtggctgggtggtcgcgtcggagaccgcggcgctcgacatcgtcggcgcctcgttcgtccgcgacatcgaacccggcgaactgctcgcgatcgacgccgacggcgtgcgctccacgcggttcgcgaaccccgagcccaaggggtgcgtcttcgaatacgtctacctggcccgccccgacagcacattggtcggccgctcggtgcacgccacccgcgtcgacatcggccgccgcctggcccgcgaacatcccgtcgaggccgatctggtgatcggtgtcccggaatcgggcacgcccgccgcggtggggtacgcgcaggaatcgggcatcccgttcgggcagggcctgatgaagaacgcctacgtgggccgcaccttcatccagccgtcgcagacgatccgtcagctgggcatccggctcaagctcaacccgctgcgcgaggtgatccgcggcaagcggctgatcgtggtcgacgactcgatcgtgcgcggcaacacccagcgcgccctcgtgcggatgctgcgcgaggccggggccctcgaggtgcacgtgcgcatcgcgtccccgcccgtcaggtggccgtgtttctacggcatcgatttcgccaccccggccgaactgatcgccaacgcggcctcgcaggaacacgaaggcgagatgctcgaagcggtccgccacgcgatcggcgccgacagcctcggctacatctcccagcagggcatgatcgcggccaccgagcagcccgcgtcgcggttgtgctcggcgtgcttcgacggcaagtacccgatcgagctgcccggcgagaccgccctgggcaagaacgtcatcgagcacatgctcgcctcggcggcccgcagcggcatccccgtggcgcagaacgacaacgcctcggcgttgcgcaggccctga

SEQ ID NO: 30550 - protein, 511 aa, Mycobacterium smegmatis
MIGHDDNESENEPREECGVFGVWAPGEEVAKLTYYGLYALQHRGQEAAGIAVADGSQVLVFKDLGLVSQVFDEQTLAAMPGHVAVGHCRYSTTGSTTWENAQPVFRNTAAGTGVALGHNGNLVNTAELAARARDNGLIELKGGPAATTDSDILGALLAHGAADATLEQAALELLPTVRGAFCLTFMDENTLYAARDPHGVRPLSLGRLDRGWVVASETAALDIVGASFVRDIEPGELLAIDADGVRSTRFANPEPKGCVFEYVYLARPDSTLVGRSVHATRVDIGRRLAREHPVEADLVIGVPESGTPAAVGYAQESGIPFGQGLMKNAYVGRTFIQPSQTIRQLGIRLKLNPLREVIRGKRLIVVDDSIVRGNTQRALVRMLREAGALEVHVRIASPPVRWPCFYGIDFATPAELIANAASQEHEGEMLEAVRHAIGADSLGYISQQGMIAATEQPASRLCSACFDGKYPIELPGETALGKNVIEHMLASAARSGIPVAQNDNASALRRP

SEQ ID NO: 30551 - DNA, 1527 bp, Zymomonas mobilis
  CDS (1)..(1527): transl_table=11
atgtcgcctagcctttcgagcgaactcttttccgactctatctctaccctgacgacgacaactgaatctttagataatggggcgtctgatgatacccttcatgaagaatgtggtgttttcggtatttggggcgcagatacagccgctgccgtcgtagctctcggactacatgctttacagcatcgcggacaggaagccgccggtatcaccagctgggatgggaaaaatttccactcccgtcgtgctgttggtcacgttgcgggtaactttgaccgtgacgatgctatccgcagcttgcccggatcatgtgctattggccatgtccgctatgcaaccaccggtgccagcaccttgtgcaatgttcagccgctttatgccgaactggtttcgggcggatttgcgattgctcataacggcaatatttccaatgccgaaactttgcgccatcagttggtgcgtcatggatctatctttcaatccacgtcggatactgaaacgattatccatctggttgcgacctcaagctatcgcagcctgttagaccgattcattgatgctttaaaacaggttgagggcgcttattctctcgtctgcctgacgccggaaggcatgattgcctgtggtgatccgctgggtattcgcccgctggttctcggtaaagtcggggaaacttttgttgtcgcttccgaaacggttgctctcgatattattggcggaacctatatccgtcaggtcgaaccgggtgagctgattattatttcggaaaaagggctgcaatctattcatccctttaaaaagcagaagcctcgcccctgcattttcgagcatgtctatttttcgagaccggattctttgatcggtagcacctcggtttattctgttcggaaatctatcgggatcgaattggcgcgcgaaaatccggttgatgccgatatggttattcctgtgccagattcagggacacctgccgctatcggttatgcccagcaatcttctttgccgtttgaattgggtattatccgttcccattatgttggacgcacctttattcagccgggcgaccaagtccgtcatttgggcgtgaagctgaagcataatgccaaccgtgccttgattaaaggcaagaagttggttctagttgatgactctattgtcagaggcacgaccagcgtcaaaatcatcagaatgcttcgggatgcgggtgccaaggaaatccatttgcggattgccagcccaccgacccgtcatagctgtttttatggtgtagatacgccggagcgggcaaaattgttggcggctaaaatgaccgtcgaacagatggcagaatatatcggcgctgatagtttagcttttatttcgatggatggcctttatcgtgcggtcggtgaagaggctcgcaatgatgctcagccgcaatattgtgatgcttgctttacaggtgcctatgccacgcccctaaccgatcttggcgaattgggtgctagcgaacaactggttcgtttatccgaacaggtggctatcgcctaa

SEQ ID NO: 30552 - protein, 508 aa, Zymomonas mobilis
MSPSLSSELFSDSISTLTTTTESLDNGASDDTLHEECGVFGIWGADTAAAVVALGLHALQHRGQEAAGITSWDGKNFHSRRAVGHVAGNFDRDDAIRSLPGSCAIGHVRYATTGASTLCNVQPLYAELVSGGFAIAHNGNISNAETLRHQLVRHGSIFQSTSDTETIIHLVATSSYRSLLDRFIDALKQVEGAYSLVCLTPEGMIACGDPLGIRPLVLGKVGETFVVASETVALDIIGGTYIRQVEPGELIIISEKGLQSIHPFKKQKPRPCIFEHVYFSRPDSLIGSTSVYSVRKSIGIELARENPVDADMVIPVPDSGTPAAIGYAQQSSLPFELGIIRSHYVGRTFIQPGDQVRHLGVKLKHNANRALIKGKKLVLVDDSIVRGTTSVKIIRMLRDAGAKEIHLRIASPPTRHSCFYGVDTPERAKLLAAKMTVEQMAEYIGADSLAFISMDGLYRAVGEEARNDAQPQYCDACFTGAYATPLTDLGELGASEQLVRLSEQVAIA

SEQ ID NO: 30553 - DNA, 1473 bp, Corynebacterium ammoniagenes
  CDS (1)..(1473): transl_table=11
gtgaatttagatgaccaaggcgagcaagaaccccgcgaagagtgcggtgtctttggcgtctgggctcctggtgaagatgttgcgacactgacctactttggtctgttcgcattgcagcatcgtgggcaggaagctgcaggtatcggcgtcggtgatggagaccgcctcgttgtcttcaaagacatgggcttggtctcgaatattttcgatgagtccattttaaattccctccatggctccgtgggcgtggggcatacgcgctactcgactgccggtggcaaagagtggtcgaatgtccagccgatgtttaataccacctcaaatggggtagacatcgctttgtgccacaacggcaacttggtgaactaccaagaactgcgcgatgaagcagtagctctgggactttaccgagagaatgaaaaatccctgtcggattccatgatcatgacagctttgctggcgcacggagtcggggaaggcaactctgtctttgacgccgctaagcaactgctgccaagcatcaaaggcgctttttgcttgacctttaccgatggcaagaccttgtacgccgcgcgtgacccgcacggtgtacgccccttggtcattggccgcttggcgcaaggctgggttgttgcttccgaaacctgtgcgctggatatcgtgggcgcacagtttatccgtgaggtagagcccggtgaacttatctctgtcaatgaggcaggaatccacagcgaaaaattcgctgagccgaagcgccagggctgcgtctttgaatacgtctacttggcacgtccagacaccgtgatcaaaggccgcaacgttcacgcgacgcgcgtggatattggtcgcgcacttgcgaaatctcaccctgcgccagaagctgacatggtcatccccgtgccagaatccggaaacccggcagctgttggctacgcccgggaatcgggcctgacatttgcgcacggcttggtcaaaaacgcctacgtgggtcgaaccttcattcagcccacccagaccttgcgccagctgggtattcgcctcaagctcaaccccctgcgcgaggtcatcgagggcaagtcactcgttgttgtagatgactctattgtccgcggcaacacccaacgcgcgctggtgcgcatgctgcgtgaagcaggcgctgctgaagtgcacgtgcgcattgcttcaccgccagtcaaatggccttgtttctacggcattgacttcgcctcgcctggtgaattgattgctaatatcaagccttctgatgatcctcaggtagtaaccgatgcagtgtgcgaagctatcggagcagactctttagggtttgtatctgtagatgagatggttgaggcaacgcaccaacctatcaattccttgtgtaccgcttgctttgatggcaactacgaactcggacttccgaccgctaaccccaatgctgacgctgtgcgaactttgctcagccaaaagaactga

SEQ ID NO: 30554 - protein, 490 aa, Corynebacterium ammoniagenes
MNLDDQGEQEPREECGVFGVWAPGEDVATLTYFGLFALQHRGQEAAGIGVGDGDRLVVFKDMGLVSNIFDESILNSLHGSVGVGHTRYSTAGGKEWSNVQPMFNTTSNGVDIALCHNGNLVNYQELRDEAVALGLYRENEKSLSDSMIMTALLAHGVGEGNSVFDAAKQLLPSIKGAFCLTFTDGKTLYAARDPHGVRPLVIGRLAQGWVVASETCALDIVGAQFIREVEPGELISVNEAGIHSEKFAEPKRQGCVFEYVYLARPDTVIKGRNVHATRVDIGRALAKSHPAPEADMVIPVPESGNPAAVGYARESGLTFAHGLVKNAYVGRTFIQPTQTLRQLGIRLKLNPLREVIEGKSLVVVDDSIVRGNTQRALVRMLREAGAAEVHVRIASPPVKWPCFYGIDFASPGELIANIKPSDDPQVVTDAVCEAIGADSLGFVSVDEMVEATHQPINSLCTACFDGNYELGLPTANPNADAVRTLLSQKN

SEQ ID NO: 30555 - DNA, 1521 bp, Lactococcus lactis
  CDS (1)..(1521): transl_table=11
atgtctgatgaaatgacaagcgcaacatttactgaacaagagtggtcgcattttgagaaaaaaagtttgaatcaaactgaagccgatgagctccgcgactggtcgcggtttgaagcgaagacattaaatgaagaatgtggacttttcggcgtttggggacatcctgatgccgctcgtctaacctattttggtcttcacgctttgcaacatcgcgggcaagaaggcgcaggaattctggtcaataacaacggcaagctcaatcgtcatcgtggtttaggtttggtcaccgaagtttttcgtcacgaaaaagatttggaagaactgacaggttcatctgccattggtcatgtccgctatgcgacggctggctcggcaaatattaataatattcagccattccagtttgaatttcatgacggatcacttggacttgcccacaatggaaatttaactaacgctcaatccttgcgctgtgaacttgaaaaatctggagcaatattttctagtaattcagacacagaaatcctcatgcacttgattcgccgtagtcatcatccagaatttatgggcagagtcaaagaagcacttaatacggtcaaaggtggctttgcctatcttattatgactgaaaattcaattgtcgcagctcttgaccctaatggatttcggccactttcaatcggtaaaatgagcaacggtgcgcttgtcgtggcctcagaaacttgtgctttcgatgttgttggcgccacttggattcaagatgttcaacccggtgaaatcattgaaattaatgacgacggcattcatgtggaccaatttactgacagcaccaacatgactatttgttcaatggaatacatctatttcgctcgtcctgacagcaatatcgctggagttaatgttcatactgccagaaaacgttcaggaaaaattttagcccaagaagccaaaattgacgctgatattgtcattggtgtccctaattcatcactcagtgccgcttcaggctacgctgaagaatcgggcttgccttacgaaatggggctgattaaaaatcaatatgtggcaagaactttcattcaaccgactcaagaacttcgtgaacaaggcgttcgcatgaaattgagtgctgttcgaggtgttgtagaaggaaaacgtgtcatcatggttgatgacagcattgtgcgtggaacgaccagccgtcgcattgtcaaactcctcaaagatgcaggcgcagccgaggttcatgtggcaatcgccagtcccgctctcaaatatccttgcttttacggcattgacatccaagatcgtgacgaactcatcgcagccacacacacgactgatgaaatcagagaagctatcggagcggatagtctgacctatctcagccagtcagggcttgtcgaggcgatcggtcacgataaactttgcttgtcatattttgacggcgaatatccaacaccgctttatgattatgaagcagactatttggaatctttggcaaaaaatggtctgaaataa

SEQ ID NO: 30556 - protein, 506 aa, Lactococcus lactis
MSDEMTSATFTEQEWSHFEKKSLNQTEADELRDWSRFEAKTLNEECGLFGVWGHPDAARLTYFGLHALQHRGQEGAGILVNNNGKLNRHRGLGLVTEVFRHEKDLEELTGSSAIGHVRYATAGSANINNIQPFQFEFHDGSLGLAHNGNLTNAQSLRCELEKSGAIFSSNSDTEILMHLIRRSHHPEFMGRVKEALNTVKGGFAYLIMTENSIVAALDPNGFRPLSIGKMSNGALVVASETCAFDVVGATWIQDVQPGEIIEINDDGIHVDQFTDSTNMTICSMEYIYFARPDSNIAGVNVHTARKRSGKILAQEAKIDADIVIGVPNSSLSAASGYAEESGLPYEMGLIKNQYVARTFIQPTQELREQGVRMKLSAVRGVVEGKRVIMVDDSIVRGTTSRRIVKLLKDAGAAEVHVAIASPALKYPCFYGIDIQDRDELIAATHTTDEIREAIGADSLTYLSQSGLVEAIGHDKLCLSYFDGEYPTPLYDYEADYLESLAKNGLK

SEQ ID NO: 30557 - DNA, 1374 bp, Archaeoglobus fulgidus; identical to SEQ ID NO: 30165
  CDS (1)..(1374)

SEQ ID NO: 30558 - protein, 457 aa, Archaeoglobus fulgidus; identical to SEQ ID NO: 30166

SEQ ID NO: 30559 - DNA, 1431 bp, Bacillus subtilis
  CDS (1)..(1431): transl_table=11
atgcttgctgaaatcaaaggcttaaatgaagaatgcggcgtttttgggatttggggacatgaagaagccccgcaaatcacgtattacggtctccacagccttcagcaccgaggacaggagggtgctggcatcgtagcgactgacggtgaaaagctgacggctcacaaaggccaaggtctgatcactgaagtatttcaaaacggcgaactcagcaaagtaaagggaaaaggcgctatcgggcacgttcggtacgcaacggctggaggcggcggatacgaaaatgttcagccgctcctcttccgttcccaaaacaacggcagcctggcgcttgctcataacggaaatcttgtcaacgccactcagctgaagcagcagctcgaaaatcaagggagcatctttcaaacctcttcggatacagaggttttggctcacctgatcaaaagaagcggacacttcacgctgaaggatcaaattaaaaactcgctttctatgctgaaaggcgcctacgcgttcctgatcatgaccgaaacagaaatgattgtcgcacttgatccaaacgggctgagaccgctatccatcggcatgatgggcgacgcttatgtggtcgcatcagaaacatgcgcatttgacgtcgtcggcgcaacgtaccttcgcgaggtagagccgggagaaatgctgatcattaatgatgaaggcatgaaatcagagcgtttttccatgaatatcaatcgttccatttgcagcatggagtacatttatttctccagaccagacagcaatattgacggtattaatgtgcacagtgcccgtaaaaaccttgggaaaatgctggctcaggaatccgcagttgaagctgacgtcgtaaccggggttccggattccagtatttcagcggcgatcggctatgcagaggcaacaggcattccgtatgagcttggcttaatcaaaaaccgttatgttggcagaacgtttattcagccgtcccaggctctgcgtgagcaaggcgtcagaatgaagctgtctgcggtgcgcggggttgtagaaggcaaacgcgtcgtgatggtggatgactctatcgtgcgaggaacaactagccgccggattgtcacgatgctaagagaggcgggtgcgacagaggtgcatgtgaaaatcagttcaccgccgatcgctcatccgtgcttttacggcattgacacttccacacatgaagaactgatcgcgtcttcgcattctgtcggagaaatccgtcaggaaatcggagccgataccctctcatttttgagtgtggaagggctgctgaaaggcatcggcagaaaatacgatgactcgaattgcggacagtgtctcgcttgctttacaggaaaatatccgactgaaatttaccaggatacagtgcttcctcacgtaaaagaagcagtattaaccaaataa

SEQ ID NO: 30560 - protein, 476 aa, Bacillus subtilis
MLAEIKGLNEECGVFGIWGHEEAPQITYYGLHSLQHRGQEGAGIVATDGEKLTAHKGQGLITEVFQNGELSKVKGKGAIGHVRYATAGGGGYENVQPLLFRSQNNGSLALAHNGNLVNATQLKQQLENQGSIFQTSSDTEVLAHLIKRSGHFTLKDQIKNSLSMLKGAYAFLIMTETEMIVALDPNGLRPLSIGMMGDAYVVASETCAFDVVGATYLREVEPGEMLIINDEGMKSERFSMNINRSICSMEYIYFSRPDSNIDGINVHSARKNLGKMLAQESAVEADVVTGVPDSSISAAIGYAEATGIPYELGLIKNRYVGRTFIQPSQALREQGVRMKLSAVRGVVEGKRVVMVDDSIVRGTTSRRIVTMLREAGATEVHVKISSPPIAHPCFYGIDTSTHEELIASSHSVGEIRQEIGADTLSFLSVEGLLKGIGRKYDDSNCGQCLACFTGKYPTEIYQDTVLPHVKEAVLTK

SEQ ID NO: 30561 - DNA, 1533 bp, Gallus gallus
  CDS (1)..(1533)
atggagctggaggagctgggcatccgcgaagagtgcggcgtgttcggctgcatcgccgccggcgtgtggcccaccgagctggacgtgccccatgtgatcacgctggggctcgtggggctgcagcacaggggccaggagagtgctggaattgtgacaagtgatggagagtcatcccaggcattcaaagtgcacaagggaatgggtcttataaatcacgtgttcaatgcagacagcctgaagaagctgtatgtttcaaaccttggtatcgggcacaccaggtactctacctcggggatctctgagctgcagaactgccagcctttcgttgtagaaactcttcatggaaagatagctgtggcacacaatggggaactaacaaacgctgtacgactgaggaggaagcttatgcggcatggtgtaggattgtcaaccagttctgacagtgaattgatcacccagctgctggctttcacacctcctctagaaaatgacgacactgctgactgggtagcaagaattaaaaatttaatgaacgaaactccaacttcatactcattgctaattatgcacaaagacataatctatgcagtacgtgatccatatgggaatcgcccactctgcattggtcgccttattccagtaggggacataaatggaaaaggaaaagataacagtgagacagaaggatgggtggtctcttctgaatcctgtagctttttatctattggtgccgagtactatcgtgaggtacttcctggagagattgtgaaaatatccaggtatgatgtccaaacattggatgttgtaccaagaccagaaggagatccatcagcattctgcatcttcgaatatgtttattttgcaagaccagacagtatctttgaaggtcaaatggtgtattcagtcaggaggagatgtggccagcaacttgctattgaagcacctgtggaggcagacctggtcagcactgttccagagtctgcaaccccagcagctctgggttacgctcaaaagtgtggactgccatacgttgaagtactctgtaaaaatcgctatgtaggaagaacttttatccagccaaatatgaggttacggcaacttggtgttgcaaagaagtttggtgttctatctgacaattttaaaggcaaacgagttgttatcattgatgattcaattgtgaggggcaatactatttctcccataataaaactactaagggaatcaggagctaaagaggtgcatattcgtgtggcttcacctcccataagatttccatgttatatgggaataaacattccaacaaaagaagaacttattgccaacagacccgaatttcatgatcttgcgaactatataggggccgacagtgttgtttatctttctgtggaagggctcgtatcgtctgtgcaagaaagcatcaaagcaagaaaagagaacgagaacagccttaagacccagaaatcgcgtgttggaaagattggtcattgcacagcatgtctcactggagattatcctgtagagctagaatggtga

SEQ ID NO: 30562 - protein, 510 aa, Gallus gallus
MELEELGIREECGVFGCIAAGVWPTELDVPHVITLGLVGLQHRGQESAGIVTSDGESSQAFKVHKGMGLINHVFNADSLKKLYVSNLGIGHTRYSTSGISELQNCQPFVVETLHGKIAVAHNGELTNAVRLRRKLMRHGVGLSTSSDSELITQLLAFTPPLENDDTADWVARIKNLMNETPTSYSLLIMHKDIIYAVRDPYGNRPLCIGRLIPVGDINGKGKDNSETEGWVVSSESCSFLSIGAEYYREVLPGEIVKISRYDVQTLDVVPRPEGDPSAFCIFEYVYFARPDSIFEGQMVYSVRRRCGQQLAIEAPVEADLVSTVPESATPAALGYAQKCGLPYVEVLCKNRYVGRTFIQPNMRLRQLGVAKKFGVLSDNFKGKRVVIIDDSIVRGNTISPIIKLLRESGAKEVHIRVASPPIRFPCYMGINIPTKEELIANRPEFHDLANYIGADSVVYLSVEGLVSSVQESIKARKENENSLKTQKSRVGKIGHCTACLTGDYPVELEW

SEQ ID NO: 30563 - DNA, 1641 bp, Drosophila melanogaster
  CDS (1)..(1641)
atgtcagcgccacagcaacaacaacagtcgcagcagaagcaacaacaacatgtgcgcgtggtcgagcaacaacaggtggaaccagctgaggcggtgacctccagcatggaatcggaatccatctcggccagcaaggagctaaccggtttgacgcacgagtgcggcgttttcggggcaatcgcttgcggagattggcccacccaaatggacattgcacacgtgatctgtttggggctggtggcactgcagcatcgtgggcaggagtctgcgggcatagcgaccagcgagggaaagtgctccaagaacttcaacgtgcacaagggcatgggtatgatcagcaccctgttcaacgacgactccatgaagaagcttcgtggcaacctgggcatcggtcatacacgctactcgaccgctggcggatccggagtggttaactgtcagccctttgaggtacatacgacacatggagcattggccctggcccacaatggtgagcttgttaacaacgaatctctaagaagggaggttttggccagaggcgtgggcttatccacgcacagcgacagtgagttgatcgcccagtcgttgtgctgcgccccggaggatgtttccgaactggatggacccaactggccagctaggatcaggcatttcatgatgctggcgccactctcctactcgctggtcatcatgctaaaggacaaaatctacgccgtgagggacacctatggaaataggccgctatgcattggcaagatagtgcccatcaatgctgggcacggaaataacttagacacacctgccgatggttgggtggtgtccagtgagagctgtggcttcctgtcgatcggtgccagatacgtccgcgaagtggagcctggagagatagtggagctgtcgcgaagtggctaccgcacggtggacattgtggaaagacccgacttcaagcgcatggccttttgtatatttgagtacgtttacttcgcccgcggagacagcatcttcgagggtcagatggtgtacacagtgaggctgcagtgcggccggcagctgtggcgagaggctccagtggaggcggatattgtgagttccgttcccgagtctggcacagcggcggcgcatggctatgcccgtgagtctggcattgaatttgccgaggttctctgcaggaatcgctacgtgggacggacgtttattcaaccctctacccggctgcggcagttgggagtagccaagaagttcggagccctatccgagaacgtggctggcaagagattggtcctgatagacgattccattgtgcgcggcaacaccattggaccaataatcaagctgctacgggatgcaggcgcccgggaggtgcacatccgcattgccagcccaccgctgcagtacccatgctatatgggtataaatattccaactcgagaggaattgattgccaacaagctgaaccccgaccaactagctaggcatgtgggcgccgacagtctggcttatcttagtgtggagggactagtggaggctgtccaactaaagcaccgcgatgcaggcgatagtaaatccaagggaacgggccactgcaccgcctgtctcactggtgaatatcccggtgggctgcccgatgagttgagctggtga

SEQ ID NO: 30564 - protein, 546 aa, Drosophila melanogaster
MSAPQQQQQSQQKQQQHVRVVEQQQVEPAEAVTSSMESESISASKELTGLTHECGVFGAIACGDWPTQMDIAHVICLGLVALQHRGQESAGIATSEGKCSKNFNVHKGMGMISTLFNDDSMKKLRGNLGIGHTRYSTAGGSGVVNCQPFEVHTTHGALALAHNGELVNNESLRREVLARGVGLSTHSDSELIAQSLCCAPEDVSELDGPNWPARIRHFMMLAPLSYSLVIMLKDKIYAVRDTYGNRPLCIGKIVPINAGHGNNLDTPADGWVVSSESCGFLSIGARYVREVEPGEIVELSRSGYRTVDIVERPDFKRMAFCIFEYVYFARGDSIFEGQMVYTVRLQCGRQLWREAPVEADIVSSVPESGTAAAHGYARESGIEFAEVLCRNRYVGRTFIQPSTRLRQLGVAKKFGALSENVAGKRLVLIDDSIVRGNTIGPIIKLLRDAGAREVHIRIASPPLQYPCYMGINIPTREELIANKLNPDQLARHVGADSLAYLSVEGLVEAVQLKHRDAGDSKSKGTGHCTACLTGEYPGGLPDELSW

SEQ ID NO: 30565 - DNA, 1518 bp, Haemophilus influenzae; identical to SEQ ID NO: 30219
  CDS (1)..(1518)

SEQ ID NO: 30566 - protein, 505 aa, Haemophilus influenzae; identical to SEQ ID NO: 30220

SEQ ID NO: 30567 - DNA, 1554 bp, Homo sapiens
  CDS (1)..(1554)
atggagctggaggagttggggatccgagaggaatgtggcgtgttcgggtgcatcgcctcaggagagtggcccacgcagctggatgtaccgcatgtgatcactctgggactcgtggggctgcagcaccggggtcaggagagtgctggtattgtgactagtgatgggagttccgtgccaacattcaaatcacacaagggaatgggtcttgtaaatcacgtctttactgaagacaatttgaaaaaattatatgtttcaaatcttggaattggacacaccaggtatgccaccacaggaaaatgtgaactagaaaattgtcagcccttcgttgttgaaacacttcatgggaagatagctgtggcacataatggcgaattggtaaatgctgctcgattaaggaaaaagcttctgcgtcatggtattggtctgtctacaagttctgatagtgaaatgattacccagttactggcgtatacccctcctcaggaacaagatgacaccccagactgggtagccaggattaaaaacttgatgaaggaagcacccacagcatactccctgcttataatgcacagagatgttatttatgcagtacgagatccttatggaaatcgtcccttatgcattggtcgtcttattccagtgtctgatataaatgacaaagagaaaaaaacatcagaaacagaaggatgggtggtgtcttcagaatcttgtagcttcttatctattggtgcaagatattaccgtgaagtcttgcctggagaaattgtggaaatatccagacacaatgtccaaactcttgatattatatcaaggtctgaaggaaacccagtggctttttgtatctttgaatatgtttattttgcaagaccagacagtatgttcgaagaccaaatggtttatacagtaagataccgttgtggccagcagctagcgattgaagcacctgtggatgcagatttggttagcactgttccagaatctgctacgcctgctgctcttgcttacgcaggaaagtgtggacttccatatgtggaggtgctgtgtaaaaaccggtatgtagggagaaccttcattcagccaaacatgaggttaagacaacttggtgttgcaaaaaaatttggagtattgtcagacaactttaaaggcaaaagaattgttcttgtagatgattcaattgtcagaggcaataccatctcacctataataaaactgctcaaagaatctggtgcaaaagaggtacacattcgagtagcttcaccaccaattaaatatccatgcttcatgggaataaacattcctacaaaagaagagctcattgccaataaaccagaatttgatcaccttgcagaatatctaggagcaaacagtgttgtgtatctgtcagtagaaggactggtttcatctgtacaagaagggataaagtttaaaaaacagaaagagaaaaagcacgatattatgatccaagaaaatggaaatggtctggaatgttttgaaaagagtggtcattgtacagcttgtctcactggaaaatatcctgtagaattagaatggtag

SEQ ID NO: 30568 - protein, 517 aa, Homo sapiens
MELEELGIREECGVFGCIASGEWPTQLDVPHVITLGLVGLQHRGQESAGIVTSDGSSVPTFKSHKGMGLVNHVFTEDNLKKLYVSNLGIGHTRYATTGKCELENCQPFVVETLHGKIAVAHNGELVNAARLRKKLLRHGIGLSTSSDSEMITQLLAYTPPQEQDDTPDWVARIKNLMKEAPTAYSLLIMHRDVIYAVRDPYGNRPLCIGRLIPVSDINDKEKKTSETEGWVVSSESCSFLSIGARYYREVLPGEIVEISRHNVQTLDIISRSEGNPVAFCIFEYVYFARPDSMFEDQMVYTVRYRCGQQLAIEAPVDADLVSTVPESATPAALAYAGKCGLPYVEVLCKNRYVGRTFIQPNMRLRQLGVAKKFGVLSDNFKGKRIVLVDDSIVRGNTISPIIKLLKESGAKEVHIRVASPPIKYPCFMGINIPTKEELIANKPEFDHLAEYLGANSVVYLSVEGLVSSVQEGIKFKKQKEKKHDIMIQENGNGLECFEKSGHCTACLTGKYPVELEW

SEQ ID NO: 30569 - DNA, 1416 bp, Methanococcus jannaschii; identical to SEQ ID NO: 30185
  CDS (1)..(1416)

SEQ ID NO: 30570 - protein, 471 aa, Methanococcus jannaschii; identical to SEQ ID NO: 30186

SEQ ID NO: 30571 - DNA, 1425 bp, Methanobacterium thermoautotrophicum
  CDS (1)..(1425): transl_table=11
ttgttgggagaatctgaagtgagagataaatgcggtattgtagggatttactcacaggataagaaaaccggtgtggcctcccagatatattatgcgctctacgcactgcagcacaggggacaggagtctgcagggatctcaacattcaatgggaacgatatactgacacacaggggaatggggctggtctgcgacgtcttcaatcctgagaagctagaggaacttaaggggaacgtcgggataggacacgtgcgctactcaaccacaggcgaatcaaggattgagaattctcagccattctggagcgaatttcagggaggtaaaattgcaatagcccacaatggagacatcataaactccatggaactccgggaggaactcgaggaggagggtcacaactttgtctcaacgacggactcagaggtcatctgccacctcctcagcagggaatacgatgagaaaccgaacatgatatactccataaagagggtttcagagcagctggtgggatcatattccctggtggtgcttctgaaccaggacctctatgtcgtcagggaccctgtgggtataaaaccactggcctttgcaaggaagggcagcacccagatcgtggcctcggagaccgtggcctttgatgtcataggtgccgagcatgtaagggacgtccagcccggtgagatactccacctgaaccggggcaaatcctactgggttgcaaacgcccccaacaccaggagggcccactgcatgtttgagtacgtctacttcgcaaggccggacagtgtaatcgacgggcgcaacgtatacagggtccgcctcaatattggggaggccctctacagggagcacccggccaacgcagacgtggttgtacccgtacctgactcatccatcccggcggccataggatactcaagggcctcagggataccctacggtgagggcctgataaagaacaggtacgtgggtcgtacatttataatgccgacccaggaggaacgtgaaacagcggttaaactcaagatgaaccccataaggtccgaacttgagggtaaacgcatagtactcatcgatgacagtatagtgagggggacaacctcaagggcactcattgacatcataagggatgccggggcagaggagatacatctgaggataggctgcccacccataaagtccccgtgctactatggcatagcaatggcaacgaagaaggagctcatagcatccaccaggaacgttgaggagataaggaggataataggtgttgattccctgggctacctcagcatcgagtccctggtggagtgcataggtataaagaagggattcctgtgcacgggatgccttgacggggactaccccacacccctaccatctgacataagtgaatatgaggccatgaggtcctgctccagatga

SEQ ID NO: 30572 - protein, 474 aa, Methanobacterium thermoautotrophicum
MLGESEVRDKCGIVGIYSQDKKTGVASQIYYALYALQHRGQESAGISTFNGNDILTHRGMGLVCDVFNPEKLEELKGNVGIGHVRYSTTGESRIENSQPFWSEFQGGKIAIAHNGDIINSMELREELEEEGHNFVSTTDSEVICHLLSREYDEKPNMIYSIKRVSEQLVGSYSLVVLLNQDLYVVRDPVGIKPLAFARKGSTQIVASETVAFDVIGAEHVRDVQPGEILHLNRGKSYWVANAPNTRRAHCMFEYVYFARPDSVIDGRNVYRVRLNIGEALYREHPANADVVVPVPDSSIPAAIGYSRASGIPYGEGLIKNRYVGRTFIMPTQEERETAVKLKMNPIRSELEGKRIVLIDDSIVRGTTSRALIDIIRDAGAEEIHLRIGCPPIKSPCYYGIAMATKKELIASTRNVEEIRRIIGVDSLGYLSIESLVECIGIKKGFLCTGCLDGDYPTPLPSDISEYEAMRSCSR

SEQ ID NO: 30573 - DNA, 1584 bp, Mycobacterium bovis
  CDS (1)..(1584): transl_table=11
gtggccgtagactcggattacgtcaccgaccgcgccgcagggagccgccaaaccgtgaccggccagcaacccgagcaagacctgaactcgccccgggaagagtgcggtgtcttcggggtctgggccccgggtgaagacgtcgccaaactcacctactacggcctgtacgcgttgcagcatcgcggccaggaagccgccgggatcgccgtcgccgacggctcccaggtgctggtcttcaaagacctcggcctggtcagccaggtgttcgacgagcagacgttggcggccatgcagggccatgtcgccatcgggcactgtcgttactccaccaccggggacacgacgtgggagaacgcccagcccgtgttccgcaacaccgccgctggcaccggtgttgcgttgggccacaacggaaatctggtcaatgccgctgcccttgccgcccgcgcccgcgacgcggggttgatcgccacccgctgcccagccccggcgacgacggactccgacattctgggggcgctgctggcccacggtgctgccgattccaccctcgaacaggcggcgctggacctgctgcccacagtgcggggagcgttctgtctgacgttcatggacgaaaacacgctttatgcgtgccgcgacccgtacggggtgcgcccgctatcgctcgggcgtttggaccgtggctgggtggtggcctccgaaacggccgcactcgacatcgtcggcgcctcgttcgtccgtgatatcgaaccgggcgaattgctggctatcgacgccgacggggtgcggtccacccgctttgccaaccccacgcccaagggctgcgtattcgaatacgtctacctggcgcggccggacagtacgatcgccggccggtcggtacacgccgcgcgggtggagatcggtcgccgactggctcgggaatgcccggtcgaggccgacttggtgattggtgtgccggaatccggcacacccgccgcggtcggctacgcgcaggagtccggcgttccatatgggcagggtctgatgaagaacgcctatgtcgggcgcaccttcatccagccgtcacagaccatccgtcagctcggcatccggctgaagctcaacccgctcaaagaggtgatccgcggcaagcggctcatcgtcgtcgacgactcgatcgtgcggggcaacacccagcgtgcgctggtacgcatgctgcgcgaggccggtgcggtcgaattgcatgtgcgcatcgcctcgccaccggtgaagtggccgtgcttctacggtatcgacttcccctcgccggccgagttgatcgccaacgccgtggaaaacgaggacgagatgctggaggcggtacggcatgccatcggggccgacacgctgggatacatctcgctgcggggcatggtggcggcgtccgagcagcccacgtcgcggctgtgcaccgcctgcttcgacggcaagtatccaatagagctgccccgcgagaccgcgctaggcaaaaatgtcatcgagcacatgctcgccaatgcggcccgcggagccgcgctgggcgaactcgccgccgacgacgaagtccccgttgggcgctga

SEQ ID NO: 30574 - protein, 527 aa, Mycobacterium bovis
MAVDSDYVTDRAAGSRQTVTGQQPEQDLNSPREECGVFGVWAPGEDVAKLTYYGLYALQHRGQEAAGIAVADGSQVLVFKDLGLVSQVFDEQTLAAMQGHVAIGHCRYSTTGDTTWENAQPVFRNTAAGTGVALGHNGNLVNAAALAARARDAGLIATRCPAPATTDSDILGALLAHGAADSTLEQAALDLLPTVRGAFCLTFMDENTLYACRDPYGVRPLSLGRLDRGWVVASETAALDIVGASFVRDIEPGELLAIDADGVRSTRFANPTPKGCVFEYVYLARPDSTIAGRSVHAARVEIGRRLARECPVEADLVIGVPESGTPAAVGYAQESGVPYGQGLMKNAYVGRTFIQPSQTIRQLGIRLKLNPLKEVIRGKRLIVVDDSIVRGNTQRALVRMLREAGAVELHVRIASPPVKWPCFYGIDFPSPAELIANAVENEDEMLEAVRHAIGADTLGYISLRGMVAASEQPTSRLCTACFDGKYPIELPRETALGKNVIEHMLANAARGAALGELAADDEVPVGR

SEQ ID NO: 30575 - DNA, 1671 bp, Mycobacterium leprae
  CDS (1)..(1671): transl_table=11
gtgtgtttggctgtcggggtaggtgtccgggcacctaaacacgtgccacagattcgtcgactgggccgtgctggccgtagactccgttgcgtcaccaactgcgccctagggagctgcccaatcgtgaccgtccagcaacccgggcgggatttcagctcgccccgcgaagagtgcggtgtgttcggggtctgggctccgggtgaactagtcgccaaactcacttatttcggtctatacgcgttgcagcatcgcggccaggaagctgcggggatcgctgtcgctgatggatcgcaggtgttggtcttcaaagaccttggcttagttagtcaagtgttcgacgagcagacattggcggcgatggagggtcacgttgccatcggtcattgccgctactccaccaccggcgacaccacctgggaaaatgcccagcctgttttccgcaacatcgctgccggatccggggttgcgttggggcacaacggaaacctggtcaacactgccgagcttgccgcacgtgcccgcgacgcggggttgatagcaaaacgctgcccggccccagcgacaacggactccgacatcctgggcgcgctgttagcccacggtgcggccgactcgaccctggaacaggctgcgctggaactgctgccgaccgtgcggggtgcgttctgcctgacattcatggacgaaaacaccctctatgcctgccgggacccgtatggagtacggccgctgtcgctcggacgactggatcgcggctgggtggtggcttctgaaacggcggggctcgacattgtcggcgcctcgtttgtccgcgacatcgagccgggcgaattgctggcgatcgacgccgacggagtacggtccactcgtttcgccaaccctacgcccaagggttgtgtttttgagtacgtttacctggcacggcccgacagcacgctggccggacggtcggtgcacggcactcgggtggagatcggtcgtcgacttgcccgcgaatgcccggtcgaggccgacttggtgatcggtgtgcccgaatcaggcactcccgccgcagtgggatacgcgcaggaatccggcatctcttacgggcagggtctgatgaagaatgcatatgttggacgcacattcatccaaccgtcgcaaaccatccgtcaactgggcatccggctgaagctcaatccgcttaaagaggtaatccgcggcaagcggctgattgttgtcgacgactcggttgtgcgggggaacacccaacgcgctctggtgcggatgctgcgcgaggccggtgccgtcgagctgcacgtgcgcatcgcttcaccaccggtgaagtggccctgtttttacggcatcgacttcccatcgccggccgaattgatcgctaacgtcgtcgcagacgaggaggagatgctcgaggcggtacggcagggcatcggtgccgacacactgggctacatctcgctgcggggcatgattgcggcttccgagcagcccgcttcgcggctgtgttacgcttgctttgacggtaggtatccgatcgagctgcccagtgaagccatgttaggcaaaaatgtcatcgagcacatgcttgccaatgcggcgcgtggagccgggctacgcgatcttgctgctgatcaggtcccagtcgatgcggacgaaaattgcgtttggcgttga

SEQ ID NO: 30576 - protein, 556 aa, Mycobacterium leprae
MCLAVGVGVRAPKHVPQIRRLGRAGRRLRCVTNCALGSCPIVTVQQPGRDFSSPREECGVFGVWAPGELVAKLTYFGLYALQHRGQEAAGIAVADGSQVLVFKDLGLVSQVFDEQTLAAMEGHVAIGHCRYSTTGDTTWENAQPVFRNIAAGSGVALGHNGNLVNTAELAARARDAGLIAKRCPAPATTDSDILGALLAHGAADSTLEQAALELLPTVRGAFCLTFMDENTLYACRDPYGVRPLSLGRLDRGWVVASETAGLDIVGASFVRDIEPGELLAIDADGVRSTRFANPTPKGCVFEYVYLARPDSTLAGRSVHGTRVEIGRRLARECPVEADLVIGVPESGTPAAVGYAQESGISYGQGLMKNAYVGRTFIQPSQTIRQLGIRLKLNPLKEVIRGKRLIVVDDSVVRGNTQRALVRMLREAGAVELHVRIASPPVKWPCFYGIDFPSPAELIANVVADEEEMLEAVRQGIGADTLGYISLRGMIAASEQPASRLCYACFDGRYPIELPSEAMLGKNVIEHMLANAARGAGLRDLAADQVPVDADENCVWR

SEQ ID NO: 30577 - DNA, 1344 bp, Pyrococcus abyssi
  CDS (1)..(1344): transl_table=11
atggcaaaggtgagagggatgagagagaagtgcgggatattcggtgtaagctctgaggatgccgttaggaagacgtattatggcttaatagccctacaacataggggtcaagaaggagctggaataagcgtttggaatggtagaataagaacgataaaaggacatggtctcgtctctgaagttttcgacgagaactccttgaaccttgcaagtaacattgcgataggccacgttaggtactcgacgtccggctctctaagtgaagttcaaccgttggaagttaggtgttgtgggtacgagcttgctatagcccacaatggaaccttgacgaatttcatacccctcaggagattatacgagggtatgggaattaagttccattcctcagtagataccgaggtgattgggatatccttccttaaccactatagtcaagtgaaagatgagtttgaggccatgaggagggtcttcgaggaggttaaaggggcttactcaatattaatcctcttcgacggaaagataatagcggcaagggatccagtcggctttaggcccttggtctttggggagggcgatggatactattttgcctcggaggattccgccctaaggatgtttgggctggaaacaagggatgttcttcctggggaggtcttcgtaatcgatggagaaagctatgagagtaaagttcttgccagggagaaacatgcctactgcgtttttgaatacatctacttcgcaagaccagatagcacgttgaacgggataaacgtttactgtgcccgctataggatgggggttgagctcgccagggaaagtccagctgaaggagacgttgtgattgcggttccagattctgggagaacggccgctttaggatttgcccacgaaagtggaatcccttatatggaaggcctaataaagaaccgctacatagggaggactttcataatgccaagcggcagagggttgaaagttaagctcaagctgtctccagttagggaagtagtgaatggtaaaagggtagttctggttgatgattccatagttaggggaactaccatgacgaggatagtcaagatgcttagggatgcaggggccagggaagtccacgttaggatagcctccccaccaataagatacccatgctacatggggatagacatacctacccggcacgagcttatagctgcctggaggagcattgaggatattaggaaggagattggggcagattcattggcttacctcagcatagagggtcttaagagggccgttggaacgaaaaacctatgcatggcatgcttaactggtgaatatcctgagtgggcattcaacttttaa

SEQ ID NO: 30578 - protein, 447 aa, Pyrococcus abyssi
MAKVRGMREKCGIFGVSSEDAVRKTYYGLIALQHRGQEGAGISVWNGRIRTIKGHGLVSEVFDENSLNLASNIAIGHVRYSTSGSLSEVQPLEVRCCGYELAIAHNGTLTNFIPLRRLYEGMGIKFHSSVDTEVIGISFLNHYSQVKDEFEAMRRVFEEVKGAYSILILFDGKIIAARDPVGFRPLVFGEGDGYYFASEDSALRMFGLETRDVLPGEVFVIDGESYESKVLAREKHAYCVFEYIYFARPDSTLNGINVYCARYRMGVELARESPAEGDVVIAVPDSGRTAALGFAHESGIPYMEGLIKNRYIGRTFIMPSGRGLKVKLKLSPVREVVNGKRVVLVDDSIVRGTTMTRIVKMLRDAGAREVHVRIASPPIRYPCYMGIDIPTRHELIAAWRSIEDIRKEIGADSLAYLSIEGLKRAVGTKNLCMACLTGEYPEWAFNF

SEQ ID NO: 30579 - DNA, 1350 bp, Pyrococcus horikoshii
  CDS (1)..(1350): transl_table=11
atgagaggtgaaatcatgaaagagaagtgtgggatctttggggcttattcccaggatgcaactaaaaagacttattatggcctaatggccctccaacacagggggcaagaaggggctggaattagtgtctgggatggggatataagaacggttaaaggtcatgggcttgtttccgaagtctttaaggggggcagtattcggaggttaaatggtaatcccgtgatagggcacgttaggtactcaacatcgggttccctttcagaagtccaaccgctggaggttgaatgttgtgggtataaggtatctatagctcataacggcacgcttacaaattttcttcccctaaggaggttttatgaaagtagaggatttaaatttcgctcttccatcgatacggaagttatagcggtctcttttttaaatcattactctgagctgaaggatgaatttgaagccatgagtagagtttttgaagaagttaaaggggcttattcagttttaatgttgttcaatggaaagcttatagccgttagggatcctgtgggttttaggcctctgagttttggagctggggatggatattacttctcttccgaggattctgctctcaggatgttctgtactaacataagggatgtatctcccggtgaggttattgtagttaaggatggggaagcagagagtaagatagttggaagatccgagcatgcatattgcgtcttcgagtatatatactttgcaagacctgatagcattataaacggaataagcgtttactgggctcgctatagaatgggagttgaattggctagggaaagtccagctgagggagatgtggtaatagctgttcccgattcagggagaactgcagctttgggttttgctcacgagagtgggatcccctacatggaggggcttataaagaatcgctatatcgggagaaccttcataatgccaagtgggcgagaaatcaaggttaggttaaagctctccccagttaaagaagtcattaagggaaggaggatagttcttgttgatgattcaatagtaaggggaacaacgatgaagaacattgtgaagatgcttagagatgcgggggctagggaagtgcacgtgagaatagcatctcccccgataaggtatccatgctatatggggatagacattccgacaagacatgagcttatagcagcttggaagagtattgaggagataaagaaagagattggagctgattctctagcctacctaagtgtagaggggcttaagagggctatagggactgataagctttgcatggcatgtttaactggaaactatccagagtgggcttttgactttaaggtttag

SEQ ID NO: 30580 - protein, 449 aa, Pyrococcus horikoshii
MRGEIMKEKCGIFGAYSQDATKKTYYGLMALQHRGQEGAGISVWDGDIRTVKGHGLVSEVFKGGSIRRLNGNPVIGHVRYSTSGSLSEVQPLEVECCGYKVSIAHNGTLTNFLPLRRFYESRGFKFRSSIDTEVIAVSFLNHYSELKDEFEAMSRVFEEVKGAYSVLMLFNGKLIAVRDPVGFRPLSFGAGDGYYFSSEDSALRMFCTNIRDVSPGEVIVVKDGEAESKIVGRSEHAYCVFEYIYFARPDSIINGISVYWARYRMGVELARESPAEGDVVIAVPDSGRTAALGFAHESGIPYMEGLIKNRYIGRTFIMPSGREIKVRLKLSPVKEVIKGRRIVLVDDSIVRGTTMKNIVKMLRDAGAREVHVRIASPPIRYPCYMGIDIPTRHELIAAWKSIEEIKKEIGADSLAYLSVEGLKRAIGTDKLCMACLTGNYPEWAFDFKV

SEQ ID NO: 30581 - DNA, 1554 bp, Rattus norvegicus
  CDS (1)..(1554)
atggaactggaggagtcggggatccgtgaggaatgtggtgtgttcgggtgcatcgcttctggagactggcccacgcagctagatgtgccacatgtgatcactctgggactcgtggggcttcagcaccgaggtcaggagagcgctggtattgtgaccagtgatgggagttcagtgcctaaattcagggtgcataagggaatgggccttgtaaatcatgtttttaccgaagacaatttgaagaaattgtatgtctcaaatcttggaatcggacatacgcggtacgccaccacagggaagtgtgagctggaaaattgccagccgtttgttgttgagactctgcatgggaaaatagctgtggcccataacggagagctggtgaacgcagctcggctgaggaagaagcttctgcggcatggtattgggctttccacatcctccgatagtgaaatgattacccagttactcgcatatacccctcctcaggaacaagatgatactccagactgggtagcaagaattaagaacttaatgaaggaagcgcccgcagcctactccctggtcataatgcacagggacgtcatttacgcagtgcgagatccatacggaaatcgtcctctatgcatcggccgtcttatgccagtttctgacataaatgacaaagagaaaaagtcttcagagactgaaggatgggtggtgtcctcagagtcttgcagctttttatctattggtgcgagatattgccatgaagtgaagcctggggaaattgtagaaatatccagacatggtgtcagaactcttgatataattccaaggtctaatggagacccagtggctttttgtatcttcgaatatgtttattttgcaagaccagatagtatgtttgaagaccagatggtttatacggtaaggtaccggtgtggccagcagctggcagttgaagcaccagtggaggcggacctggtcagcacagttccagaatctgccacgcctgcggccctggggtatgcgacaaagtgtgggctgccatatgtggaggtgctgtgtaagaaccggtatgtaggaagaaccttcattcagccaaacatgaggctaagacaacttggggttgcaaagaaattcggcgtgttgtctgacaactttaaaggcaaaagaattgttctcatagatgattccattgtgagaggcaatactatctcacccatcataaaactcctcaaagaatccggtgcaaaggaggtacacattcgagtcgcttcgccaccaataaaacatccgtgcttcatgggaataaacattcctacaaaagaagagcttatagccaataagcccgaatttgagtatcttgcagagtaccttggagcaaacagcgttgtgtatctgtcagtggaaggactagtttcgtctgtgcaacaagaaataaagttcaagaagcagaaagttaaaaagcgtgatatcacaattcaagaaaatggaaatggtctggagtattttgagaagacgggacactgtacggcttgcctcactggccagtaccctgtggatctggaatggtag

SEQ ID NO: 30582 - protein, 517 aa, Rattus norvegicus
MELEESGIREECGVFGCIASGDWPTQLDVPHVITLGLVGLQHRGQESAGIVTSDGSSVPKFRVHKGMGLVNHVFTEDNLKKLYVSNLGIGHTRYATTGKCELENCQPFVVETLHGKIAVAHNGELVNAARLRKKLLRHGIGLSTSSDSEMITQLLAYTPPQEQDDTPDWVARIKNLMKEAPAAYSLVIMHRDVIYAVRDPYGNRPLCIGRLMPVSDINDKEKKSSETEGWVVSSESCSFLSIGARYCHEVKPGEIVEISRHGVRTLDIIPRSNGDPVAFCIFEYVYFARPDSMFEDQMVYTVRYRCGQQLAVEAPVEADLVSTVPESATPAALGYATKCGLPYVEVLCKNRYVGRTFIQPNMRLRQLGVAKKFGVLSDNFKGKRIVLIDDSIVRGNTISPIIKLLKESGAKEVHIRVASPPIKHPCFMGINIPTKEELIANKPEFEYLAEYLGANSVVYLSVEGLVSSVQQEIKFKKQKVKKRDITIQENGNGLEYFEKTGHCTACLTGQYPVDLEW

SEQ ID NO: 30583 - DNA, 1497 bp, Rhizobium etli
  CDS (1)..(1497): transl_table=11
atgaaccagtcccattccttcccgaccgacgatccgctcgacggagatacgctgcatgaggaatgcggcgttttcggaatcctgggacatcccgatgccgcggctctcacggctctcggcctgcacgccctgcagcatcgtgggcaggaagcggccggcattgtctccttcgacggcaaacgcttctaccaggagcgccatatgggtctggtcggcgaccactataccaatccgatgacgctcgcccgcctgcccggcagcatctcaatcggccatactcgctattcgacgaccggcgaagtggcgatgcgcaacgtgcagccgctgtttgccgagttggaggaaggcggcatcgccattgcccataacggcaatttcaccaatggcctgacgctgcgccgccagatcatcgcaaccggcgccatctgtcagtcgacctccgataccgaagtcgtgctgcatctcatcgcccgctcgcgccacgcttccacgtccgaccggttcatcgacgccatccgccagatggaaggcggctattcgatgctcgccatgacccgcaccaagctgattgccgcgtcgcatcccaccggcatccgcccgcttgtcatgggcgaactcgacggcaagccgatcttctgctccgaaacctgtgcgctcgacatcattggcgccaaattcatccgcgacgtggaaaacggcgaggtcatcatctgcgaaatccagcccgacggctcgatcagcatcgatgcccgcaagcccagcaagccacagccggagcgtctctgcctgttcgaatatgtctatttcgcccgtccggattcggtcgtcggcggccgcaacgtttatacgacgcgcaagaacatgggcatgaacctcgccaaggaatcgcctgtcgatgccgatgtcgtcgtgccggtgccggatggcggcaccagtgcggctgggggctatgcgcaggaaagcggcatccccttcgaatacgaatacggaatcatccgcaaccattatgtcggacgcacctttatcgagccgacgcagcagatccgcgccttcggcgtcaagctgaagcattccgccaaccgggcgatgatcgaaggcaagcgcgtggtgctggtcgacgattccatcgtgcgcggcacgacgtcgctgaagatcgtgcagatgatccgcgaggctggtgcgcgcgaagtccatatccgtgtcgcaagcccgatgatcttcttccgggatttctacggatcgatacgcccgacgcccgacaaactgctcgccaatcaatatgccgacgtcgaagccatggccaaatatatcggcgcggattcgcttgccttcctgtcgatcaacggactttaccgcgccgtcggcggcgaggaccgcaatccggcccgcccgcagttcaccgaccactacttcaccggcgactatccaacccgcctgctcgacaagaacggcgagtcgatgggcaacaagctttcgatgcttgccagcaacggctga

SEQ ID NO: 30584 - protein, 498 aa, Rhizobium etli
MNQSHSFPTDDPLDGDTLHEECGVFGILGHPDAAALTALGLHALQHRGQEAAGIVSFDGKRFYQERHMGLVGDHYTNPMTLARLPGSISIGHTRYSTTGEVAMRNVQPLFAELEEGGIAIAHNGNFTNGLTLRRQIIATGAICQSTSDTEVVLHLIARSRHASTSDRFIDAIRQMEGGYSMLAMTRTKLIAASHPTGIRPLVMGELDGKPIFCSETCALDIIGAKFIRDVENGEVIICEIQPDGSISIDARKPSKPQPERLCLFEYVYFARPDSVVGGRNVYTTRKNMGMNLAKESPVDADVVVPVPDGGTSAAGGYAQESGIPFEYEYGIIRNHYVGRTFIEPTQQIRAFGVKLKHSANRAMIEGKRVVLVDDSIVRGTTSLKIVQMIREAGAREVHIRVASPMIFFRDFYGSIRPTPDKLLANQYADVEAMAKYIGADSLAFLSINGLYRAVGGEDRNPARPQFTDHYFTGDYPTRLLDKNGESMGNKLSMLASNG

SEQ ID NO: 30585 - DNA, 1533 bp, Saccharomyces kluyveri
  CDS (1)..(1533)
atgtgtggtattttaggtatcgctctagctgatcaatcaagtgttgttgccccagaattattcgatggctctttgttcctacaacatagaggccaagatgccgctggtatggctacatgtggtgaacgtggtagactatatcagtgcaagggtaacggtatggctcgtgatgtcttcacccaacatagaatgagtgggttggttgggtctatgggtatcgcccatttgcgttatccaactgctggttcctgtgctaactccgaagcccaacccttttatgtgaacagtccttacggtatctgtttaagtcacaacggtactttagtcaatacgttgtctctgaggagttatttggacgaggttgtccatagacacattaacacggacagtgattcggagctattactaaatgtattcgctgctgagttggagagacacaacaagtacagagttaacaatgacgatatattccatgctttggagggtgtttatcgccagtgtcgtggtgggtatgcctgtgtcggtatgctagctggttacagtttatttgggttcagagaccccaacggtatcagaccattgttatttggtgagagagtcaatccagatggtaccaaggattatatgttggcttcagagagcgttgttttgaaggcacataactttaacaaatttcgcgatttgaagcctggtgaagctgtcatcattcctaaggattgtaataaacaagagcccgaattcaggcaggtagtcccaaccaattcttacagaccagacttgtttgagtatgtttattttgccagaccggacagtgtgttagatggtatttctgtctaccacacaagattacaaatgggtatcaagctagcagaaaatgttaaaaaagttgtcgatccagatgaaattgatgttgtagtttctgttcctgatactgcacgtacttgtgccttgcaatgtgccaaccatctaaataaaccatatcgtgaagcattcgtcaaaaacagatatgttgggagaacctttattatgccgaaccaaaaagagcgtgtttcttccgttagacgtaaattgaatccaatggatttcgaatttaaggataagcgtgtcctgattgttgatgattccatcgtgagagggactacttctaaagaaattatcaacatggctaaagaatctggtgccaccaaggtgtacttcgcatctgctgctccagcaatccgctttaatcatatttacggtattgaccttgctgataccaaacagttagtcgcctacaataggaccactgacgaagttgcccaggagttaggttgtgaaaaggttatttatcaatccttggaagacctagtcgattgttgtaaaaccgataagattgacaaattcgaagttggtgtctttactggtaactacgtgaccggtgtagaggatggttatttacaagaattagaaagagttcgcgccctcaacaaggcaaaactaactacagcaaaggcagaggtggacattggattgtataatagtgccgattattaa

SEQ ID NO: 30586 - protein, 510 aa, Saccharomyces kluyveri
MCGILGIALADQSSVVAPELFDGSLFLQHRGQDAAGMATCGERGRLYQCKGNGMARDVFTQHRMSGLVGSMGIAHLRYPTAGSCANSEAQPFYVNSPYGICLSHNGTLVNTLSLRSYLDEVVHRHINTDSDSELLLNVFAAELERHNKYRVNNDDIFHALEGVYRQCRGGYACVGMLAGYSLFGFRDPNGIRPLLFGERVNPDGTKDYMLASESVVLKAHNFNKFRDLKPGEAVIIPKDCNKQEPEFRQVVPTNSYRPDLFEYVYFARPDSVLDGISVYHTRLQMGIKLAENVKKVVDPDEIDVVVSVPDTARTCALQCANHLNKPYREAFVKNRYVGRTFIMPNQKERVSSVRRKLNPMDFEFKDKRVLIVDDSIVRGTTSKEIINMAKESGATKVYFASAAPAIRFNHIYGIDLADTKQLVAYNRTTDEVAQELGCEKVIYQSLEDLVDCCKTDKIDKFEVGVFTGNYVTGVEDGYLQELERVRALNKAKLTTAKAEVDIGLYNSADY

SEQ ID NO: 30587 - DNA, 1602 bp, Schizosaccharomyces pombe
  CDS (1)..(1602)
atgtgcggaattttggcgttaatgcttgctgaccctcatcaacaggcatgtcctgaaatttatgagggtctttacagtttgcagcatcggggtcaagatgccgccggtattgtaaccgctggaaacaaaggtcgtctttaccaatgcaagggatccggcatggttgccgatgtttttagtcagcatcaacttcgccaactcgtaggtagtatgggtattggtcatttgcgctatcctactgctggaagttgtgctcactctgaagcacaacccttttatgttaactctccttatggtcttgtgttgggccataatggtaatttaattaatggacccgaattacgacgctttttggacactgaggcccatcgtcatgtaaacactggatctgattctgagcttttgcttaacatctttgcttacgagcttcaacggttggataaatttcgtataaacgaaaatgatattttcgaagctttgcgtaatgtatacgatcgcgttaatggtggttatgcatgtgttgctatgatcgcaggcttgggtgttttgggattccgtgatcccaatggcattcgtcctttagtgatcggtgaacgtgatacccccgaaggaaaggattacatgcttgctagtgagagtgttgtattgactcaatttggataccgtacattcagagatattcgccccggtgagtgtgtctttattcgtcgttccaatagggaagatatacttgcagggtttagaggccctcgcttgttttctcgtcaaatccttccctgcctaagatttactcccgatatatttgagtatgtctatttcgctcgtcccgactctgttattgacggattgtccgtataccaatcccgtttaaatatgggtgaaaagttagcgcatactataatgaaacggtttggtcccgattacatggaaaaaattgatgctgtcattcctgttccagattctgctcgaaccagtgcccttgcacttgcacagacagctcaactgccatacgtcgaagcttttattaaaaaccgatatattggtcgtaccttcattatgccaggtcaacagattcgtcgtaaatcggttcgtcgtaaattaaatgttcaacctcaagagttttttgataagaatgttttaattgtggatgacagtattgttcgtggtaccacctctcgtgagatcgttcaaatggctagggagtcgggtgcaaagaatgtctatttggctagttgcgctcctatgatcactcatcctcatgtctacggtattgatctcgctgattgtaaggatctcattgcttatggaaaaactgaggatgaggttgctgaagcaattagtgccgatggtgtcatttatcaaacattagaagatttattagattcttgtcgtacggctgagctgaccgaatttgaagttggtctctttactggcgaatacactactggcgctagtaaagaatatttagtccatcttgagcaaatgcgtattgctaacaatcgtgctcgtaagcatagctttgcagaagatgaggaacgtgaagctcccgaagacatttctctccataacacacattcagatgttacttttgattttgtttaa

SEQ ID NO: 30588 - protein, 533 aa, Schizosaccharomyces pombe
MCGILALMLADPHQQACPEIYEGLYSLQHRGQDAAGIVTAGNKGRLYQCKGSGMVADVFSQHQLRQLVGSMGIGHLRYPTAGSCAHSEAQPFYVNSPYGLVLGHNGNLINGPELRRFLDTEAHRHVNTGSDSELLLNIFAYELQRLDKFRINENDIFEALRNVYDRVNGGYACVAMIAGLGVLGFRDPNGIRPLVIGERDTPEGKDYMLASESVVLTQFGYRTFRDIRPGECVFIRRSNREDILAGFRGPRLFSRQILPCLRFTPDIFEYVYFARPDSVIDGLSVYQSRLNMGEKLAHTIMKRFGPDYMEKIDAVIPVPDSARTSALALAQTAQLPYVEAFIKNRYIGRTFIMPGQQIRRKSVRRKLNVQPQEFFDKNVLIVDDSIVRGTTSREIVQMARESGAKNVYLASCAPMITHPHVYGIDLADCKDLIAYGKTEDEVAEAISADGVIYQTLEDLLDSCRTAELTEFEVGLFTGEYTTGASKEYLVHLEQMRIANNRARKHSFAEDEEREAPEDISLHNTHSDVTFDFV

SEQ ID NO: 30589 - DNA, 1710 bp, Glycine max
  CDS (1)..(1710)
atggctgctgcgtctaatctctccactctctcctcctcttccctctccaaaccctcgtcctctttccctttccgcaacacaccaacaaacaacaacgcttcttttctccacaacaaatcccttccaaaccaaaactctctctctcacaaactctcttcccctctgcctctcgcatgcaacccaaaaaaccaaaacacttgtgtcttcttcgacgacgaagaccaaaagccccgtgaagagtgcggcgtggtgggcatctacggcgacccggaagcctcccgtctctgctccctggccctccacgccctccagcaccgcggccaagaaggtgccggcatcgtagccgtccacgacaaccacctccaatccgttaccggcgtcggcctcgtctccgacgtcttcgagcagtccaagctctcccgcctccccggcacctcggccattggccacgtccgctactccaccgccggccaatccatgctcaaaaacgtccaacccttcctggccgactaccgcttcgctgccgtcgccgtcgctcacaacggcaacttcgtcaactaccgctccctccgagccagactcgaacacaacaacggctccatcttcaacaccacctccgacaccgaggttgtcctccacctcatcgccacttcaaaacacaggccattcctcctcagaatcgtggacgcctgcgagcatctccaaggcgcctactccctcgtattcgtcacggaggacaagctcgtcgccgtcagagaccccttcgggttccgacccttggtgatgggtaggagaaccaacggcgctgtagttttggcctccgagacatgcgcgcttgatttaatcgaagccacgtacgagagagaggtgtacccgggtgaagttatcgtggtggaccacactggaatccaatccctctgcctcgtgtctcatcctgagccaaaacaatgcatcttcgagcacatatacttcgcgcttcctaactctgttgttttcgggaggtccgtgtacgagtctagaaaaaaattcggagaaatactagcctctgagagtcccgttgagtgtgacgttgtgatcgcggttcctgattctggcgttgtggctgcgcttggttatgctgcaaaagctggggtaccctttcagcaggggttgattaggtcccactatgtagggaggactttcatcgagccttcgcagaaaattagggattttggagtgaagcttaaactgtctccggttcatgctgtgcttgaagggaagagggttgtggttgtggatgattccatcgtgagaggcaccacgtcgtccaagattgtgaggctcttgaaggaggccggtgccaaggaagttcacatgaggattgcatgtcctcctattgttgcttcgtgttattatggagttgacacacccagttcagaggagttgatatccaaccggatgagtgtggaggagataaggaagtttattgggtcggattcgctggcttttcttcccttggataagttgaagacattgttaggggatgatgctcttaactactgctatgcttgcttctctgggaagtaccctgttgagcctgaggaacttcaaatgaagaggcttggtgttgctcacttcaattgggacgacgacttcaatgggaatttcgaatctattgatgtggggggttgggttacaaatcaagatgggtttaagattggtagtgtctaa

SEQ ID NO: 30590 - protein, 569 aa, Glycine max
MAAASNLSTLSSSSLSKPSSSFPFRNTPTNNNASFLHNKSLPNQNSLSHKLSSPLPLACNPKNQNTCVFFDDEDQKPREECGVVGIYGDPEASRLCSLALHALQHRGQEGAGIVAVHDNHLQSVTGVGLVSDVFEQSKLSRLPGTSAIGHVRYSTAGQSMLKNVQPFLADYRFAAVAVAHNGNFVNYRSLRARLEHNNGSIFNTTSDTEVVLHLIATSKHRPFLLRIVDACEHLQGAYSLVFVTEDKLVAVRDPFGFRPLVMGRRTNGAVVLASETCALDLIEATYEREVYPGEVIVVDHTGIQSLCLVSHPEPKQCIFEHIYFALPNSVVFGRSVYESRKKFGEILASESPVECDVVIAVPDSGVVAALGYAAKAGVPFQQGLIRSHYVGRTFIEPSQKIRDFGVKLKLSPVHAVLEGKRVVVVDDSIVRGTTSSKIVRLLKEAGAKEVHMRIACPPIVASCYYGVDTPSSEELISNRMSVEEIRKFIGSDSLAFLPLDKLKTLLGDDALNYCYACFSGKYPVEPEELQMKRLGVAHFNWDDDFNGNFESIDVGGWVTNQDGFKIGSV

SEQ ID NO: 30591 - DNA, 1485 bp, Staphylococcus aureus
  CDS (1)..(1485): transl_table=11
atgtttaactactcaggattaaacgaagaatgtggcgtgtttggtatttggaatcatcctgaagcagcgcaactaacatatatgggacttcatagtttgcaacatcgtggtcaagaaggtgcaggtatagttgtttctgatcaaaatgaattaaaaggcgagcgaggattaggcttactaactgaagcgattaacgatgatcaaatggaacgattaaaaggatatcaacatgcaattggtcacgtccgttatgctacttcaggtaataaaggtattgaaaatattcaaccgtttctgtatcacttttatgatatgagtgtaggtatttgtcataatggtaacctcattaatgctaaatcattgcgtcagaatttagaaaaacaaggtgctatcttccattcgtcttcagatactgaagtcattatgcatttgatacgtcgaagtaaagctcctacttttgaggaagcattgaaagaaagtttgcgaaaagttaaaggcggttttacatttgcgatattaactaaagatgcgttatatggcgcagtagatccaaatgctatcagaccacttgttgtaggtaaaatgaaagatggtacatacatccttgcaagtgaaacatgtgcaatagatgtgttaggtgcagaatttgttcaagatattcatgcaggtgaatatgtcgtgattaacgataaaggtattacagttaaatcttatacacatcatacgacaactgcaatttctgcgatggaatatatttattttgctagaccagactcaacaatagctggtaaaaatgtccatgcagtacgtaaagcttctggtaaaaaattagcccaagaaagccctgtaaatgctgatatggtcatcggtgtacccaattcatcgctatcagctgcgagtggttatgctgaagaaataggtttgccatatgaaatgggactagttaaaaatcaatatgttgcaagaacatttattcaaccaactcaagaattacgtgagcaaggtgtgagagtgaagttatctgcggtaaaagatatagtagatgggaaaaatatcattcttgttgatgattccattgttcgcggtacgacaattcgacgcattgtgaaaatgttaaaagattctggtgcaaataaagtgcatgtgcgtatagcatcaccggaatttatgttcccaagtttttatggaatcgatgtttcaactacggcagaattaatttctgcaagcaaatcacctgaagaaattaaagattatattggcgctgattcattagcatatctatctgtagatgggttaattgaatcaattggtttagattatgacgcgccatatagtggcttatgtgtagaaagtttcactggagattatcctgcagggttatatgattatgaagcaaattataaagcacatttaagtcatcgacaaaagcaatatatttctaaaaacaaacacttttttgatagcgagggaaatttaaatgtctaa

SEQ ID NO: 30592 - protein, 494 aa, Staphylococcus aureus
MFNYSGLNEECGVFGIWNHPEAAQLTYMGLHSLQHRGQEGAGIVVSDQNELKGERGLGLLTEAINDDQMERLKGYQHAIGHVRYATSGNKGIENIQPFLYHFYDMSVGICHNGNLINAKSLRQNLEKQGAIFHSSSDTEVIMHLIRRSKAPTFEEALKESLRKVKGGFTFAILTKDALYGAVDPNAIRPLVVGKMKDGTYILASETCAIDVLGAEFVQDIHAGEYVVINDKGITVKSYTHHTTTAISAMEYIYFARPDSTIAGKNVHAVRKASGKKLAQESPVNADMVIGVPNSSLSAASGYAEEIGLPYEMGLVKNQYVARTFIQPTQELREQGVRVKLSAVKDIVDGKNIILVDDSIVRGTTIRRIVKMLKDSGANKVHVRIASPEFMFPSFYGIDVSTTAELISASKSPEEIKDYIGADSLAYLSVDGLIESIGLDYDAPYSGLCVESFTGDYPAGLYDYEANYKAHLSHRQKQYISKNKHFFDSEGNLNV

SEQ ID NO: 30593 - DNA, 1482 bp, Synechococcus sp
  CDS (1)..(1482): transl_table=11
atgatcccgactcagccgctgaccgccgacctggattgcgatttgggcctggagcgacctgaccgccccgaagaagcctgtggggtttttgccctctacgcaccgggcgaagaagtggcgcgcatggcctatttcgggctgtacgcgctccagcatcgtggacaagagtctgctggcatcgccgtctttgaaggcgatcgcgtcatgctccacaaggacatgggcttggtctcccaagtctttgatcccgaaatcctgcagcaactgcaaggcagccttgcggtcggtcatacccgctactccaccacgggatcaagccgtattgccaacgctcaaccggcgttgctggaaacccgccttgggccggtggccttggcgcacaacggcaacttggtcaacacggttgagttgcgccaagagctgctagctaagaaccacgagctgacgaccaccaccgattcagaactgattgccttcgcgatcatggaagcagtggcagaaggccaggactggcgcggggcgatcgagtctgcctgccgccgcagccaaggagcctttagcctgacgatcggcactcctgaggcactctacggcacccgtgaccccaatggcattaggccgcttgtgctgggcacgctggagagcaatggccaaacgcgctatgtgctttcttctgaaacctgcggtctcgacatcattggtgcggactacgtgcgcgatatcgcaccgggtgaaatggtgcggattacagatgcaggtctggaaagctggacttgggccgaggcgccgcagccgaagctctgcgtcttcgagatgatttactttgcgcggcctgatagcctctttcacggcgagtcgctttacagctatcgccgccgcatcggccaacgcttagccaaggaagctccggcggatgttgacctcgtgctgggtgtgcctgactccggtattccggctgcgattggtttttctgaagcgctgggcattccctacgccgaagggttaatcaaaaaccgctacgtggggcggacgttcatccagcccacccaatcgatgcgggaaacgggcattcgcatgaagctcaaccctctcaaggatgtcttagcgggcaaacgcattgccatcattgacgattcgatcgtgcggggaacaaccagccgcaaactggtcaaagctctgcgggatgcgggtgcaacggaagtgcatatgcggatttcttcaccgcctgtgacgcatccctgcttctacggcattgataccgacacccaagatcagctgattgctgccacgcgatcggtcagtgaaatcactgagcagattggtgtcgattctctggcttacctgacggagcagggaatgctggaggcgacccgagaaagtattggtaacttctgcacggcttgctttaacggtcgctacccgatcgcaattcccgaggagatcaagcgatcgaagctgatgctcgaaactgtaacggcctaa

SEQ ID NO: 30594 - protein, 493 aa, Synechococcus sp
MIPTQPLTADLDCDLGLERPDRPEEACGVFALYAPGEEVARMAYFGLYALQHRGQESAGIAVFEGDRVMLHKDMGLVSQVFDPEILQQLQGSLAVGHTRYSTTGSSRIANAQPALLETRLGPVALAHNGNLVNTVELRQELLAKNHELTTTTDSELIAFAIMEAVAEGQDWRGAIESACRRSQGAFSLTIGTPEALYGTRDPNGIRPLVLGTLESNGQTRYVLSSETCGLDIIGADYVRDIAPGEMVRITDAGLESWTWAEAPQPKLCVFEMIYFARPDSLFHGESLYSYRRRIGQRLAKEAPADVDLVLGVPDSGIPAAIGFSEALGIPYAEGLIKNRYVGRTFIQPTQSMRETGIRMKLNPLKDVLAGKRIAIIDDSIVRGTTSRKLVKALRDAGATEVHMRISSPPVTHPCFYGIDTDTQDQLIAATRSVSEITEQIGVDSLAYLTEQGMLEATRESIGNFCTACFNGRYPIAIPEEIKRSKLMLETVTA

SEQ ID NO: 30595 - DNA, 1488 bp, Synechocystis sp
  CDS (1)..(1488): transl_table=11
atgtttcccccctccagtgatttgactgagttgaatgatggtcagcctttgtctggccaccatgccgataaaccagaagaagcatgtggggtgtttggcatttacgcccctgaagaagcggtggccaaattgacctattttggactttatgccctgcaacatcggggtcaggagtcggcgggtattgccacttttgccgggacaacggttcactgccacaaggatatggggctagtgtcccaggtttttcaagaatctaaactgaatgaaatggtgggtactctggctgtgggccacacccgctactccaccacgggatccagccatcgggtcaatgctcaaccggcagtgctccctacccgtttgggtcccctggccctggcccacaatggcaatttggttaacactaaccagttgcgagaagctttagcggaaaggggctgtgaggactttgtcaccaccaccgattcggaaatgattgcagtggcgatcgccaatgaggtggataaaggcaaagactgggtggaaggcaccattgcggccctgaccctttgtgcgggagcctatagcttagtgatcggcacaccggagggaatcattggagtcagggatccccatggcattcgccccctggtgatcggtgtgttagaagaagaaactccccgctatgtattggcatcggaaacctgtgccctggacatcatcggtgccacctatgtgcgcacggtggaagccggagaattggtccatatcaccgaatctggcctagtttcccatcgattagccgaaagcgctgaccgtaaactctgtgtgttcgagatgatttatttttctcgcccggatagcgtggttaacgatgaaagcctctacacctatcgcatgcgcattggcaaacatttagccaaagaatcccctgtggatgctgatctcgtgatgggggtacccgattccggtattccagcggcgatcggcttttcccaagcttccggtattccctatgccgaaggtttaatcaaaaatcgttacgtggggcgtacctttatccaacccacccaacatatgcgagagcacggcatccgcatgaaactcaatcctctcaaagacgtattggccggtaaacggatcattatcgtcgatgactctattgtgcggggcaccactagtcgcaaaattgtccgagcgttacgggaagctggagcaacagaggtacatatgcggatttcttctccgccagtgacccatccttgcttctatggcattgataccgacagtcaagatcaactaattgcggccagactgacagtggcggagattgctgagcaaattgaagtggactccctcgcttatctttcccaggaaggcatgttgttgtgcaccggcgaagatatttcccatttttgttctgcctgcttcaatggaagataccccatcactgtgccagatgcggtcaggcgctctaaattaatgctggagaatattactgcttga

SEQ ID NO: 30596 - protein, 495 aa, Synechocystis sp
MFPPSSDLTELNDGQPLSGHHADKPEEACGVFGIYAPEEAVAKLTYFGLYALQHRGQESAGIATFAGTTVHCHKDMGLVSQVFQESKLNEMVGTLAVGHTRYSTTGSSHRVNAQPAVLPTRLGPLALAHNGNLVNTNQLREALAERGCEDFVTTTDSEMIAVAIANEVDKGKDWVEGTIAALTLCAGAYSLVIGTPEGIIGVRDPHGIRPLVIGVLEEETPRYVLASETCALDIIGATYVRTVEAGELVHITESGLVSHRLAESADRKLCVFEMIYFSRPDSVVNDESLYTYRMRIGKHLAKESPVDADLVMGVPDSGIPAAIGFSQASGIPYAEGLIKNRYVGRTFIQPTQHMREHGIRMKLNPLKDVLAGKRIIIVDDSIVRGTTSRKIVRALREAGATEVHMRISSPPVTHPCFYGIDTDSQDQLIAARLTVAEIAEQIEVDSLAYLSQEGMLLCTGEDISHFCSACFNGRYPITVPDAVRRSKLMLENITA

SEQ ID NO: 30597 - DNA, 1533 bp, Saccharomyces cerevisiae
  CDS (1)..(1533)
atgtgtggtattttaggtattgtattagcaaaccaaaccactccagtagctccggagttatgtgatggatgcatttttctacaacatcgtggacaagatgcagctggtatagctacctgtggttctcgtggtagaatctaccaatgtaaaggtaatggtatggctcgtgacgtatttacccaacaacgtgtttccggtcttgctggttccatgggtattgcccacttgagatatcctacagccgggtcttcggctaattcagaagcgcaaccattttacgtcaatagtccttacggtattaacttggcacataacggtaacttggtgaatactgcatcattgaagagatatatggatgaagacgttcatagacatattaacacggacagtgattcggagttactattgaatatttttgctgctgaactggaaaaacataacaagtacagagttaacaatgaagatgttttccacgcgttagaaggtgtttaccgtttatgccgtggcggttatgcttgcgttggtttacttgccggttttgcattatttggtttcagagatccaaatggtattaggccattattgttcggtgaaagagaaaatccggacggcactaaggactatatgttagcttcagaaagtgttgttttcaaagctcacaactttactaaatatcgtgacttaaagcctggcgaggcagttatcatccctaagaactgtagcaaaggtgaacctgagttcaaacaagtggttcctattaactcttatagacctgatttatttgaatacgtatatttcgccagaccggacagtgtcttggatggaatatcagtttatcacacaagattggctatgggttctaaattagcggaaaatattctaaagcaactgaagccagaagatattgatgttgttattcccgtcccagatactgcaagaacatgtgcactagaatgtgctaatgtgttagggaagccttatagagagggctttgttaaaaacagatacgtgggcaggacatttatcatgccaaaccagagggaaagggtttcttcagtaaggaggaagcttaaccctatggagtctgaatttaagggtaagaaggttctgatagtggatgattctattgtcagaggtactacttcaaaagagattgttaacatggccaaggaatccggtgcaacaaaggtttacttcgcttcagctgccccagccattcgttacaaccatatttatggtattgacttaacagacacaaagaacttgattgcttataacagaaccgatgaagaagtggcggaagtaatcggttgtgaaagagtcatttaccaatcattggaagatttgattgattgttgtaaaactgataaaataaccaaattcgaagatggtgtatttaccggaaattatgtcactggtgttgaagacggttatattcaagaattggaagaaaaacgtgaatcgatcgcaaataattcatcagatatgaaggctgaagtcgatatcggattatataattgtgcagattattga

SEQ ID NO: 30598 - protein, 510 aa, Saccharomyces cerevisiae
MCGILGIVLANQTTPVAPELCDGCIFLQHRGQDAAGIATCGSRGRIYQCKGNGMARDVFTQQRVSGLAGSMGIAHLRYPTAGSSANSEAQPFYVNSPYGINLAHNGNLVNTASLKRYMDEDVHRHINTDSDSELLLNIFAAELEKHNKYRVNNEDVFHALEGVYRLCRGGYACVGLLAGFALFGFRDPNGIRPLLFGERENPDGTKDYMLASESVVFKAHNFTKYRDLKPGEAVIIPKNCSKGEPEFKQVVPINSYRPDLFEYVYFARPDSVLDGISVYHTRLAMGSKLAENILKQLKPEDIDVVIPVPDTARTCALECANVLGKPYREGFVKNRYVGRTFIMPNQRERVSSVRRKLNPMESEFKGKKVLIVDDSIVRGTTSKEIVNMAKESGATKVYFASAAPAIRYNHIYGIDLTDTKNLIAYNRTDEEVAEVIGCERVIYQSLEDLIDCCKTDKITKFEDGVFTGNYVTGVEDGYIQELEEKRESIANNSSDMKAEVDIGLYNCADY

SEQ ID NO: 30599 - DNA, 23 bp, Artificial sequence
  Primer sequence
atgtgcggtattgtcggtatcgc

SEQ ID NO: 30600 - DNA, 27 bp, Artificial sequence
  Primer sequence
ttatccttcgttatgcatttcgagatt

SEQ ID NO: 30601 - protein, 641 aa, Artificial sequence
  Consensus
  Variant (4)..(4): Xaa in position 4 is any amino acid
  Variant (7)..(17): Xaa in position 7 to 17 is any amino acid
  Variant (18)..(33): Xaa in position 18 to 33 is any or no amino acid
  Variant (36)..(37): Xaa in position 36 to 37 is any amino acid
  Variant (45)..(45): Xaa in position 45 is any amino acid
  Variant (49)..(55): Xaa in position 49 to 55 is any amino acid
  Variant (56)..(67): Xaa in position 56 to 67 is any or no amino acid
  Variant (69)..(70): Xaa in position 69 to 70 is any amino acid
  Variant (74)..(75): Xaa in position 74 to 75 is any amino acid
  Variant (78)..(79): Xaa in position 78 to 79 is any amino acid
  Variant (80)..(88): Xaa in position 80 to 88 is any or no amino acid
  Variant (90)..(103): Xaa in position 90 to 103 is any or no amino acid
  Variant (105)..(105): Xaa in position 105 is any or no amino acid
  Variant (107)..(108): Xaa in position 107 to 108 is any or no amino acid
  Variant (113)..(113): Xaa in position 113 is any amino acid
  Variant (116)..(116): Xaa in position 116 is any amino acid
  Variant (118)..(118): Xaa in position 118 is any amino acid
  Variant (120)..(123): Xaa in position 120 to 123 is any amino acid
  Variant (124)..(129): Xaa in position 124 to 129 is any or no amino acid
  Variant (132)..(139): Xaa in position 132 to 139 is any or no amino acid
  Variant (141)..(142): Xaa in position 141 to 142 is any or no amino acid
  Variant (144)..(144): Xaa in position 144 is any or no amino acid
  Variant (146)..(146): Xaa in position 146 is any or no amino acid
  Variant (152)..(152): Xaa in position 152 is any or no amino acid
  Variant (154)..(155): Xaa in position 154 to 155 is any amino acid
  Variant (156)..(156): Xaa in position 156 is any or no amino acid
  Variant (158)..(163): Xaa in position 158 to 163 is any or no amino acid
  Variant (165)..(180): Xaa in position 165 to 180 is any or no amino acid
  Variant (182)..(184): Xaa in position 182 to 184 is any or no amino acid
  Variant (191)..(192): Xaa in position 191 to 192 is any amino acid
  Variant (194)..(205): Xaa in position 194 to 205 is any amino acid
  Variant (206)..(228): Xaa in position 206 to 228 is any or no amino acid
  Variant (233)..(235): Xaa in position 233 to 235 is any amino acid
  Variant (236)..(236): Xaa in position 236 is any or no amino acid
  Variant (238)..(241): Xaa in position 238 to 241 is any amino acid
  Variant (243)..(243): Xaa in position 243 is any amino acid
  Variant (245)..(245): Xaa in position 245 is any amino acid
  Variant (249)..(249): Xaa in position 249 is any amino acid
  Variant (251)..(251): Xaa in position 251 is any amino acid
  Variant (255)..(255): Xaa in position 255 is any amino acid
  Variant (258)..(261): Xaa in position 258 to 261 is any amino acid
  Variant (262)..(277): Xaa in position 262 to 277 is any or no amino acid
  Variant (285)..(285): Xaa in position 285 is any amino acid
  Variant (287)..(288): Xaa in position 287 to 288 is any amino acid
  Variant (289)..(289): Xaa in position 289 is any or no amino acid
  Variant (291)..(293): Xaa in position 291 to 293 is any amino acid
  Variant (294)..(299): Xaa in position 294 to 299 is any or no amino acid
  Variant (303)..(303): Xaa in position 303 is any amino acid
  Variant (307)..(307): Xaa in position 307 is any amino acid
  Variant (309)..(309): Xaa in position 309 is any amino acid
  Variant (311)..(326): Xaa in position 311 to 326 is any amino acid
  Variant (327)..(343): Xaa in position 327 to 343 is any or no amino acid
  Variant (345)..(345): Xaa in position 345 is any amino acid
  Variant (357)..(357): Xaa in position 357 is any or no amino acid
  Variant (359)..(361): Xaa in position 359 to 361 is any amino acid
  Variant (362)..(362): Xaa in position 362 is any or no amino acid
  Variant (365)..(366): Xaa in position 365 to 366 is any amino acid
  Variant (368)..(370): Xaa in position 368 to 370 is any amino acid
  Variant (372)..(373): Xaa in position 372 to 373 is any amino acid
  Variant (376)..(382): Xaa in position 376 to 382 is any amino acid
  Variant (383)..(390): Xaa in position 383 to 390 is any or no amino acid
  Variant (395)..(395): Xaa in position 395 is any amino acid
  Variant (400)..(402): Xaa in position 400 to 402 is any amino acid
  Variant (406)..(407): Xaa in position 406 to 407 is any amino acid
  Variant (409)..(412): Xaa in position 409 to 412 is any amino acid
  Variant (414)..(414): Xaa in position 414 is any amino acid
  Variant (415)..(443): Xaa in position 415 to 443 is any or no amino acid
  Variant (445)..(446): Xaa in position 445 to 446 is any amino acid
  Variant (448)..(448): Xaa in position 448 is any amino acid
  Variant (452)..(452): Xaa in position 452 is any amino acid
  Variant (460)..(460): Xaa in position 460 is any amino acid
  Variant (462)..(463): Xaa in position 462 to 463 is any or no amino acid
  Variant (465)..(466): Xaa in position 465 to 466 is any or no amino acid
  Variant (468)..(470): Xaa in position 468 to 470 is any amino acid
  Variant (473)..(473): Xaa in position 473 is any amino acid
  Variant (475)..(477): Xaa in position 475 to 477 is any amino acid
  Variant (479)..(483): Xaa in position 479 to 483 is any amino acid
  Variant (484)..(484): Xaa in position 484 is any or no amino acid
  Variant (486)..(486): Xaa in position 486 is any amino acid
  Variant (500)..(502): Xaa in position 500 to 502 is any amino acid
  Variant (505)..(505): Xaa in position 505 is any amino acid
  Variant (507)..(507): Xaa in position 507 is any amino acid
  Variant (509)..(509): Xaa in position 509 is any amino acid
  Variant (512)..(512): Xaa in position 512 is any or no amino acid
  Variant (514)..(515): Xaa in position 514 to 515 is any amino acid
  Variant (518)..(520): Xaa in position 518 to 520 is any amino acid
  Variant (524)..(524): Xaa in position 524 is any amino acid
  Variant (526)..(527): Xaa in position 526 to 527 is any amino acid
  Variant (529)..(530): Xaa in position 529 to 530 is any amino acid
  Variant (535)..(540): Xaa in position 535 to 540 is any amino acid
  Variant (544)..(550): Xaa in position 544 to 550 is any amino acid
  Variant (551)..(577): Xaa in position 551 to 577 is any or no amino acid
  Variant (579)..(581): Xaa in position 579 to 581 is any amino acid
  Variant (584)..(584): Xaa in position 584 is any amino acid
  Variant (586)..(586): Xaa in position 586 is any amino acid
  Variant (588)..(588): Xaa in position 588 is any amino acid
  Variant (590)..(591): Xaa in position 590 to 591 is any amino acid
  Variant (593)..(594): Xaa in position 593 to 594 is any amino acid
  Variant (596)..(597): Xaa in position 596 to 597 is any amino acid
  Variant (600)..(608): Xaa in position 600 to 608 is any amino acid
  Variant (609)..(638): Xaa in position 609 to 638 is any or no amino acid
  Variant (640)..(640): Xaa in position 640 is any amino acid
CGVXGIXXXXXXXXXXXXXXXXXXXXXXXXXXXGLXXLQHRGQEXAGIXXXXXXXXXXXXXXXXXXXKXXGLVXXVFXXXXXXXXXXXLXXXXXXXXXXXXXXLXGXXGIGHXRYXTXGXXXXXXXXXXQPXXXXXXXXGXXIXLXHNGNLXNXXXLXXXXXXLXXXXXXXXXXXXXXXXTXXXSDSEVLXXLXXXXXXXXXXXXXXXXXXXXXXXXXXXXXXXXXXXGAYAXXXXMXXXXLXAXRDPXGXRPLXLGXXXXXXXXXXXXXXXXXXXXYVVASETXAXXXIXXXXXXXXXRDVXPGEXVXIXXXXXXXXXXXXXXXXXXXXXXXXXXXXXXXXXCXFEYVYFARPDSXIXXXXVYXXRXXXGXXLAXXXXXXXXXXXXXXXDVVIXVPDSXXXAALXXAXXXXIXXXXXXXXXXXXXXXXXXXXXXXXXXXXXXYXXGXIKNXYVGRTFIXPXXQXXRXXXVRXKXXXVXXXXXXKXVVLVDDSIVRGTTXXXIVXMXRXAGXAXXVHXXXASPXIXXPXXYGIDXXXXXXLIAXXXXXXXXXXXXXXXXXXXXXXXXXXXXXXXXXXIXXXIGXDXLXYXXLXXLXXAVXXXXXXXXXXXXXXXXXXXXXXXXXXXXXXXXXXXXXXXGXY

SEQ ID NO: 30602 - protein, 15 aa, Artificial sequence
  Consensus
  Variant (2)..(3): Xaa in position 2 to 3 is any or no amino acid
  Variant (5)..(5): Xaa in position 5 is any or no amino acid
  Variant (11)..(11): Xaa in position 11 is Asp or Glu
  Variant (12)..(12): Xaa in position 12 is Ala, Gly or Ser
  Variant (13)..(13): Xaa in position 13 is Ala, Ser or Thr
LXXLXQHRGQXXXGI

SEQ ID NO: 30603 - protein, 41 aa, Artificial sequence
  Consensus
  Variant (3)..(3): Xaa in position 3 is Ala, Pro or Ser
  Variant (5)..(5): Xaa in position 5 is Ala, Gln, Ser or Thr
  Variant (7)..(13): Xaa in position 7 to 13 is any amino acid
  Variant (14)..(14): Xaa in position 14 is any or no amino acid
  Variant (17)..(28): Xaa in position 17 to 28 is any amino acid
  Variant (29)..(30): Xaa in position 29 to 30 is any or no amino acid
  Variant (34)..(34): Xaa in position 34 is Asp, Glu or Asn
  Variant (35)..(35): Xaa in position 35 is Phe, Ile or Leu
  Variant (36)..(36): Xaa in position 36 is any amino acid
  Variant (38)..(40): Xaa in position 38 to 40 is any amino acid
  Variant (41)..(41): Xaa in position 41 is Ile, Leu or Val
RYXTXGXXXXXXXXQPXXXXXXXXXXXXXXHNGXXXNXXXX

SEQ ID NO: 30604 - protein, 41 aa, Artificial sequence; identical to SEQ ID NO: 30603
  Consensus
  Variant (3)..(3): Xaa in position 3 is Ala, Pro or Ser
  Variant (5)..(5): Xaa in position 5 is Ala, Gln, Ser or Thr
  Variant (7)..(13): Xaa in position 7 to 13 is any amino acid
  Variant (14)..(14): Xaa in position 14 is any or no amino acid
  Variant (17)..(28): Xaa in position 17 to 28 is any amino acid
  Variant (29)..(30): Xaa in position 29 to 30 is any or no amino acid
  Variant (34)..(34): Xaa in position 34 is Asp, Glu or Asn
  Variant (35)..(35): Xaa in position 35 is Phe, Ile or Leu
  Variant (36)..(36): Xaa in position 36 is any amino acid
  Variant (38)..(40): Xaa in position 38 to 40 is any amino acid
  Variant (41)..(41): Xaa in position 41 is Ile, Leu or Val

SEQ ID NO: 30605 - protein, 20 aa, Artificial sequence
  Consensus
  Variant (3)..(3): Xaa in position 3 is Ser or Thr
  Variant (4)..(4): Xaa in position 4 is any amino acid
  Variant (5)..(5): Xaa in position 5 is Ala, Gly, Ser or Val
  Variant (6)..(6): Xaa in position 6 is Phe, Ile, Leu or Val
  Variant (7)..(14): Xaa in position 7 to 14 is any amino acid
  Variant (16)..(16): Xaa in position 16 is Asp, Glu, Asn, Gln, Ser or Thr
  Variant (17)..(17): Xaa in position 17 is Phe, Ile, Leu or Val
  Variant (18)..(19): Xaa in position 18 to 19 is any amino acid
SEXXXXXXXXXXXXRXXXXG

SEQ ID NO: 30606 - protein, 28 aa, Artificial sequence
  Consensus
  Variant (2)..(2): Xaa in position 2 is any amino acid
  Variant (3)..(3): Xaa in position 3 is Ile or Val
  Variant (5)..(5): Xaa in position 5 is Phe or Leu
  Variant (6)..(6): Xaa in position 6 is Ala or Ser
  Variant (11)..(11): Xaa in position 11 is any amino acid
  Variant (12)..(12): Xaa in position 12 is Phe, Ile, Leu, Met or Val
  Variant (13)..(16): Xaa in position 13 to 16 is any amino acid
  Variant (17)..(17): Xaa in position 17 is Ile, Leu or Val
  Variant (18)..(20): Xaa in position 18 to 20 is any amino acid
  Variant (22)..(24): Xaa in position 22 to 24 is any amino acid
  Variant (26)..(27): Xaa in position 26 to 27 is any amino acid
EXXYXXRPDSXXXXXXXXXXRXXXGXXL

SEQ ID NO: 30607 - protein, 86 aa, Artificial sequence
  Consensus
  Variant (5)..(5): Xaa in position 5 is any amino acid
  Variant (7)..(8): Xaa in position 7 to 8 is any amino acid
  Variant (9)..(10): Xaa in position 9 to 10 is any or no amino acid
  Variant (12)..(14): Xaa in position 12 to 14 is any amino acid
  Variant (15)..(15): Xaa in position 15 is Ile or Val
  Variant (16)..(17): Xaa in position 16 to 17 is any amino acid
  Variant (19)..(19): Xaa in position 19 is any amino acid
  Variant (20)..(20): Xaa in position 20 is Gly, Asn, Ser or Thr
  Variant (21)..(21): Xaa in position 21 is Ala, Pro, Thr or Val
  Variant (22)..(25): Xaa in position 22 to 25 is any amino acid
  Variant (26)..(26): Xaa in position 26 is Phe, Ile, Leu or Val
  Variant (27)..(30): Xaa in position 27 to 30 is any amino acid
  Variant (31)..(31): Xaa in position 31 is Ile, Leu or Val
  Variant (32)..(32): Xaa in position 32 is any amino acid
  Variant (33)..(33): Xaa in position 33 is Ile, Leu, Met or Val
  Variant (34)..(34): Xaa in position 34 is Ile or Val
  Variant (42)..(42): Xaa in position 42 is Asn or Thr
  Variant (44)..(46): Xaa in position 44 to 46 is any amino acid
  Variant (47)..(47): Xaa in position 47 is Ile, Leu or Val
  Variant (48)..(48): Xaa in position 48 is Ile, Leu, Met or Val
  Variant (49)..(54): Xaa in position 49 to 54 is any amino acid
  Variant (57)..(58): Xaa in position 57 to 58 is any amino acid
  Variant (59)..(59): Xaa in position 59 is Ile, Leu or Val
  Variant (60)..(63): Xaa in position 60 to 63 is any amino acid
  Variant (64)..(64): Xaa in position 64 is Ala, Cys, Gly, Ser, Thr or Val
  Variant (65)..(65): Xaa in position 65 is any amino acid
  Variant (67)..(74): Xaa in position 67 to 74 is any amino acid
  Variant (76)..(83): Xaa in position 76 to 83 is any amino acid
  Variant (84)..(84): Xaa in position 84 is Phe or Leu
  Variant (85)..(85): Xaa in position 85 is Ile, Leu, Met or Val
  Variant (86)..(86): Xaa in position 86 is Ala, Cys, Gly or Ser
RTFIXPXXXXRXXXXXXKXXXXXXXXXXXXXXXXDDSIVRGXTXXXXXXXXXXXGAXXXXXXXXXPXXXXXXXXGXXXXXXXXXXX

SEQ ID NO: 30608 - DNA, 1329 bp, Escherichia coli
  CDS (1)..(1329)
atggaaaacgctaaaatgaactcgctcatcgcccagtatccgttggtaaaggatctggttgctcttaaagaaaccacctggtttaatcctggcacgacctcattggctgaaggtttaccttatgttggcctgaccgaacaggatgttcaggacgcccatgcgcgcttatcccgttttgcaccctatctggcaaaagcatttcctgaaactgctgccactggggggattattgaatcagaactggttgccattccagctatgcaaaaacggctggaaaaagaatatcagcaaccgatcagcgggcaactgttactgaaaaaagatagccatttgcccatttccggctccataaaagcacgcggcgggatttatgaagtcctggcacacgcagaaaaactggctctggaagcggggttgctgacgcttgatgatgactacagcaaactgctttctccggagtttaaacagttctttagccaatacagcattgctgtgggctcaaccggaaatctggggttatcaatcggcattatgagcgcccgcattggctttaaggtgacagttcatatgtctgctgatgcccgggcatggaaaaaagcgaaactgcgcagccatggcgttacggtcgtggaatatgagcaagattatggtgttgccgtcgaggaaggacgtaaagcagcgcagtctgacccgaactgtttctttattgatgacgaaaattcccgcacgttgttccttgggtattccgtcgctggccagcgtcttaaagcgcaatttgcccagcaaggccgtatcgtcgatgctgataaccctctgtttgtctatctgccgtgtggtgttggcggtggtcctggtggcgtcgcattcgggcttaaactggcgtttggcgatcatgttcactgcttttttgccgaaccaacgcactccccttgtatgttgttaggcgtccatacaggattacacgatcagatttctgttcaggatattggtatcgacaaccttaccgcagcggatggccttgcagttggtcgcgcatcaggctttgtcgggcgggcaatggagcgtctgctggatggcttctatacccttagcgatcaaaccatgtatgacatgcttggctggctggcgcaggaagaaggtattcgtcttgaaccttcggcactggcgggtatggccggacctcagcgcgtgtgtgcatcagtaagttaccaacagatgcacggtttcagcgcagaacaactgcgtaataccactcatctggtgtgggcgacgggaggtggaatggtgccggaagaagagatgaatcaatatctggcaaaaggccgttaa

SEQ ID NO: 30609 - protein, 442 aa, Escherichia coli
MENAKMNSLIAQYPLVKDLVALKETTWFNPGTTSLAEGLPYVGLTEQDVQDAHARLSRFAPYLAKAFPETAATGGIIESELVAIPAMQKRLEKEYQQPISGQLLLKKDSHLPISGSIKARGGIYEVLAHAEKLALEAGLLTLDDDYSKLLSPEFKQFFSQYSIAVGSTGNLGLSIGIMSARIGFKVTVHMSADARAWKKAKLRSHGVTVVEYEQDYGVAVEEGRKAAQSDPNCFFIDDENSRTLFLGYSVAGQRLKAQFAQQGRIVDADNPLFVYLPCGVGGGPGGVAFGLKLAFGDHVHCFFAEPTHSPCMLLGVHTGLHDQISVQDIGIDNLTAADGLAVGRASGFVGRAMERLLDGFYTLSDQTMYDMLGWLAQEEGIRLEPSALAGMAGPQRVCASVSYQQMHGFSAEQLRNTTHLVWATGGGMVPEEEMNQYLAKGR

SEQ ID NO: 30610 - DNA, 1311 bp, Lactobacillus plantarum WCFS1
  CDS (1)..(1311): transl_table=11
atggatacaacggtaatgattgaagaacacccacagattaaggaattgatagcaaaacgaccaattgtttggcagaacccagattatgggaagcgggcggacctgccgttaacgcgggccgatatttttgacgcggtcgcacgttgggaacgtttcgcaccatttttggccgttgcttttccagaaacggcagctatgaatgggattattgagtcaccattgttaccacttgagcagatgaaaccagcatgggaggctctcaaccaccagtcattggcggggcagctttatttaaaagctgatagtcagttgccgatttcgggttcgatcaagtcacgtggtgggatttacgaagtgctcaagtttgctgaacaggtagccatggcccatacggatttaacgtatatggatgattacagtgtcttggcaacggctaagtatcacgagttatttgcacaatacggcgtcatcgttgcatcgacgggaaacttggcactcagtgtgggcatcatggccgcaacgtttggatttaagacgaccgtttatatgtctcacgatgctcgtcagtggaagaaggataaactgcgggcaaatggcgtcaccgttgaggaactaaataccgacttttcaagtgtgattccggtggcccgtgccgccgcggccaaggatgaccatacgcactttgttgatgatgaaggttcacgtgacttattcctcgggtacgctgttgctggggtacggttacaacatcaattaaaagtacaaggtatcaagatggatgctgcacacccggttgtcgtttatttaccggccggggtcggtggcagtcctagtggcgttgcttttggcctcaagatgattatgggagctaatatttatcccgtcttttgtgaaccgacccacgtgccgtccgtgaccttagggatgatgaccaagctgaatgaaaaaattgctgttcaagacattggtttagatggcctgactgccgctgatgggttagccgttagccggccatcacgattggcgggcaaggtgatgcgaacgctattactcggaacagcaacatttgaagatgatgatttataccgttatttgacgaagctcgtcgataccgaagatgtaatagtcgaaccatccgctgcagccggctttaccgcgatcgcccccatcatggcccaatttcccacgcttgctggcaaagacgtcacccacattgtctgggcaactggcggcgacatgatgccggaatcggagcgtcagttggattatgagctaggacaaaaattgctgaccaagattaacaatcgttaa

SEQ ID NO: 30611 - protein, 436 aa, Lactobacillus plantarum WCFS1
MDTTVMIEEHPQIKELIAKRPIVWQNPDYGKRADLPLTRADIFDAVARWERFAPFLAVAFPETAAMNGIIESPLLPLEQMKPAWEALNHQSLAGQLYLKADSQLPISGSIKSRGGIYEVLKFAEQVAMAHTDLTYMDDYSVLATAKYHELFAQYGVIVASTGNLALSVGIMAATFGFKTTVYMSHDARQWKKDKLRANGVTVEELNTDFSSVIPVARAAAAKDDHTHFVDDEGSRDLFLGYAVAGVRLQHQLKVQGIKMDAAHPVVVYLPAGVGGSPSGVAFGLKMIMGANIYPVFCEPTHVPSVTLGMMTKLNEKIAVQDIGLDGLTAADGLAVSRPSRLAGKVMRTLLLGTATFEDDDLYRYLTKLVDTEDVIVEPSAAAGFTAIAPIMAQFPTLAGKDVTHIVWATGGDMMPESERQLDYELGQKLLTKINNR

SEQ ID NO: 30612 - DNA, 1347 bp, Chromobacterium violaceum ATCC 12472
  CDS (1)..(1347): transl_table=11
atgattcatggaaaaacgctggctgaatggcagcagtcccatcccgagattcgcgaattgaccggcctgcgcgagtgcgcctggttcaatcccgccgccgcccccgccgccgaggcattgcccgatgtcggacttggcgcggcagacatcgccgacgcatccgcccgcctgcggcgtttcgcgccatacatatcccgcgcattccccgaaaccgccgccagcggcgggatcatagaatcgccgctgctgcccgtacccgccttccagcaagcgctggcccgccgccgcggacgcgagttgccgggacgcctttggctgaaggcggacagccacttgcccatctcgggctcgatcaaagcacgcggcggcatctacgaggtgctgaagcatgcggaagacctggcgctggccaacggcctgctccagcccggcgacgactacgccaggctggcctccccggaagcccgctcgctgttcagccgccatggcatcgccgtcggctccaccggcaatctgggcctgtcgataggcatcatggcggccaagctgggcttccaggccgccgtccacatgtcggccgacgccaggcaatggaaaaaggacaagttgcgcgcgcacggcgtaaccgtggtcgaataccagaccgactacagcgcggcggtggcgcggggacgggaacaggcggcgcgcgacccggattgccatttcgtcgacgacgaaaattccatccacctgttcttgggctacgccgtggcggcggaacggctgaaggctcaattggcggaagccggcgtgcgcgtggacgccgatcatccgctgttcgtctatctgccctgcggcgtgggaggcgggcccggcggcgtggccttcgggctcaagcaggccttcggcgacgcggtccattgcctgttcgcggaacccacccgctcgccctgcatgctgctgggcgtgctcaccggcctgcatgacaaggtctcggtgcaggacttcggcatcgacaaccgcaccgtcgcggacggtctggccgtcggccggccgtcgggattcgtcggccgcgcgatgcagaggctgatagacggctattacacggtggacgacgatgagctgttccgcctgctggcgatgctggaacagacggaaggcctgcggctggagccgtcggcgctggcaggcgcgccgggcatcgcccgcgtgctggaggaaaaccagggctaccgccagcgcatggggctggacgcggatcgcctcgcctgcgccacccatctgatctgggcgaccggcggcagcatggtgccggaagcggagatggacggctacctgcggcgcggccgcgcgctgctgggctga

SEQ ID NO: 30613 - protein, 448 aa, Chromobacterium violaceum ATCC 12472
MIHGKTLAEWQQSHPEIRELTGLRECAWFNPAAAPAAEALPDVGLGAADIADASARLRRFAPYISRAFPETAASGGIIESPLLPVPAFQQALARRRGRELPGRLWLKADSHLPISGSIKARGGIYEVLKHAEDLALANGLLQPGDDYARLASPEARSLFSRHGIAVGSTGNLGLSIGIMAAKLGFQAAVHMSADARQWKKDKLRAHGVTVVEYQTDYSAAVARGREQAARDPDCHFVDDENSIHLFLGYAVAAERLKAQLAEAGVRVDADHPLFVYLPCGVGGGPGGVAFGLKQAFGDAVHCLFAEPTRSPCMLLGVLTGLHDKVSVQDFGIDNRTVADGLAVGRPSGFVGRAMQRLIDGYYTVDDDELFRLLAMLEQTEGLRLEPSALAGAPGIARVLEENQGYRQRMGLDADRLACATHLIWATGGSMVPEAEMDGYLRRGRALLG

SEQ ID NO: 30614 - DNA, 1332 bp, Photorhabdus luminescens subsp. laumondii TTO1
  CDS (1)..(1332): transl_table=11
atgaaacgtactgaaattcaacaattactaaatgaatatccgttagtaaaaaatttgatggaattagaggaaatcttctggtttaacccttgtaataccaccttgaaagagggattgccttttgtcggtttgggcgctgatgatgttgaggatgctgaagcacgcttggatcgttttgcgtcttatttatgtaaagcttttccagaaacagccgtcacacatggcattattgaatcagaaatagtggctatacctacgatgcaaaaaacactggagcaacattatggtgtgggtatcacagggagaattttgcttaaaaaagatagccatttgcccatttccggttcgattaaagcccgtggtggaatttatgaagtgttaactcacgcggaaaaactggcattacaagcggggttgcttgctgaaaacgatgattacagcaaactgttttcagaagagcttagacggttctttaatcaatacagcattgctgtaggttctaccggcaatttggggctttccataggtattgccagtgcaaaattaggctttaatgtcagcgtgcatatgtccgccgatgctcgtgaatggaagaagcaaaagctacgttcacatggggtcaatgtcgtggagcatgagctagattatggggtagccgtggcccgagggcgtaaagaagccgaatctgctcctaactgtttctttattgacgatgaaaactcccaaacgttgtttctgggatactctgtcgcaggtggacgggtaaaggcgcagtttgagcagatgaatattgtggttgatgaagatcacccactcttcgtttatttgccgtgtggcgtcggtggcggtccggggggggttgcatttggattgaaactggcttttggtgatcatgtgcactgcatttttgctgaaccgacccattctcccagtatgttgttgggggtatatactggtttgcatgacaatatttgcgtgcaggatatcgggatcgacaatatcactgctgctgatggtcttgcggtaggcagggcttccggctttgttgggcgtgcgatggaacgtttgctggatggattttatactgttcaagatcaggaaatgtataacctgttgggcttactggatcgtgatgaaggtatccggttagagccttcggcgctagttgggatggcgggccctgctcgtgtgagtggaaaccttgattacctgaacaataagaacctttcagcagaaaagatgaaacaggctacgcatttggtctgggcaaccggtggtggtatggtacccgatgatgaaatgacaaaatatttggcgacagccaagatctaa

SEQ ID NO: 30615 - protein, 443 aa, Photorhabdus luminescens subsp. laumondii TTO1
MKRTEIQQLLNEYPLVKNLMELEEIFWFNPCNTTLKEGLPFVGLGADDVEDAEARLDRFASYLCKAFPETAVTHGIIESEIVAIPTMQKTLEQHYGVGITGRILLKKDSHLPISGSIKARGGIYEVLTHAEKLALQAGLLAENDDYSKLFSEELRRFFNQYSIAVGSTGNLGLSIGIASAKLGFNVSVHMSADAREWKKQKLRSHGVNVVEHELDYGVAVARGRKEAESAPNCFFIDDENSQTLFLGYSVAGGRVKAQFEQMNIVVDEDHPLFVYLPCGVGGGPGGVAFGLKLAFGDHVHCIFAEPTHSPSMLLGVYTGLHDNICVQDIGIDNITAADGLAVGRASGFVGRAMERLLDGFYTVQDQEMYNLLGLLDRDEGIRLEPSALVGMAGPARVSGNLDYLNNKNLSAEKMKQATHLVWATGGGMVPDDEMTKYLATAKI

SEQ ID NO: 30616 - DNA, 1332 bp, Bacillus cereus ATCC 10987
  CDS (1)..(1332): transl_table=11
atgaaggaaatagagaaattaaaagaggaatatccactcttaaataaattaatcgcaacagaagaagtgttttgggtgaatccgaacatggaaaagtatgaaacggcaataaaagattcgccactgaatgaagagaatgtaaaagatgcggaagagaggttaaagcgttttgcaccatatattgcgaaagtttttcctgaaacgaaagagactaacggcataattgaatcacctttagtgaaaatcccttcaatgaaacaagctttagagaaaaattatgagcaacctattttaggagaattattattaaaatgtgatagtcatcttccgatatcagggtcaattaaagctaggggcggcatttatgaagtgttgaagcatgctgagcaattagcgttgcagtatggtatgttaacagaagaagatgattattccattttagatagtgatacatgtagagagttttttgccacgtattctatcgcagtcggttcaacaggaaatttagggctaagcattgggattatgagtgcgaaactaggttttaacgtaacggttcatatgtcagcagatgcgaaacaatggaaaaaagatttattaagaagtaaaggtgtaaatgttattgaatatgaagctgattacagtaaagctgtagaagaaggaagaaggcaagcagatgcagatcctagctgttattttgtagatgatgaaaactcacatgatttatttttaggatacgcagtagcagcctcgcgtttacaaaaacaattagaagagttagagattgtagtggatgaagaacatcctttattcgtttatctaccatgcggagtagggggcggacctggcggagtcgcatttggtttaaagttattgtataaagacaacgtacactgtttctttgccgagcctacgcattctccatgcatgttactcggtttaatgacaggacttcatgataaaattgccgttcaagatatcgggattgataatgtaacagacgcggacggactagcggtaggaagaccgtctggatttgtcggtaaaacgatagaaccatttttgagtggaaattacacagtaagtgatgaagagttatatagattattaaaagaactagctgatacggaaaagatttatttagagccttctgcattagccggtatgataggaccagtgaaagtatgtgcagaagatgagtatttacaaaaacaacagttaacagagaagatgaagaaaggtactcatattgtgtggggaactggcggtagtatggttccagaagatgtgatgaatgggtattataagaaaggtttagaattaatactgtaa

SEQ ID NO: 30617 - protein, 443 aa, Bacillus cereus ATCC 10987
MKEIEKLKEEYPLLNKLIATEEVFWVNPNMEKYETAIKDSPLNEENVKDAEERLKRFAPYIAKVFPETKETNGIIESPLVKIPSMKQALEKNYEQPILGELLLKCDSHLPISGSIKARGGIYEVLKHAEQLALQYGMLTEEDDYSILDSDTCREFFATYSIAVGSTGNLGLSIGIMSAKLGFNVTVHMSADAKQWKKDLLRSKGVNVIEYEADYSKAVEEGRRQADADPSCYFVDDENSHDLFLGYAVAASRLQKQLEELEIVVDEEHPLFVYLPCGVGGGPGGVAFGLKLLYKDNVHCFFAEPTHSPCMLLGLMTGLHDKIAVQDIGIDNVTDADGLAVGRPSGFVGKTIEPFLSGNYTVSDEELYRLLKELADTEKIYLEPSALAGMIGPVKVCAEDEYLQKQQLTEKMKKGTHIVWGTGGSMVPEDVMNGYYKKGLELIL

SEQ ID NO: 30618 - DNA, 1326 bp, Acinetobacter sp. ADP1
  CDS (1)..(1326): transl_table=11
atgactacattaaatattcaagccatacaacaagattcattaatcaagtcgctaaaaaattacgaagaaattttttggtttcagccagaacccacgccgattgagcagggattaaaacgtaccagtcttactcttgccgatattcaggatgccgaagcacgtttaacacgatttgcaccttatctggaaaaagtatttcctgaactgagaagtacacagggcaaaattgagtctgagattgtatctatcccaacaatgcaacatgactgtagcaaacgctttgcaatcgaaccaaatggaacatggtggctgaaaaaagatagtcatttacctatttctggttcaattaaggcgcgtggtggaatctatgaggtactggctcatgctgaaaagttggcacttaaagcgggtttagttacattgcaagataactattcacaactcgatagtgatcaggcacgtcaatttttctcaaattatcaaattgcagtaggatcaactggaaatttggggttatcgattggaattatgagtgccaaactaggctttcgagtgagtgtgcatatgtcagcagatgcacgtcagtggaaaaaagacaagctacgttcactgggtgtcaatgtggttgaatatgccagtgattatggtgttgcagtagagcagggacgcaaagctgcagagtcagatccaaactgctttttcattgatgatgagaactcgaccactttatttttaggctatgctgttgctggcttacgtttaaaacagcaattaatcgatcagaatattcaagttgatgctgagcatcctttatttgtttatttaccttgtggagtaggcggtggccctggtggtgtgagttttggacttaaacatgcccttggtgagcatgtacactgtatttttgccgaaccgactcactcaccttgcatgctgctcggggtttatacgggtttacatgatcagatttgtgtagcagatattggattggataatgctaccgctgccgatgggcttgcggtgggacgtgcttcaggttttgttggacgggctatgcaagatctgattgatggttactacactatttcagatcaacacttatttgagtttattcgcttaatggatcaaacccaatccatccaacttgaaccttctgctgtggcaggggtgttgggcatttatcatgtcaatacaaataaatcctatcaacaggcttatcatttaaatgcgatacaactaaaaaatgcaacacatttaatttgggcaacgggtggcggtatggttccgcccaatgaaatgcaaaaatatttaaagcagtgtgaataa

SEQ ID NO: 30619 - protein, 441 aa, Acinetobacter sp. ADP1
MTTLNIQAIQQDSLIKSLKNYEEIFWFQPEPTPIEQGLKRTSLTLADIQDAEARLTRFAPYLEKVFPELRSTQGKIESEIVSIPTMQHDCSKRFAIEPNGTWWLKKDSHLPISGSIKARGGIYEVLAHAEKLALKAGLVTLQDNYSQLDSDQARQFFSNYQIAVGSTGNLGLSIGIMSAKLGFRVSVHMSADARQWKKDKLRSLGVNVVEYASDYGVAVEQGRKAAESDPNCFFIDDENSTTLFLGYAVAGLRLKQQLIDQNIQVDAEHPLFVYLPCGVGGGPGGVSFGLKHALGEHVHCIFAEPTHSPCMLLGVYTGLHDQICVADIGLDNATAADGLAVGRASGFVGRAMQDLIDGYYTISDQHLFEFIRLMDQTQSIQLEPSAVAGVLGIYHVNTNKSYQQAYHLNAIQLKNATHLIWATGGGMVPPNEMQKYLKQCE

SEQ ID NO: 30620 - DNA, 1338 bp, Burkholderia pseudomallei K96243
  CDS (1)..(1338): transl_table=11
atgccagtcggccgttcgctttcgctcgatcccaatctattagctcagcttcaatcgcattcgccgacgctgtggctcaatccgcatcaaggcatgccgctgccggacttcgcgccgaccgccgcggatctcgccgatgccgacgcgcgcctgcgccgctgcgccggcttgctggccgagctatttgccgaactgcggccgtcgggcgggctcatcgcatcgccgttgcagccggccgagccgttgaagcgcgccgctcgagccggccatgcgcaggcgggcgcgtggtacgtcaagcgcgacgatgcattgccggtggccggctcgatcaaggcgcgcggcggttttcacgaggtgctcgcgctcgccgaatcgatcgccgagcggcacggcctcgcgggcgccgacaccgaccggcgcgcgctcgcgagcggcgcggcgcgtgcgcggttcgcgcgtcatacggtgatggtcggcagcaccggcaatctcggcttgagcatcgggatgctcgcgtcggcgctcgggttccgcaccgtcgtgcatatgtcggccgatgcgaaggcatggaagaaggcgcgcctgcgcacgcgcggcgtggaagtcgtcgagcatgcgggcgattatgcgaaagcggtggacgccgggcggcggcaggccgccgggatgccgtgctgccatttcgtcgacgatgaaggctcgcggatgctgttcctcggctacgcgacggccgccgccgagctcgccgcgcaactcgcgcaggcgggccgcccggtcgacgcgcgccatccgctgttcgtccatcttccgtgcggcgtcggcggcgcgccgggcggcatcgtgtacgggctgaaggcgctgtacggcgagcacgtgcatgcgttcgtcgccgagcccaccgcgtcgccttgcgtgctcgtgcagctcgcgggcgacgccgcgcatccgcgctccgtctacgacatcggcctcgacaatcggaccgaggccgacgggctggcggtcgcgcaggcgtcgcctctcgccgctgcgctgttgcgcgcgcaggccgccggcgcgttcaccgtcgacgatcgccagttgttcgcccatttgctcgacgcgcgcgagcggctcggcatcgacctcgagccgtccgcggcggccgcgttcggcggcccggcgtggatcgcgggatcggacgcggggcgcgcctatctgcgcggccggggcatcgatccggatgcggcgacgcacgtgatctgggccaccggcggctcgctcgtgccggcgcaagagcatcggcgctttcaggcgcatgcgcgcgcgcagcggcaggtgggcggcgcgggcgcgtga

SEQ ID NO: 30621 - protein, 445 aa, Burkholderia pseudomallei K96243
MPVGRSLSLDPNLLAQLQSHSPTLWLNPHQGMPLPDFAPTAADLADADARLRRCAGLLAELFAELRPSGGLIASPLQPAEPLKRAARAGHAQAGAWYVKRDDALPVAGSIKARGGFHEVLALAESIAERHGLAGADTDRRALASGAARARFARHTVMVGSTGNLGLSIGMLASALGFRTVVHMSADAKAWKKARLRTRGVEVVEHAGDYAKAVDAGRRQAAGMPCCHFVDDEGSRMLFLGYATAAAELAAQLAQAGRPVDARHPLFVHLPCGVGGAPGGIVYGLKALYGEHVHAFVAEPTASPCVLVQLAGDAAHPRSVYDIGLDNRTEADGLAVAQASPLAAALLRAQAAGAFTVDDRQLFAHLLDARERLGIDLEPSAAAAFGGPAWIAGSDAGRAYLRGRGIDPDAATHVIWATGGSLVPAQEHRRFQAHARAQRQVGGAGA

SEQ ID NO: 30622 - DNA, 1332 bp, Photobacterium profundum SS9
  CDS (1)..(1332): transl_table=11
atgagcacattaaatattcaacaattagttactgaatttcctctggttgaaaaactaatcgccttagacgatgtaagttggtttaacccaaatattacaactctggctgaaggcctgccttatgtagggcttgataaaacagatataaaagatgcaagtgaccgactaaaaagatttgctccttatttggcgaaggcatttcctgaaacagccaaaacaaatggcattatagaatctgatgttgttgctattccagccatgaaaacggttcttgaacagcagtaccacatagcgattcaaggaaccttactactgaaaaaagatagtcatctgccgatttctggttcaatcaaagcgcgtggtggtatctatgaagtgctaactcatgctgaaaagttagcaatccaagctggcttgttgtctgagtctgatgattacagcaaattgtttacggatgaatttagagctttctttaagcagtttagtatcgcggtaggttctaccggtaatctaggcatgtctatcggtattatgagcgcaaaaattggcttttctgtatcggttcatatgtcggcagatgcccgtcaatggaaaaaagacaaacttcgctctcatggtgtaatcgttgttgaatacaaagaagactacggtgtagcggttgcacagggacgtaaagaagcagaaaaagatccaacgtgcttctttattgatgatgaaaattcgccaacacttttcttaggctattctgttgcaggagagcgactaaagagccagttcgaagccatgaatattctggtagatgagctgcatccactgtttgtctatttaccttgtggtgttggtggcggccctggcggtgtggcgtttggtttaaaaatggcatttggtgataatgttcattgtatctttgcggaacctacccactcaccttgcatgttattgggtattcatactggcctgcatgatgaaatttcagttcaggatattggtatcgataatataacagctgctgacggcctagctgttggtcgtggttctggatttgtgggaagagcaatggaaagattacttgatggtttttataccataagtgatgaaaggatgtatcaccaccttggagagatgagcaagtatgaagatattcagctagagccttcagctttagccggaatgctaggccctgttgtagtttctgacaatgaagaatatcttcagcgaatccaaatggatgagcaaaaactgaaaaacgcgacccacttagtttgggctacgggtggtggtatggttccaagtgaagagatggcatcgtacctcgctaagtctggaatttaa

SEQ ID NO: 30623 - protein, 443 aa, Photobacterium profundum SS9
MSTLNIQQLVTEFPLVEKLIALDDVSWFNPNITTLAEGLPYVGLDKTDIKDASDRLKRFAPYLAKAFPETAKTNGIIESDVVAIPAMKTVLEQQYHIAIQGTLLLKKDSHLPISGSIKARGGIYEVLTHAEKLAIQAGLLSESDDYSKLFTDEFRAFFKQFSIAVGSTGNLGMSIGIMSAKIGFSVSVHMSADARQWKKDKLRSHGVIVVEYKEDYGVAVAQGRKEAEKDPTCFFIDDENSPTLFLGYSVAGERLKSQFEAMNILVDELHPLFVYLPCGVGGGPGGVAFGLKMAFGDNVHCIFAEPTHSPCMLLGIHTGLHDEISVQDIGIDNITAADGLAVGRGSGFVGRAMERLLDGFYTISDERMYHHLGEMSKYEDIQLEPSALAGMLGPVVVSDNEEYLQRIQMDEQKLKNATHLVWATGGGMVPSEEMASYLAKSGI

SEQ ID NO: 30624 - DNA, 1317 bp, Haemophilus somnus 129PT
  CDS (1)..(1317)
atgaaaattcaacatttaatgcaagatcctttcattcaaaaattaatgcgttttgaagaagtgatgtggtttaatcctaaaagtgcgggggtaaaaacaggattgtcttacgttgggttggatgtatccgacactcaacaggcggcggaacgtttgcagcgttttgctccttatttttgtcgtgcttttcctgaaactcaaaaaacgaaaggtattttagaatctgaactggtatctattgataagatgaaatcggccttaatcgatcattatcatatgccgatacaaggacgtttattgctcaaaaaagacagtcatttaccaatttcaggatcaattaaagcaagaggcggaatatatgaagtgttggcttacgcagaaaaattggcattagaacaccatttaattaccgaaaatgatgattatagtcaattgtgcgatgaaaagatcaaagattttttcagccgttatagtattgcagtaggatcaacggggaatttggggctttccatcggtattatgggggctgtactcggcttcaaagttagtgtgcatatgtcagccgatgcaagagaatggaaaaagcaaaagttgcgttcatacggtgtgaatgttgtggaatatacacaagattacggtgtagctgtcgctcaaggacggaaggcagctctttccgatccgaactgcttttttattgatgatgagaattcgacaacactttttttaggttattccgttgcaggtcaacgactaaaacaacaatttttggaacaaggtataaaagtagatgaaaatcatccgctctttgtttatcttccttgtggtgttggcggtggacctggcggtgttgcattcggattgaaattggcatttggcgattatgtacactgcatttttgctgaaccgactcattcaccttgtatgctgctcggtgtttatacagggttacatgataaaattgcggtacaagacttgggtattgataatatcacagctgctgatggtttagcagtagggcgtgcatcaggatttgttggtcgggcaatggaacatttgttagacggtttttatactattgaagatcaaaagttatatgatttactggggctattgcataagacagaaaatattcaacttgagccttctgctttggcaggaatgataggtccgttgcatatcaatcactccgattatttaagaagatatcacatcacacaagaacaattggcaaatgcaacacatatagtgtgggcgactggtggtggaatggtgcctgatgttgagatgcaaaaatatttgtcactcgggcgattttaa

SEQ ID NO: 30625 - protein, 438 aa, Haemophilus somnus 129PT
MKIQHLMQDPFIQKLMRFEEVMWFNPKSAGVKTGLSYVGLDVSDTQQAAERLQRFAPYFCRAFPETQKTKGILESELVSIDKMKSALIDHYHMPIQGRLLLKKDSHLPISGSIKARGGIYEVLAYAEKLALEHHLITENDDYSQLCDEKIKDFFSRYSIAVGSTGNLGLSIGIMGAVLGFKVSVHMSADAREWKKQKLRSYGVNVVEYTQDYGVAVAQGRKAALSDPNCFFIDDENSTTLFLGYSVAGQRLKQQFLEQGIKVDENHPLFVYLPCGVGGGPGGVAFGLKLAFGDYVHCIFAEPTHSPCMLLGVYTGLHDKIAVQDLGIDNITAADGLAVGRASGFVGRAMEHLLDGFYTIEDQKLYDLLGLLHKTENIQLEPSALAGMIGPLHINHSDYLRRYHITQEQLANATHIVWATGGGMVPDVEMQKYLSLGRF

SEQ ID NO: 30626 - DNA, 1362 bp, Burkholderia cepacia R1808
  CDS (1)..(1362)
atgaccgattccatctacggcaagccactcgaatcctggcttcgcgactacccgcttctgcgcccattgatggcgctcgagccggtcgagtggttcaaccccgccgtcgcgccgctgaccgaagcgctcgatgacattgcgctggacgcctcgcatatcgccgatgcgagcgcgcgcctgcaacgcttcgcgccgctgctggccgacctgttcgcagatgtgtgcgacacgggcggcatcatcgaatcgccgctcaccgacgtgcctgcgttcgcgcaggcattgagcgaacgttacggcgtggaaacgccgcggcgcctgctgctcaagcaggacagccatctgccgatctccggctcgatcaaggcgcgtggcggcatctatgaagtgctcttctacgccgagcagcttgcgctgcgccacggcttgctcaacgacggcgacgattaccgcgtcctcgccggcgacgcatgtcgcgcgctgtttcgcgagcaccgcatcgcggtcgggtcgaccggcaatctcggcatgtcgatcggcatcgcgagcgcgacgctcggctttgcggcgaccgtgcatatgtccaccgatgcgcgccaatggaagaaggaccgcctgcgcgcgcatggcgtgacggtcgtggagtatgcgggcgattacggcgaagcgatcgagaacggccggcgtcttgcggctaacgatccgatgtgccacttcgtcgacgacgaaaattcgacgacgctgttcctcggctatgcggtcgcgggtgagcgcctgaagcgtcagctcgaagcgtcgaacgtgcgtgtcgatgcgacgcatccgctcttcgtgtatctgccttgcggcgtaggcggcggcccgggcggtgtcgcgttcggcttgaagctcgccttcggcgatgcggtgcactgtgttttcgcggagccgacccattcgccgtgcatgttgatgggcgtgctgaccggcttgcacgagcagcttgcggtgcaggatttcggtatcgacaacgtgacggccgccgacggcctcgcggtcggacgcccttccggattcgtcggtcgtgcgatgcaacggatgatcgatggctatttcaccgtcgaggatcgcgagctatatgcaatgctcgcgctgatggcgcagacgagcgacatccggctggagccgtcggcgctggccggcgcgccgggtttcgcgcgcgtgtcgacggagcggcaaggttaccgtgcccgcatgcagctggacgactccgtgatgcgggacgcgacgcatgtgatctgggcaacgggcggcggtatggtgccgcaagctgagatgaacgcatatctgcaggccgggcggcaggcactggcggggtcttga

SEQ ID NO: 30627 - protein, 453 aa, Burkholderia cepacia R1808
MTDSIYGKPLESWLRDYPLLRPLMALEPVEWFNPAVAPLTEALDDIALDASHIADASARLQRFAPLLADLFADVCDTGGIIESPLTDVPAFAQALSERYGVETPRRLLLKQDSHLPISGSIKARGGIYEVLFYAEQLALRHGLLNDGDDYRVLAGDACRALFREHRIAVGSTGNLGMSIGIASATLGFAATVHMSTDARQWKKDRLRAHGVTVVEYAGDYGEAIENGRRLAANDPMCHFVDDENSTTLFLGYAVAGERLKRQLEASNVRVDATHPLFVYLPCGVGGGPGGVAFGLKLAFGDAVHCVFAEPTHSPCMLMGVLTGLHEQLAVQDFGIDNVTAADGLAVGRPSGFVGRAMQRMIDGYFTVEDRELYAMLALMAQTSDIRLEPSALAGAPGFARVSTERQGYRARMQLDDSVMRDATHVIWATGGGMVPQAEMNAYLQAGRQALAGS

SEQ ID NO: 30628 - DNA, 1605 bp, Oenococcus oeni PSU-1
  CDS (1)..(1605)
ttgattaacagtgttaaattactattcggttatcagcgcgcaagtactgagtgtcgtgttaattccgatgaggccacacctgttcccattccgaacacagaagttaagcttgtcagggcccaaagtagttacaggaacgcctgttgcaaggttaggtcgatgcgatgcaattcacccgtttgggtgtttttttttgcccagcctacgactttaacgattgctttgattcgtgttaattatcctcacaggatttgtctgccgactgactcgatcattataattaagcaggtatacgagggcgaaatgacagagactttattgaaaaagaaattgaatcttaatgatcaatttttattgaatttaaaaaactatcaagaaatcttttggaaaaatcctaattatggagatgaattacccgacctggatgtgaaccgggaaacgatttttcaggctaatcgtcgtttggaacgttttgcaccctatttagagtcggttttttcagacactaagcgaagtaaaggcattattgaatccccaattcaaagaatggattcaatcaaagatttgctttcagttaaaggttctcttcttattaagagagacgatttaatgcctgtaagtggttcgattaaaagtcggggcggaatttatgaagtattatgttttgctgaaaaaatagcaattgaaaatggttttgatttaaaaaaagataattatcaagaccttcgaaaagataagtatcgaaagcttttcaaccaatggagaatcgaggttgctagcaccggcaatctgggactaagcgttggcttaatggccagtacgcttggatttaaagcaaggattcacatgtcccatgatgccactgactggaaaattaacaaacttcttcaaaatggtgtcgaagttaagatttatgatgacaatttttcaaatgcagtcgcggcggctcgtgtatcctcgcaaagggatccatatagttattttatcgatgatgaaggttctaaattgctttttgccggctatgctaccgctggtgaaagagttaagaaacagttatcaaagatgcaaatagaggtttcaaaagaacatcctctagttgtttaccttccggctggtgtgggtggttcacctagtggggtcgcttttggtttaaaattgcaatttgctgatgctgttatccctattttcgttgagcctacacacatgccgtctgttcttttaggcatggccagtggactcaatcatgatatttcggtttacgatattggaattgatggtaagacagcagctgatggccttgccgtcggtagaccatcaatgattgccgggaaatacatgaaagataaattattcggtattgcaactgtttctgactcagatatgtttgcttatcagggaatgcttaaaaagctggaaaatattgaagtagaaccttctgcggcggttggaatccgtggattaattcaatccaaggaaatatccgaaattccagattcggcaactcatatggtctgggctaccgggggatcgatggtaccaaaaaatacaatgcataaatatgaagataaagcggttagaatctttaatacttggaagtctgaatga

SEQ ID NO: 30629 - protein, 534 aa, Oenococcus oeni PSU-1
MINSVKLLFGYQRASTECRVNSDEATPVPIPNTEVKLVRAQSSYRNACCKVRSMRCNSPVWVFFFAQPTTLTIALIRVNYPHRICLPTDSIIIIKQVYEGEMTETLLKKKLNLNDQFLLNLKNYQEIFWKNPNYGDELPDLDVNRETIFQANRRLERFAPYLESVFSDTKRSKGIIESPIQRMDSIKDLLSVKGSLLIKRDDLMPVSGSIKSRGGIYEVLCFAEKIAIENGFDLKKDNYQDLRKDKYRKLFNQWRIEVASTGNLGLSVGLMASTLGFKARIHMSHDATDWKINKLLQNGVEVKIYDDNFSNAVAAARVSSQRDPYSYFIDDEGSKLLFAGYATAGERVKKQLSKMQIEVSKEHPLVVYLPAGVGGSPSGVAFGLKLQFADAVIPIFVEPTHMPSVLLGMASGLNHDISVYDIGIDGKTAADGLAVGRPSMIAGKYMKDKLFGIATVSDSDMFAYQGMLKKLENIEVEPSAAVGIRGLIQSKEISEIPDSATHMVWATGGSMVPKNTMHKYEDKAVRIFNTWKSE

SEQ ID NO: 30630 - DNA, 1299 bp, Pediococcus pentosaceus ATCC 25745
  CDS (1)..(1299)
atgattgatgttgatgctctaagcaaaaaatatccagcgattaagcagatgcaagcttacgaaccaattttttggaagaacctgaattataaaaaggaagctgaattaccggttggagttgaacatatcttcgatgctgaagctcgttttcaacggtttgcaccttattttgaggtagcattcccagaaactttaccaacacatggaattttagaatcccctttgctcaaaatggataagatgaaggctgttttaaatgccgaagctcaaaaccaagttaagggtgatttgtatcttaaggctgataattatctaccaatttcgggctcaattaagtcacgtggtggaatctacgaagtgttgaaatttgccgaaaaagtagcaatgaaacacggtgaaattgtatatggtgataattatgctaaattaaatgaaccacgcttcaaggatttatttggacaatatggaattgtcgtgggctcaacgggaaatcttggactatcgattggtattgtagcttgtaaactaggttttagaactagcgtacatatgtcgagcgatgccgctcaatggaagaaggatatgttacgtgaaaagggcgttaatgttgttgaatataacgacaatttcactcatgctattacagaagcacgtaaatctgctgaagcagatcctatggcttacttcatcgatgatgaagggtcgtacgatttattcttgggatattcggttgctgcagttcgtcttcaagctcaattgaaggctcaaaatatcaaagttgatgcagaacatccattatttgtatatctacctgctggagtaggtggcagtcccagtggtgtagcctttggtctaaagaagattattggcgaaaacgttcatccaatttttgcggaaccaactcatattccatctgtttcactaggaatgatgaccggcttaaatgatcaaatttcagtttatgatgctggaattgatggagtaactaaggctgacggtcttgctgttgggcgtccatctagaattgctggtaagatgatggatacattattatatggaattcaaacttttgatgatcaaaagatgatgaagaatgttgcagaattgcatgactcagaaaatgtggatgttgaaccatcagctgcttctggttttacgattttagatgacgttcaagctcaattggaacaggattatccaatggaaaatgctagccatattgtttgggcgacgggtggtagcatggtgcctaagaatgatatggaccagtatgtggctgaaggacatcaagttaaataa

SEQ ID NO: 30631 - protein, 432 aa, Pediococcus pentosaceus ATCC 25745
MIDVDALSKKYPAIKQMQAYEPIFWKNLNYKKEAELPVGVEHIFDAEARFQRFAPYFEVAFPETLPTHGILESPLLKMDKMKAVLNAEAQNQVKGDLYLKADNYLPISGSIKSRGGIYEVLKFAEKVAMKHGEIVYGDNYAKLNEPRFKDLFGQYGIVVGSTGNLGLSIGIVACKLGFRTSVHMSSDAAQWKKDMLREKGVNVVEYNDNFTHAITEARKSAEADPMAYFIDDEGSYDLFLGYSVAAVRLQAQLKAQNIKVDAEHPLFVYLPAGVGGSPSGVAFGLKKIIGENVHPIFAEPTHIPSVSLGMMTGLNDQISVYDAGIDGVTKADGLAVGRPSRIAGKMMDTLLYGIQTFDDQKMMKNVAELHDSENVDVEPSAASGFTILDDVQAQLEQDYPMENASHIVWATGGSMVPKNDMDQYVAEGHQVK

SEQ ID NO: 30632 - DNA, 1323 bp, Bacillus clausii
  CDS (1)..(1323)
atggacatagcaggcaaaaacagagagcaatggttggcagcttacccacttttacaacaaattgtattgacaaaggaagtgtggtgggccaatccgaacaggcagcctgctagcgaagggctagcacgcctttctttaaaggaagaggacgtgaaggaagcagaacagcggttgcgacgctttgccccatacatagcaagcgtgtttccggaaacgaaaggggcagggggcttgatcgaatcgccgcttatcgacattcccacaatgaagcacaagcttgaccaacgatttggccaaaacgtgccaggccgacttttgctgaaaggcgatcacgcgctgcctatttcaggctccattaaagcgcggggcggtatttatgaagtgttgaaacatgcggaaagcttgttggtcgaccaacaaattctcactaaacaagacgattattcattgatcgccactgacgcagtccaatcgtttttctcgtcttatgccattgttgttggatcaacaggtaatttaggattaagcattggcatcattagcgcaaagctaggttttcgcgtgacggtacacatgtcagatgatgcaaagcaatggaaaaaagacatgttgcgagaaaaaggcgtgcgtgtggtcgaacattccgccgattacagcaaggcagtcgaagagggaagaaaagaatcagacgccgatccgaacagctattttattgatgacgaacattcaattgatctatttgtagggtatgctgtcgctgcatttcgcttaaaagaacagttgcaggaaaagggaattgccgtcacaaaagaccaaccgctccacgtctatcttccatgtggcgttggcggcggtcctggcggggttgctttcggcttgaagctcgttttcggtgacgctgtccgctgttttttcgcagagcctacccattcgccatgtatgttaattggtatgttaactggaaagcaccagcacatttctgtccaagactttggaatcgacaaccaaacagcagccgacggtcttgcggtagggagaccgtctggctttgttggccgcatgatggctccattgcttgagggcatctacacaatcgccgacccgatgctttatacactcttggctgatctcgccgacgcagaaggcctctatttggagccatcagcagttgcgggattatacggccctgtacagcttgaaaagagagggctatataccgatgcagcgactcatcttgtctgggcgacaggaggaagcatggtgcctaaagagatcatggaaacggattaccaactaggtgtcaacttacggactgagcagtag

SEQ ID NO: 30633 - protein, 440 aa, Bacillus clausii
MDIAGKNREQWLAAYPLLQQIVLTKEVWWANPNRQPASEGLARLSLKEEDVKEAEQRLRRFAPYIASVFPETKGAGGLIESPLIDIPTMKHKLDQRFGQNVPGRLLLKGDHALPISGSIKARGGIYEVLKHAESLLVDQQILTKQDDYSLIATDAVQSFFSSYAIVVGSTGNLGLSIGIISAKLGFRVTVHMSDDAKQWKKDMLREKGVRVVEHSADYSKAVEEGRKESDADPNSYFIDDEHSIDLFVGYAVAAFRLKEQLQEKGIAVTKDQPLHVYLPCGVGGGPGGVAFGLKLVFGDAVRCFFAEPTHSPCMLIGMLTGKHQHISVQDFGIDNQTAADGLAVGRPSGFVGRMMAPLLEGIYTIADPMLYTLLADLADAEGLYLEPSAVAGLYGPVQLEKRGLYTDAATHLVWATGGSMVPKEIMETDYQLGVNLRTEQ

SEQ ID NO: 30634 - DNA, 1326 bp, Geobacillus kaustophilus
  CDS (1)..(1326): transl_table=11
atgatcatggcggccgaagaggtgttttggcgcaatccaaaatatcacgcgtttgcgcaagccattcgaacgattcctttacgcgaacgcgatgtcaaggaggcggaagaacgattgcgccgctttgccccctacatcgcgaaagtgtttcccgagacgcagccagcccatggcatcatcgaatcccctttagtccggattccgaacatgcaacggcgtttggaaaagatgtttcagaccaacatcgagggggatctgttgctaaaatgcgacagccatctcccgatttccgggtcgatcaaggcgcgtgggggcatttacgaagtgttgaaacacgcggaagatcttgcgctcgcaaatgggatgatcgccataggagaggactatgcggttatggccagcgaagaattccggcagttcttttcccgctattcgcttgtcgtcggttcgacaggaaatttaggcttgagcatcggcatcatcggggcgcagcttgggttccgcgtcaccgttcatatgtcagccgatgcgaaacaatggaaaaaagacttattgcgaagcaaaggggtcaccgtcatcgaacatctcactgattacaacaaagtggtggaagaggcgcgaagacagtccgccgaggatccaacgtcgtattttatcgatgatgagaactcgatccatctgtttttaggctatgcggtggcggcgtttcggctgaaaaagcaattagaggacatgaacatcacggttgatgaaacccatccgctctttgtgtatcttccttgcggcgtcggcggcggtccgggcggggtgacgtttgggctgaagctcgtgtacggcgatcatgtccattgctttttcgctgagccgacgcattcgccttgcatgctgcttgggttgatgacaggagagcacgaccgcgtgtcggtgcaagattttggcctcgacaataagaccgaagcggacgggctagcggtgggccggccgtcgaggttggtggggaacatgcttgagaacgtcatcagcggcgtctatacggtggacgattcgacgctttaccgcttgctcgcggctatggttgaaacggaggaaatctatttagagccgtccgccttggcgggggtggcggggcctgttcggttgtttcgcgattcggcgggacaaacgtatgtagaggaaaacgatttgaaagaaaaaatgaaaaacgccgtccatatttgctgggctaccggtggaagcatggtgccaaagggtgtgatggaggcctattatcgggaaggcatgcgcatcgaaactatgacagggaactgtttttccgaaggacgataa

SEQ ID NO: 30635 - protein, 441 aa, Geobacillus kaustophilus
MIMAAEEVFWRNPKYHAFAQAIRTIPLRERDVKEAEERLRRFAPYIAKVFPETQPAHGIIESPLVRIPNMQRRLEKMFQTNIEGDLLLKCDSHLPISGSIKARGGIYEVLKHAEDLALANGMIAIGEDYAVMASEEFRQFFSRYSLVVGSTGNLGLSIGIIGAQLGFRVTVHMSADAKQWKKDLLRSKGVTVIEHLTDYNKVVEEARRQSAEDPTSYFIDDENSIHLFLGYAVAAFRLKKQLEDMNITVDETHPLFVYLPCGVGGGPGGVTFGLKLVYGDHVHCFFAEPTHSPCMLLGLMTGEHDRVSVQDFGLDNKTEADGLAVGRPSRLVGNMLENVISGVYTVDDSTLYRLLAAMVETEEIYLEPSALAGVAGPVRLFRDSAGQTYVEENDLKEKMKNAVHICWATGGSMVPKGVMEAYYREGMRIETMTGNCFSEGR

SEQ ID NO: 30636 - DNA, 1380 bp, Bacillus stearothermophilus
  CDS (1)..(1380): transl_table=11
atgatgaccaaaaacgaaatccaaaagtgggtaaaggaattcccgctgcttaaaacgatcatggcggccgaagaggtgttttggcgcaatccaaaatatcacgcgttcgcgcaagccattcgaacgattcctttacgcgaacgcgatgtcaaggaggcggaagaacgattgcgccgctttgccccctacatcgcgaaggcatttcccgagacgcgaacggcccacggcatcatcgaatcccctttagtccggatttcgaacatgaaacagcgtttagaaaagatgtttcagaccaacattgagggggagctgttgctaaaatgcgacagccatctcccgatttccgggtcgatcaaggcgcgtgggggcatttacgaagtgttgaaacacgcggaagatcttgcgctcgccaacgggatgatcaccataggagacgactatgcggtcatggacagcgagaaattcaggcaattcttttcccgctattcgcttgtcgtcggttcgacagggaacttgggcttgagcatcggcatcatcggggcaaagcttggattccgcgtcaccgttcatatgtcagccgatgcgaaacaatggaaaaaagacttgttgcgaagcaaaggggtcaccgtcatcgaacatctcaccgattacaacaaagtggtggaagaggcgcgaagacagtccgccgaggatccaacgtcgtattttatcgatgatgaaaactcgatccatctgtttttaggctatgcggtggcggcgtttcggctgaaaaagcaattagaggacatgaacatcacggttgatgaaaaccacccgctctttgtgtatcttccttgcggcgtcggcggcggtccgggcggggtgacgtttgggctgaagctcgtgtacggcgatcatgtgcattgctttttcgctgagccgacgcattcgccttgcatgctgcttgggttgatgacaggagagcacgaccgcgtgtcggtgcaagattttggcctcgacaataagaccgaagcggacgggctagcggtgggccggccgtcgcggctggtggggaacatgcttgagaacgtcatcagcggcgtctatacggtggacgattcgacgctttaccgcttgctcgcggcgatggtggaaacggaggaaatctatttagagccgtccgccttggcgggggtggcggggcctgttcggctgtttcgtgatttggcggggcaaacgtacgtagaggcaaacggtttgaaagaaaagatgaaaaacgccacccatattggctgggcgacgggtggaagcatggtgccaaaggatgtgatggaggcctattatcgggaaggcgtgcggattgaaacgatgacagggaacggtttttctgaaggacgataa

SEQ ID NO: 30637 - protein, 459 aa, Bacillus stearothermophilus
MMTKNEIQKWVKEFPLLKTIMAAEEVFWRNPKYHAFAQAIRTIPLRERDVKEAEERLRRFAPYIAKAFPETRTAHGIIESPLVRISNMKQRLEKMFQTNIEGELLLKCDSHLPISGSIKARGGIYEVLKHAEDLALANGMITIGDDYAVMDSEKFRQFFSRYSLVVGSTGNLGLSIGIIGAKLGFRVTVHMSADAKQWKKDLLRSKGVTVIEHLTDYNKVVEEARRQSAEDPTSYFIDDENSIHLFLGYAVAAFRLKKQLEDMNITVDENHPLFVYLPCGVGGGPGGVTFGLKLVYGDHVHCFFAEPTHSPCMLLGLMTGEHDRVSVQDFGLDNKTEADGLAVGRPSRLVGNMLENVISGVYTVDDSTLYRLLAAMVETEEIYLEPSALAGVAGPVRLFRDLAGQTYVEANGLKEKMKNATHIGWATGGSMVPKDVMEAYYREGVRIETMTGNGFSEGR

SEQ ID NO: 30638 - DNA, 1329 bp, Bacillus halodurans
  CDS (1)..(1329)
atgaacgagcttgaacaatggagaaaagatccacttgtaattaaactaatggcgaccgaggaagttttttggctcaatcctcatatagattcgtttaagtcagcagttcgaaagcttagtctacacgaagacgacgtcaaggatgccgagaagcgattagatcggtttgcgccatatatcgcgaaagtttttcctggaacaaaccaagcgcacggaatgatcgaatctcccttagtgcaaatcccttcgatgaaacaatcgttagaacagaagtatctgcaaccaattacggggaacttattgctaaaatgcgatagtcatttacctatttccggatcgatcaaagcgaggggcggcatttatgaagtgctgaaacatgctgaacaactagctttgcagcatgggcttttaacagttcaagatgattattcgatccttgacagcgaaacttgccgggacttcttcgcgaattattcgattgccgttggttcgacggggaatttagggctcagcattggcatcattagcgcaaaacttggctttaacgtgtcggtccatatgtcggcagacgcaaagcaatggaaaaaagacttgcttcgaagtaaaaacgtcaacgtcattgaatatgaggatgattatagtcaagcggtagaggaagggcgaagagaggctgagcaggatcccacctgttattttgtggacgatgaacaatctcaagatctttttttaggctatgctgtggcagcctttcgactgaaaaaacaattggctgaacagaagattacggtcgatgagagtcaccctttgtttgtctatctcccatgcggggttggtggcgccccaggtgggattaccttcggtttaaagctgttgtttgaagatcatgtccactgcttttttgcagagcctacccactctccatccatgttgcttggacttttgacaggccttcatgagcggatttcggttcaagaaatcggtctcgacaaccgaacagaggcagatggacttgctgtcggcagaccttcgcgacttgtgtcaaggttaatgaagcctttattaagtgggagctttacgatagacgatgacaagctttttaccttactgaaagagctagccgatgcagaagggctgttccttgaaccttcagcgctggcaggaatgcttggaccgataaaattagttcaggaaggcaatcactatttaaaagcaaacaacttagctgaaaaaatgaacaatgccacgcatattatatggggaacaggcggcagcatggtacctgaagaggagatgatggcttattacagacggggaggaactattaagtga

SEQ ID NO: 30639 - protein, 442 aa, Bacillus halodurans
MNELEQWRKDPLVIKLMATEEVFWLNPHIDSFKSAVRKLSLHEDDVKDAEKRLDRFAPYIAKVFPGTNQAHGMIESPLVQIPSMKQSLEQKYLQPITGNLLLKCDSHLPISGSIKARGGIYEVLKHAEQLALQHGLLTVQDDYSILDSETCRDFFANYSIAVGSTGNLGLSIGIISAKLGFNVSVHMSADAKQWKKDLLRSKNVNVIEYEDDYSQAVEEGRREAEQDPTCYFVDDEQSQDLFLGYAVAAFRLKKQLAEQKITVDESHPLFVYLPCGVGGAPGGITFGLKLLFEDHVHCFFAEPTHSPSMLLGLLTGLHERISVQEIGLDNRTEADGLAVGRPSRLVSRLMKPLLSGSFTIDDDKLFTLLKELADAEGLFLEPSALAGMLGPIKLVQEGNHYLKANNLAEKMNNATHIIWGTGGSMVPEEEMMAYYRRGGTIK

SEQ ID NO: 30640 - DNA, 1347 bp, Bacillus subtilis
  CDS (1)..(1347): transl_table=11
atgtcagttcattcagaagtccttcatgctctgcttaaagatccgtttattcagaaactgattgatgcagagcctgtattctgggcaaattcaggcaagaaagaggggccattaccccgtgcagatgagtgggcaaccgagatagcggaagcggaaaaaagaatgcagcggtttgcaccttacattgccgaggtgtttcctgagacgaaaggcgctaaaggaatcatcgagtctccgctttttgaggtgcagcatatgaagggaaagctggaagcggcatatcagcagccatttcccggaagatggcttttaaagtgcgaccatgagcttccgatttcaggatcgattaaagcgaggggcgggatttatgaagtgttaaagtatgctgaaaatctcgcgcttcaagaaggaatgcttcaggaaaccgatgattaccgcatcttacaggaagagcggtttaccgggtttttctcccgctattcgattgctgtcggttcgacaggaaatctaggtttaagcatcggcatcatcggcgcggcactcgggtttcgcgtgacagtgcatatgtccgccgatgctaagcagtggaaaaaggatctcctccgccaaaagggagtcactgttatggagtacgaaacagattacagtgaagcggtgaacgaagggagacggcaggcggaacaagatccattctgttattttattgatgatgaacattctcgtcagctgttcttaggatatgctgttgctgcaagccgattaaaaacacagcttgactgtatgaatataaagccaagtcttgagacgcccttgtttgtgtatctgccgtgcggagtcggcggaggaccgggcggtgtagcatttgggctgaagcttttatacggagatgatgttcatgtgtttttcgcagaaccaactcattcaccttgtatgctgttagggctttattcaggacttcacgagaagatctccgtccaggatatcggcctggataatcagacggctgctgacggacttgccgtagggaggccgtcaggatttgtcggcaagctgattgaaccgcttctgagcggctgttatacggtagaggacaatacgctttatactttgcttcatatgctggctgtatctgaagataaatatttagagccctctgctcttgctggcatgttcgggccggttcagcttttttcgacagaagagggaaggcgctatgctcagaaatataagatggaacatgccgtacatgtcgtctggggaacgggaggaagcatggttccaaaagatgaaatggctgcgtataaccgaatcggtgctgatttgctaaaaaaacgaaatggaaaataa

SEQ ID NO: 30641 - protein, 448 aa, Bacillus subtilis
MSVHSEVLHALLKDPFIQKLIDAEPVFWANSGKKEGPLPRADEWATEIAEAEKRMQRFAPYIAEVFPETKGAKGIIESPLFEVQHMKGKLEAAYQQPFPGRWLLKCDHELPISGSIKARGGIYEVLKYAENLALQEGMLQETDDYRILQEERFTGFFSRYSIAVGSTGNLGLSIGIIGAALGFRVTVHMSADAKQWKKDLLRQKGVTVMEYETDYSEAVNEGRRQAEQDPFCYFIDDEHSRQLFLGYAVAASRLKTQLDCMNIKPSLETPLFVYLPCGVGGGPGGVAFGLKLLYGDDVHVFFAEPTHSPCMLLGLYSGLHEKISVQDIGLDNQTAADGLAVGRPSGFVGKLIEPLLSGCYTVEDNTLYTLLHMLAVSEDKYLEPSALAGMFGPVQLFSTEEGRRYAQKYKMEHAVHVVWGTGGSMVPKDEMAAYNRIGADLLKKRNGK

SEQ ID NO: 30642 - DNA, 1326 bp, Fusobacterium nucleatum
  CDS (1)..(1326): transl_table=11
atggatataaaaaatatgattataaataaccctttaataaaaaatatgatagataaaaaagaagttggttggacaaatccaaaagaaatgaactacacagaatatgaaaaaaaacttcctcttaaggatcaagaattaaaagaagcagaagaaagattaaaacgttttgctccttttatcaaaaaagttttcccagaaacagaagaaacatacggaattattgaatctcctttagaagaaatatttaatatgcaaaaagaattagaaaaaaaatatcatactgaaattctaggaaaattatatttgaaaatggatagtcatctcccagtagctggctctattaaagctagaggtggagtttatgaagttttaaaacatgcagaagaattagctatggaagcaggcttattaaaattagaagatgattattccatcttagcagataaaaaatttaaagattttttctcaaaatataaaatacaagttggttctactggaaatttaggattaagtataggaattacaagcgctgccttaggttttcaagtaattgtccatatgtctgcagatgctaaaaaatggaaaaaagatatgttaagatccaaaggagttcaagtaattgaatatgaaagtgattatggaaaggctgtggaagaaggaagaaaaaattctgatgcagatccgatgagttattttgtagatgatgaaaaatcaatgaatctatttttaggatacacagtagctgcttcaagaataaaaaaacaatttgataaaaaaggaattgtaattaataaagaacatcctcttattgtatatattccttgtggcgttggtggagctcctggaggagttgcttatggtcttaaaagaatatttaaagaaaatgtatatattttctttgttgaacctgtactagctccttgtatgttattaggaatgcaaacaggtttacatgaaaaaattagtgtctatgatgtaggaattcatggaattacacatgctgatggtttagctgtagcaagaccttctggtttggttggaagacttatggaacctattttaagtggaatttttactgtagatgattacaaattatatgattatttaagaattttaaatgaaacagaaaacaaaagaatcgaaccttcttcttgtgcagcatttgaaggagtagtttctctattaaaatatgaggatagtaaaaaatatattgaaaatagaattggaaaaaatattaataatgtatatcatgtatgctgggcaacaggtggaaaaatggttcctcaagaagatatggaaatatttttaaatacttatttaaaatag

SEQ ID NO: 30643 - protein, 441 aa, Fusobacterium nucleatum
MDIKNMIINNPLIKNMIDKKEVGWTNPKEMNYTEYEKKLPLKDQELKEAEERLKRFAPFIKKVFPETEETYGIIESPLEEIFNMQKELEKKYHTEILGKLYLKMDSHLPVAGSIKARGGVYEVLKHAEELAMEAGLLKLEDDYSILADKKFKDFFSKYKIQVGSTGNLGLSIGITSAALGFQVIVHMSADAKKWKKDMLRSKGVQVIEYESDYGKAVEEGRKNSDADPMSYFVDDEKSMNLFLGYTVAASRIKKQFDKKGIVINKEHPLIVYIPCGVGGAPGGVAYGLKRIFKENVYIFFVEPVLAPCMLLGMQTGLHEKISVYDVGIHGITHADGLAVARPSGLVGRLMEPILSGIFTVDDYKLYDYLRILNETENKRIEPSSCAAFEGVVSLLKYEDSKKYIENRIGKNINNVYHVCWATGGKMVPQEDMEIFLNTYLK

SEQ ID NO: 30644 - DNA, 1347 bp, Pseudomonas aeruginosa
  CDS (1)..(1347): transl_table=11
ttgattctcggaacacccaaggccgactggctcgccgaattcccgcgcctggccgacctcatcgccctgcgtccgagcgagtggttcaacccggccatcgcgccgagcgccgaagccctggccgacgtcggcctcggcgccgccgacgtggccgacgccagcgcccgcctgcagcgcttcgccccgctgatcgcccggctgtttccggaaaccgccgccagcggcggcatcatcgagtccgacctggtcgaggtcgccaccttccacgatgccctgcgccagcattacgccgccgaactgcccggccggctctggctgaaacgcgatagccacctgccgatctccggctcgatcaaggcccgcggcggcatctatgaagtgctcgcccatgccgagcgcctggccctggagcacggcctggtcggcctcgacgacgactactcgcggctggccgaggcggattgccgggcattcttcgcccgccaccggatagcggtgggctccaccggcaacctgggcctttccatcggcatcatcggcgccgcgctgggcttccaggccagcgtgcacatgtccgccgacgcccgccagtggaagaaggacaagctgcgcgcccacggcgtgacggtggtggagtacgcctccgactacagtgtcgcggtggaacagggccgccgcgaagcggccggcgatccctacacccatttcgtcgacgacgaaaactcccgcgacctgttcctcggctacgccgtcgccgccgagcgactgcgcggccagttggacgccgccggcatccgcgtcgacagcgagcacccgctgttcgtccatctgccctgcggggtcggcggcggtcccggcggggtggccttcggcctcaagctggcgttcggcgacgcggtgcactgcctgttcgccgagccgacccattcgccctgcatgttcctcggcgtctataccggccgccacgagcaggtttcggtgcaggacttcggcatcgacaaccgcaccgccgccgatggcctggcggtggggcgtccgtcgggcttcgtcggccgcgccatgcagcgcctgctcgacggctactacacggtggacgacgacgagttgttccgcctgctcgccttgctcgagcgcagccagggcatccgcctggaaccctcggccctggccggcgcgacgggcatcgcccgggtcacccgtgagccgcagggctatcgcgaacgcatggggctgacctcggcgcgcctggccaatgctacccacctggtctgggccaccggcggcggcatggtgcccgagacggaaatgcgcgcctacctggagcgaggccgctcgctgctggactga

SEQ ID NO: 30645 - protein, 448 aa, Pseudomonas aeruginosa
MILGTPKADWLAEFPRLADLIALRPSEWFNPAIAPSAEALADVGLGAADVADASARLQRFAPLIARLFPETAASGGIIESDLVEVATFHDALRQHYAAELPGRLWLKRDSHLPISGSIKARGGIYEVLAHAERLALEHGLVGLDDDYSRLAEADCRAFFARHRIAVGSTGNLGLSIGIIGAALGFQASVHMSADARQWKKDKLRAHGVTVVEYASDYSVAVEQGRREAAGDPYTHFVDDENSRDLFLGYAVAAERLRGQLDAAGIRVDSEHPLFVHLPCGVGGGPGGVAFGLKLAFGDAVHCLFAEPTHSPCMFLGVYTGRHEQVSVQDFGIDNRTAADGLAVGRPSGFVGRAMQRLLDGYYTVDDDELFRLLALLERSQGIRLEPSALAGATGIARVTREPQGYRERMGLTSARLANATHLVWATGGGMVPETEMRAYLERGRSLLD

SEQ ID NO: 30646 - DNA, 1323 bp, Salmonella typhimurium
  CDS (1)..(1323): transl_table=11
atggaaaacatacaaaagctcatcgcccggtatcctttggtcgaggatctggtcgccctcaaagaaaccacctggtttaacccgggcgccacctctcttgcacaaggtctaccgtatgtcggcctgacggagcaggacgtaaacgccgcccatgaccgtctggcgcgctttgcgccgtatctggcgaaagcgtttccgcaaaccgccgccgctggcggcatgatcgaatctgacgtggtcgctattccggccatgcaaaaacggctggaaaaagagtatgggcaaacgatcaacggtgaaatgctgttaaaaaaagacagtcacctggcaatctctggttccattaaagcgcgcggcggcatctacgaggtgctaacgcacgcggaaaaactggcgctggaggcgggtctgttaaccaccgacgatgactatagcgtgttgctttcgccggaatttaaacaattcttcagccagtacagtatcgccgtcggttcaaccggcaatctggggctatcgatcggtatcatgagcgcctgcatcggttttaaagtgacggtacatatgtctgccgacgcccgcgcctggaaaaaagcgaagctgcgtagccacggcgtgacggtcgtagaatacgaagatgattacggcgtggcggttgagcagggccgtaaagcagcgcaatccgatccaaactgtttctttatcgacgacgaaaactctcgcacgctatttctgggctatgcggtagcgggccagcgcctgaaagcgcaattcgcgcaacagggacgcgtcgttgacgccagtcacccactgtttgtttatctgccgtgcggcgttggcggcggccctggcggcgtcgcctttggcctgaaactggcgtttggcgacaacgtccactgtttctttgccgaaccgacccattccccctgcatgttactcggcgtttataccggtctgcacgatgccatctcagttcaagatatcggtattgataacctgacggcggctgacggcctggcggtaggtcgcgcttcgggttttgttggtcgggcaatggagcgtctgcttgacggcctctataccttagacgatcaaacaatgtatgacatgctgggctggctggcgcaggaggaaggaattcgactggagccatcagctctggcggggatggccgggccacagcgcatttgcgcctccgtcgcgtatcagcaaaggcatggattcagtcagacgcagctcggcaacgcgacgcatctggtatgggcaaccgggggcggcatggtgccggaagatgaaatggaacaatacctggcaaaaggacgctaa

SEQ ID NO: 30647 - protein, 440 aa, Salmonella typhimurium
MENIQKLIARYPLVEDLVALKETTWFNPGATSLAQGLPYVGLTEQDVNAAHDRLARFAPYLAKAFPQTAAAGGMIESDVVAIPAMQKRLEKEYGQTINGEMLLKKDSHLAISGSIKARGGIYEVLTHAEKLALEAGLLTTDDDYSVLLSPEFKQFFSQYSIAVGSTGNLGLSIGIMSACIGFKVTVHMSADARAWKKAKLRSHGVTVVEYEDDYGVAVEQGRKAAQSDPNCFFIDDENSRTLFLGYAVAGQRLKAQFAQQGRVVDASHPLFVYLPCGVGGGPGGVAFGLKLAFGDNVHCFFAEPTHSPCMLLGVYTGLHDAISVQDIGIDNLTAADGLAVGRASGFVGRAMERLLDGLYTLDDQTMYDMLGWLAQEEGIRLEPSALAGMAGPQRICASVAYQQRHGFSQTQLGNATHLVWATGGGMVPEDEMEQYLAKGR

SEQ ID NO: 30648 - DNA, 1326 bp, Vibrio cholerae
  CDS (1)..(1326): transl_table=11
atgatgacgatcaacatagagcaacttaccgagcaatatccgctagtcaaagagctcatcgagcttaaagaggtatcttggtttaacccatccattactcgccttgaggaagggttaagctacgttggacttggttctgaggatattcaagatgcgagtcaacgcttaaaacgattcgcaccttatcttgcaaaagcgtttccagaaaccgcgaaaacaaacggaattattgagtctgaggtcgttcccatttcagagatgcaaagcgtgcttgagcgtgaatatgacaccccaatacaaggtcgattactcctcaaaaaagacagtcacttacccatttctggctctataaaagcgcgaggcgggatctatgaagtgttgactcacgcagaaaaactcgcgatagaggccggattgctgacggagtcagatgactacagcaaactcttaaacgaagaatttcgtgatttctttaaacggttcagtattgcagtgggttcgaccggaaatctggggatgtcgattgggattatgagtgctaagttaggtttctcggtttctgtgcatatgtcagccgatgcaagggcgtggaagaaaaacagactccgtgctcttggggtcaatgtgattgagtacgcccaagattatggtgttgcggtcgctcaggggcgcaaagaagctgaaaatgatccgacgtgctttttcattgatgatgaaaattcgcaaactctatttctagggtattcggttgcaggtgaacgcctcaagaaacagttcgatgaaaaaggtattgtagtcgacgcgcagcaccctttatttgtttacctaccctgcggcgttggtgggggaccgggaggggttgctttcggtctgaaaatggcttttggggacaatgttcattgtatttttgctgagccgactcattctccatgcatgatgcttggtgttcatactggcttgcatgacgcaatcagtgttcaagatatcgggattgataacatcactgcagctgatggtttagcggtggggagagcttctggttttgtcggtcgagcaatggaaaggctgctggatggctatttaaccatcagtgatgagcgtatgtaccgactgcttgggcaattgaatgaagcggagaatatccagctcgagccttctgcattagccggtatgattggccctatcgtggtcacaaagagtgttgaatatcgagctcgaatgcagtttgatgataccgtgatggggaatgccacgcatcttgtttgggcgactggcgggggaatggttccagcagaagagatggactcttacctaaaaaatcgttga

SEQ ID NO: 30649 - protein, 441 aa, Vibrio cholerae
MMTINIEQLTEQYPLVKELIELKEVSWFNPSITRLEEGLSYVGLGSEDIQDASQRLKRFAPYLAKAFPETAKTNGIIESEVVPISEMQSVLEREYDTPIQGRLLLKKDSHLPISGSIKARGGIYEVLTHAEKLAIEAGLLTESDDYSKLLNEEFRDFFKRFSIAVGSTGNLGMSIGIMSAKLGFSVSVHMSADARAWKKNRLRALGVNVIEYAQDYGVAVAQGRKEAENDPTCFFIDDENSQTLFLGYSVAGERLKKQFDEKGIVVDAQHPLFVYLPCGVGGGPGGVAFGLKMAFGDNVHCIFAEPTHSPCMMLGVHTGLHDAISVQDIGIDNITAADGLAVGRASGFVGRAMERLLDGYLTISDERMYRLLGQLNEAENIQLEPSALAGMIGPIVVTKSVEYRARMQFDDTVMGNATHLVWATGGGMVPAEEMDSYLKNR

SEQ ID NO: 30650 - DNA, 25 bp, Artificial sequence
  Primer sequence
atggaaaacgctaaaatgaactcgc

SEQ ID NO: 30651 - DNA, 24 bp, Artificial sequence
  Primer sequence
ttaacggccttttgccagatattg

SEQ ID NO: 30652 - protein, 430 aa, Artificial sequence
  Consensus
  Variant (2)..(2): Xaa in position 2 is any amino acid
  Variant (4)..(5): Xaa in position 4 to 5 is any amino acid
  Variant (7)..(13): Xaa in position 7 to 13 is any amino acid
  Variant (15)..(15): Xaa in position 15 is any amino acid
  Variant (18)..(21): Xaa in position 18 to 21 is any amino acid
  Variant (22)..(25): Xaa in position 22 to 25 is any or no amino acid
  Variant (27)..(28): Xaa in position 27 to 28 is any amino acid
  Variant (30)..(30): Xaa in position 30 is any amino acid
  Variant (32)..(34): Xaa in position 32 to 34 is any amino acid
  Variant (37)..(37): Xaa in position 37 is any amino acid
  Variant (40)..(41): Xaa in position 40 to 41 is any amino acid
  Variant (44)..(44): Xaa in position 44 is any amino acid
  Variant (51)..(53): Xaa in position 51 to 53 is any amino acid
  Variant (58)..(61): Xaa in position 58 to 61 is any amino acid
  Variant (67)..(67): Xaa in position 67 is any amino acid
  Variant (69)..(70): Xaa in position 69 to 70 is any amino acid
  Variant (72)..(73): Xaa in position 72 to 73 is any amino acid
  Variant (75)..(77): Xaa in position 75 to 77 is any amino acid
  Variant (79)..(79): Xaa in position 79 is any amino acid
  Variant (80)..(85): Xaa in position 80 to 85 is any or no amino acid
  Variant (87)..(87): Xaa in position 87 is any amino acid
  Variant (89)..(89): Xaa in position 89 is any amino acid
  Variant (91)..(91): Xaa in position 91 is any amino acid
  Variant (94)..(94): Xaa in position 94 is any amino acid
  Variant (96)..(97): Xaa in position 96 to 97 is any amino acid
  Variant (115)..(115): Xaa in position 115 is any amino acid
  Variant (119)..(119): Xaa in position 119 is any amino acid
  Variant (123)..(124): Xaa in position 123 to 124 is any amino acid
  Variant (128)..(130): Xaa in position 128 to 130 is any amino acid
  Variant (135)..(135): Xaa in position 135 is any amino acid
  Variant (137)..(141): Xaa in position 137 to 141 is any amino acid
  Variant (143)..(144): Xaa in position 143 to 144 is any amino acid
  Variant (146)..(147): Xaa in position 146 to 147 is any amino acid
  Variant (149)..(149): Xaa in position 149 is any amino acid
  Variant (151)..(151): Xaa in position 151 is any amino acid
  Variant (166)..(166): Xaa in position 166 is any amino acid
  Variant (168)..(168): Xaa in position 168 is any amino acid
  Variant (172)..(173): Xaa in position 172 to 173 is any amino acid
  Variant (183)..(183): Xaa in position 183 is any amino acid
  Variant (187)..(188): Xaa in position 187 to 188 is any amino acid
  Variant (191)..(192): Xaa in position 191 to 192 is any amino acid
  Variant (195)..(195): Xaa in position 195 is any amino acid
  Variant (200)..(201): Xaa in position 200 to 201 is any amino acid
  Variant (204)..(205): Xaa in position 204 to 205 is any amino acid
  Variant (208)..(209): Xaa in position 208 to 209 is any amino acid
  Variant (213)..(213): Xaa in position 213 is any amino acid
  Variant (215)..(216): Xaa in position 215 to 216 is any amino acid
  Variant (219)..(221): Xaa in position 219 to 221 is any amino acid
  Variant (227)..(227): Xaa in position 227 is any amino acid
  Variant (229)..(230): Xaa in position 229 to 230 is any amino acid
  Variant (240)..(240): Xaa in position 240 is any amino acid
  Variant (244)..(244): Xaa in position 244 is any amino acid
  Variant (246)..(250): Xaa in position 246 to 250 is any amino acid
  Variant (252)..(252): Xaa in position 252 is any amino acid
  Variant (255)..(256): Xaa in position 255 to 256 is any amino acid
  Variant (280)..(281): Xaa in position 280 to 281 is any amino acid
  Variant (285)..(285): Xaa in position 285 is any amino acid
  Variant (288)..(289): Xaa in position 288 to 289 is any amino acid
  Variant (298)..(298): Xaa in position 298 is any amino acid
  Variant (304)..(304): Xaa in position 304 is any amino acid
  Variant (307)..(307): Xaa in position 307 is any amino acid
  Variant (310)..(310): Xaa in position 310 is any amino acid
  Variant (314)..(314): Xaa in position 314 is any amino acid
  Variant (316)..(316): Xaa in position 316 is any amino acid
  Variant (321)..(321): Xaa in position 321 is any amino acid
  Variant (323)..(323): Xaa in position 323 is any amino acid
  Variant (332)..(332): Xaa in position 332 is any amino acid
  Variant (334)..(335): Xaa in position 334 to 335 is any amino acid
  Variant (339)..(339): Xaa in position 339 is any amino acid
  Variant (341)..(342): Xaa in position 341 to 342 is any amino acid
  Variant (345)..(345): Xaa in position 345 is any amino acid
  Variant (347)..(347): Xaa in position 347 is any amino acid
  Variant (351)..(351): Xaa in position 351 is any amino acid
  Variant (353)..(354): Xaa in position 353 to 354 is any amino acid
  Variant (357)..(358): Xaa in position 357 to 358 is any amino acid
  Variant (360)..(361): Xaa in position 360 to 361 is any amino acid
  Variant (363)..(365): Xaa in position 363 to 365 is any amino acid
  Variant (367)..(367): Xaa in position 367 is any amino acid
  Variant (369)..(369): Xaa in position 369 is any amino acid
  Variant (375)..(375): Xaa in position 375 is any amino acid
  Variant (378)..(379): Xaa in position 378 to 379 is any amino acid
  Variant (381)..(383): Xaa in position 381 to 383 is any amino acid
  Variant (385)..(390): Xaa in position 385 to 390 is any amino acid
  Variant (391)..(402): Xaa in position 391 to 402 is any or no amino acid
  Variant (404)..(405): Xaa in position 404 to 405 is any amino acid
  Variant (416)..(416): Xaa in position 416 is any amino acid
  Variant (420)..(422): Xaa in position 420 to 422 is any amino acid
  Variant (424)..(425): Xaa in position 424 to 425 is any amino acid
  Variant (427)..(429): Xaa in position 427 to 429 is any amino acid
PXIXXLXXXXXXXWXNPXXXXXXXXLXXVXLXXXDIXDAXXRLXRFAPYLXXXFPETXXXXGIIESXLXXIXXMXXXLXXXXXXXIXGXLXLKXDXXLPISGSIKARGGIYEVLXHAEXLALXXGLLXXXDDYSXLXXXXXRXXFXXYXIXVGSTGNLGLSIGIMXAXLGFXXTVHMSADARXWKKXXLRXXGVXVVEYXXDYXXAVXXGRKXAXXDPXXXFIDDEXSXXLFLGYAVAAXRLKXQXXXXXIXVDXXHPLFVYLPCGVGGGPGGVAFGLKXXFGDXVHXXFAEPTHSPXMLLGVXTGXHDXISVXDXGIDNXTXADGLAVGRXSXXVGRXMXXLLXGXYTVXDXXLYXXLXXLXXXEXIXLEPSAXAGXXGXXXVXXXXXXXXXXXXXXXXXXMXXATHLVWATGGXMVPXXXMXXYXXXG

SEQ ID NO: 30653 - protein, 17 aa, Artificial sequence
  Consensus
  Variant (9)..(9): Xaa in position 9 is Ile or Val
  Variant (14)..(14): Xaa in position 14 is any amino acid
  Variant (15)..(15): Xaa in position 15 is His or Tyr
GSIKARGGXYEVLXXAE

SEQ ID NO: 30654 - protein, 46 aa, Artificial sequence
  Consensus
  Variant (2)..(2): Xaa in position 2 is any or no amino acid
  Variant (10)..(10): Xaa in position 10 is Leu or Met
  Variant (15)..(15): Xaa in position 15 is any amino acid
  Variant (16)..(16): Xaa in position 16 is Ala, Gly or Ser
  Variant (18)..(18): Xaa in position 18 is any amino acid
  Variant (19)..(19): Xaa in position 19 is Ile or Leu
  Variant (22)..(22): Xaa in position 22 is any amino acid
  Variant (23)..(23): Xaa in position 23 is Ala or Val
  Variant (24)..(24): Xaa in position 24 is any amino acid
  Variant (29)..(29): Xaa in position 29 is Ala, Asp or Thr
  Variant (32)..(32): Xaa in position 32 is Lys or Arg
  Variant (33)..(33): Xaa in position 33 is any amino acid
  Variant (37)..(37): Xaa in position 37 is Ala, Asp, Asn or Gln
  Variant (38)..(38): Xaa in position 38 is any amino acid
  Variant (41)..(41): Xaa in position 41 is Ala, Glu, Gln or Ser
  Variant (42)..(42): Xaa in position 42 is any amino acid
  Variant (43)..(43): Xaa in position 43 is Gly or Asn
  Variant (45)..(45): Xaa in position 45 is any amino acid
VXGSTGNLGXSIGIXXAXXGFXXXVHMSXDAXXWKKXXLRXXXVXV

SEQ ID NO: 30655 - protein, 24 aa, Artificial sequence
  Consensus
  Variant (2)..(2): Xaa in position 2 is Ile or Val
  Variant (6)..(6): Xaa in position 6 is any amino acid
  Variant (8)..(9): Xaa in position 8 to 9 is any amino acid
  Variant (15)..(15): Xaa in position 15 is Ala or Ser
  Variant (18)..(18): Xaa in position 18 is Ala or Gly
  Variant (19)..(19): Xaa in position 19 is any amino acid
  Variant (21)..(21): Xaa in position 21 is Leu or Val
  Variant (22)..(23): Xaa in position 22 to 23 is any amino acid
FXDDEXSXXLFLGYXVAXXRXXXQ

SEQ ID NO: 30656 - protein, 40 aa, Artificial sequence
  Consensus
  Variant (5)..(5): Xaa in position 5 is His or Tyr
  Variant (8)..(8): Xaa in position 8 is Ala or Cys
  Variant (13)..(13): Xaa in position 13 is Ala, Gly or Ser
  Variant (15)..(15): Xaa in position 15 is Gly or Ser
  Variant (17)..(17): Xaa in position 17 is Ile or Val
  Variant (18)..(18): Xaa in position 18 is Ala, Ser, Thr or Val
  Variant (19)..(19): Xaa in position 19 is Phe or Tyr
  Variant (23)..(23): Xaa in position 23 is any amino acid
  Variant (24)..(24): Xaa in position 24 is Ala, Ile, Leu or Val
  Variant (25)..(26): Xaa in position 25 to 26 is any amino acid
  Variant (27)..(27): Xaa in position 27 is Asp or Glu
  Variant (28)..(28): Xaa in position 28 is any amino acid
  Variant (31)..(31): Xaa in position 31 is Ala, Cys, Pro or Val
  Variant (32)..(32): Xaa in position 32 is Phe, Ile, Leu or Val
  Variant (33)..(33): Xaa in position 33 is Phe or Val
  Variant (38)..(39): Xaa in position 38 to 39 is any amino acid
PLFVXLPXGVGGXPXGXXXGLKXXXXXXVHXXXAEPTXXP

SEQ ID NO: 30657 - protein, 62 aa, Artificial sequence
  Consensus
  Variant (2)..(4): Xaa in position 2 to 4 is any amino acid
  Variant (6)..(6): Xaa in position 6 is Ile or Leu
  Variant (9)..(9): Xaa in position 9 is any amino acid
  Variant (11)..(11): Xaa in position 11 is any or no amino acid
  Variant (13)..(13): Xaa in position 13 is any or no amino acid
  Variant (19)..(19): Xaa in position 19 is Ala or Gly
  Variant (20)..(20): Xaa in position 20 is Gln or Arg
  Variant (21)..(21): Xaa in position 21 is Ala, Gly or Pro
  Variant (23)..(23): Xaa in position 23 is any amino acid
  Variant (24)..(24): Xaa in position 24 is Phe or Leu
  Variant (25)..(25): Xaa in position 25 is Ala or Val
  Variant (26)..(26): Xaa in position 26 is Ala, Gly or Ser
  Variant (27)..(28): Xaa in position 27 to 28 is any amino acid
  Variant (29)..(29): Xaa in position 29 is Ile, Leu or Met
  Variant (30)..(32): Xaa in position 30 to 32 is any amino acid
  Variant (33)..(33): Xaa in position 33 is Ala, Ile or Leu
  Variant (34)..(34): Xaa in position 34 is Ala, Asp, Glu or Ser
  Variant (36)..(37): Xaa in position 36 to 37 is any amino acid
  Variant (39)..(39): Xaa in position 39 is Ile, Leu or Val
  Variant (40)..(40): Xaa in position 40 is Ala, Asp, Glu, Gln or Ser
  Variant (42)..(43): Xaa in position 42 to 43 is any amino acid
  Variant (44)..(44): Xaa in position 44 is Leu or Met
  Variant (45)..(45): Xaa in position 45 is Phe or Tyr
  Variant (46)..(47): Xaa in position 46 to 47 is any amino acid
  Variant (48)..(48): Xaa in position 48 is Ile or Leu
  Variant (49)..(58): Xaa in position 49 to 58 is any amino acid
VXXXGXDNXTXAXDGLAVXXXSXXXXXXXXXXXXGXXTXXDXXXXXXXXXXXXXXXXXLEPS

SEQ ID NO: 30658 - protein, 12 aa, Artificial sequence
  Consensus
  Variant (2)..(2): Xaa in position 2 is Ile, Leu, Met or Val
  Variant (3)..(3): Xaa in position 3 is any amino acid
  Variant (9)..(9): Xaa in position 9 is any amino acid
  Variant (11)..(11): Xaa in position 11 is Met or Val
HXXWATGGXMXP

SEQ ID NO: 30659 - DNA, 1122 bp, Escherichia coli K12; identical to SEQ ID NO: 21814
  CDS (1)..(1122)

SEQ ID NO: 30660 - protein, 373 aa, Escherichia coli K12; identical to SEQ ID NO: 21815

SEQ ID NO: 30661 - DNA, 1122 bp, Yersinia pestis; identical to SEQ ID NO: 21816
  CDS (1)..(1122)

SEQ ID NO: 30662 - protein, 373 aa, Yersinia pestis; identical to SEQ ID NO: 21817

SEQ ID NO: 30663 - DNA, 1122 bp, Salmonella enterica subsp. enterica serovar Typhi; identical to SEQ ID NO: 21818
  CDS (1)..(1122)

SEQ ID NO: 30664 - protein, 373 aa, Salmonella enterica subsp. enterica serovar Typhi; identical to SEQ ID NO: 21819

SEQ ID NO: 30665 - DNA, 1128 bp, Vibrio cholerae; identical to SEQ ID NO: 21820
  CDS (1)..(1128)

SEQ ID NO: 30666 - protein, 375 aa, Vibrio cholerae; identical to SEQ ID NO: 21821

SEQ ID NO: 30667 - DNA, 1134 bp, Haemophilus influenzae; identical to SEQ ID NO: 21822
  CDS (1)..(1134)

SEQ ID NO: 30668 - protein, 377 aa, Haemophilus influenzae; identical to SEQ ID NO: 21823

SEQ ID NO: 30669 - DNA, 1122 bp, Erwinia herbicola; identical to SEQ ID NO: 21824
  CDS (1)..(1122)

SEQ ID NO: 30670 - protein, 373 aa, Erwinia herbicola; identical to SEQ ID NO: 21825

SEQ ID NO: 30671 - DNA, 1131 bp, Mannheimia succiniciproducens MBEL55E; identical to SEQ ID NO: 21826
  CDS (1)..(1131)

SEQ ID NO: 30672 - protein, 376 aa, Mannheimia succiniciproducens MBEL55E; identical to SEQ ID NO: 21827

SEQ ID NO: 30673 - DNA, 1122 bp, Erwinia carotovora; identical to SEQ ID NO: 21828
  CDS (1)..(1122)

SEQ ID NO: 30674 - protein, 373 aa, Erwinia carotovora; identical to SEQ ID NO: 21829

SEQ ID NO: 30675 - DNA, 1128 bp, Photobacterium profundum; identical to SEQ ID NO: 21830
  CDS (1)..(1128)

SEQ ID NO: 30676 - protein, 375 aa, Photobacterium profundum; identical to SEQ ID NO: 21831

SEQ ID NO: 30677 - DNA, 1128 bp, Vibrio vulnificus; identical to SEQ ID NO: 21832
  CDS (1)..(1128)

SEQ ID NO: 30678 - protein, 375 aa, Vibrio vulnificus; identical to SEQ ID NO: 21833

SEQ ID NO: 30679 - DNA, 1122 bp, Photorhabdus luminescens; identical to SEQ ID NO: 21834
  CDS (1)..(1122)

SEQ ID NO: 30680 - protein, 373 aa, Photorhabdus luminescens; identical to SEQ ID NO: 21835

SEQ ID NO: 30681 - DNA, 1134 bp, Candidatus Blochmannia floridanus; identical to SEQ ID NO: 21836
  CDS (1)..(1134)

SEQ ID NO: 30682 - protein, 377 aa, Candidatus Blochmannia floridanus; identical to SEQ ID NO: 21837

SEQ ID NO: 30683 - DNA, 1128 bp, Vibrio parahaemolyticus; identical to SEQ ID NO: 21838
  CDS (1)..(1128)

SEQ ID NO: 30684 - protein, 375 aa, Vibrio parahaemolyticus; identical to SEQ ID NO: 21839

SEQ ID NO: 30685 - DNA, 1140 bp, Shewanella oneidensis; identical to SEQ ID NO: 21840
  CDS (1)..(1140)

SEQ ID NO: 30686 - protein, 379 aa, Shewanella oneidensis; identical to SEQ ID NO: 21841

SEQ ID NO: 30687 - DNA, 1125 bp, Pasteurella multocida; identical to SEQ ID NO: 21842
  CDS (1)..(1125)

SEQ ID NO: 30688 - protein, 374 aa, Pasteurella multocida; identical to SEQ ID NO: 21843

SEQ ID NO: 30689 - DNA, 24 bp, Artificial sequence
  Primer sequence
atggttgctgaattgaccgcatta

SEQ ID NO: 30690 - DNA, 23 bp, Artificial sequence
  Primer sequence
ttactggcgattgtcattcgcct

SEQ ID NO: 30691 - protein, 370 aa, Artificial sequence; identical to SEQ ID NO: 21846
  Consensus
  Variant (2)..(4): Xaa in position 2 to 4 is any amino acid
  Variant (6)..(7): Xaa in position 6 to 7 is any amino acid
  Variant (10)..(11): Xaa in position 10 to 11 is any amino acid
  Variant (13)..(21): Xaa in position 13 to 21 is any amino acid
  Variant (24)..(24): Xaa in position 24 is any amino acid
  Variant (27)..(29): Xaa in position 27 to 29 is any amino acid
  Variant (31)..(32): Xaa in position 31 to 32 is any amino acid
  Variant (34)..(36): Xaa in position 34 to 36 is any amino acid
  Variant (39)..(39): Xaa in position 39 is any amino acid
  Variant (42)..(42): Xaa in position 42 is any amino acid
  Variant (44)..(44): Xaa in position 44 is any amino acid
  Variant (47)..(49): Xaa in position 47 to 49 is any amino acid
  Variant (51)..(52): Xaa in position 51 to 52 is any amino acid
  Variant (54)..(55): Xaa in position 54 to 55 is any amino acid
  Variant (58)..(60): Xaa in position 58 to 60 is any amino acid
  Variant (62)..(65): Xaa in position 62 to 65 is any amino acid
  Variant (67)..(68): Xaa in position 67 to 68 is any amino acid
  Variant (70)..(70): Xaa in position 70 is any amino acid
  Variant (74)..(74): Xaa in position 74 is any amino acid
  Variant (80)..(81): Xaa in position 80 to 81 is any amino acid
  Variant (83)..(85): Xaa in position 83 to 85 is any amino acid
  Variant (89)..(97): Xaa in position 89 to 97 is any amino acid
  Variant (99)..(100): Xaa in position 99 to 100 is any amino acid
  Variant (103)..(103): Xaa in position 103 is any amino acid
  Variant (105)..(106): Xaa in position 105 to 106 is any amino acid
  Variant (108)..(109): Xaa in position 108 to 109 is any amino acid
  Variant (111)..(116): Xaa in position 111 to 116 is any amino acid
  Variant (120)..(123): Xaa in position 120 to 123 is any amino acid
  Variant (125)..(127): Xaa in position 125 to 127 is any amino acid
  Variant (130)..(131): Xaa in position 130 to 131 is any amino acid
  Variant (133)..(145): Xaa in position 133 to 145 is any amino acid
  Variant (149)..(154): Xaa in position 149 to 154 is any amino acid
  Variant (156)..(161): Xaa in position 156 to 161 is any amino acid
  Variant (163)..(169): Xaa in position 163 to 169 is any amino acid
  Variant (172)..(172): Xaa in position 172 is any amino acid
  Variant (174)..(174): Xaa in position 174 is any amino acid
  Variant (176)..(182): Xaa in position 176 to 182 is any amino acid
  Variant (184)..(185): Xaa in position 184 to 185 is any amino acid
  Variant (187)..(187): Xaa in position 187 is any amino acid
  Variant (189)..(189): Xaa in position 189 is any amino acid
  Variant (191)..(191): Xaa in position 191 is any amino acid
  Variant (193)..(193): Xaa in position 193 is any amino acid
  Variant (198)..(199): Xaa in position 198 to 199 is any amino acid
  Variant (201)..(205): Xaa in position 201 to 205 is any amino acid
  Variant (207)..(208): Xaa in position 207 to 208 is any amino acid
  Variant (210)..(210): Xaa in position 210 is any amino acid
  Variant (212)..(214): Xaa in position 212 to 214 is any amino acid
  Variant (216)..(216): Xaa in position 216 is any amino acid
  Variant (219)..(222): Xaa in position 219 to 222 is any amino acid
  Variant (224)..(224): Xaa in position 224 is any amino acid
  Variant (226)..(228): Xaa in position 226 to 228 is any amino acid
  Variant (230)..(232): Xaa in position 230 to 232 is any amino acid
  Variant (236)..(244): Xaa in position 236 to 244 is any amino acid
  Variant (247)..(248): Xaa in position 247 to 248 is any amino acid
  Variant (250)..(252): Xaa in position 250 to 252 is any amino acid
  Variant (254)..(256): Xaa in position 254 to 256 is any amino acid
  Variant (259)..(260): Xaa in position 259 to 260 is any amino acid
  Variant (262)..(263): Xaa in position 262 to 263 is any amino acid
  Variant (265)..(266): Xaa in position 265 to 266 is any amino acid
  Variant (268)..(280): Xaa in position 268 to 280 is any amino acid
  Variant (284)..(286): Xaa in position 284 to 286 is any amino acid
  Variant (290)..(292): Xaa in position 290 to 292 is any amino acid
  Variant (297)..(297): Xaa in position 297 is any amino acid
  Variant (299)..(301): Xaa in position 299 to 301 is any amino acid
  Variant (304)..(304): Xaa in position 304 is any amino acid
  Variant (308)..(316): Xaa in position 308 to 316 is any amino acid
  Variant (318)..(338): Xaa in position 318 to 338 is any amino acid
  Variant (340)..(342): Xaa in position 340 to 342 is any amino acid
  Variant (344)..(348): Xaa in position 344 to 348 is any amino acid
  Variant (350)..(356): Xaa in position 350 to 356 is any amino acid
  Variant (358)..(360): Xaa in position 358 to 360 is any amino acid
  Variant (362)..(364): Xaa in position 362 to 364 is any amino acid
  Variant (366)..(369): Xaa in position 366 to 369 is any amino acid

SEQ ID NO: 30692 - protein, 370 aa, Artificial sequence; identical to SEQ ID NO: 21847
  Consensus
  Variant (2)..(3): Xaa in position 2 to 3 is any amino acid
  Variant (6)..(7): Xaa in position 6 to 7 is any amino acid
  Variant (10)..(10): Xaa in position 10 is any amino acid
  Variant (13)..(17): Xaa in position 13 to 17 is any amino acid
  Variant (21)..(21): Xaa in position 21 is any amino acid
  Variant (24)..(24): Xaa in position 24 is any amino acid
  Variant (27)..(28): Xaa in position 27 to 28 is any amino acid
  Variant (31)..(31): Xaa in position 31 is any amino acid
  Variant (34)..(36): Xaa in position 34 to 36 is any amino acid
  Variant (42)..(42): Xaa in position 42 is any amino acid
  Variant (44)..(44): Xaa in position 44 is any amino acid
  Variant (48)..(48): Xaa in position 48 is any amino acid
  Variant (51)..(52): Xaa in position 51 to 52 is any amino acid
  Variant (55)..(55): Xaa in position 55 is any amino acid
  Variant (58)..(60): Xaa in position 58 to 60 is any amino acid
  Variant (62)..(63): Xaa in position 62 to 63 is any amino acid
  Variant (65)..(65): Xaa in position 65 is any amino acid
  Variant (70)..(70): Xaa in position 70 is any amino acid
  Variant (74)..(74): Xaa in position 74 is any amino acid
  Variant (80)..(81): Xaa in position 80 to 81 is any amino acid
  Variant (83)..(85): Xaa in position 83 to 85 is any amino acid
  Variant (89)..(91): Xaa in position 89 to 91 is any amino acid
  Variant (93)..(97): Xaa in position 93 to 97 is any amino acid
  Variant (100)..(100): Xaa in position 100 is any amino acid
  Variant (103)..(103): Xaa in position 103 is any amino acid
  Variant (105)..(106): Xaa in position 105 to 106 is any amino acid
  Variant (108)..(108): Xaa in position 108 is any amino acid
  Variant (111)..(115): Xaa in position 111 to 115 is any amino acid
  Variant (120)..(120): Xaa in position 120 is any amino acid
  Variant (122)..(123): Xaa in position 122 to 123 is any amino acid
  Variant (125)..(127): Xaa in position 125 to 127 is any amino acid
  Variant (130)..(131): Xaa in position 130 to 131 is any amino acid
  Variant (133)..(135): Xaa in position 133 to 135 is any amino acid
  Variant (137)..(138): Xaa in position 137 to 138 is any amino acid
  Variant (141)..(141): Xaa in position 141 is any amino acid
  Variant (143)..(143): Xaa in position 143 is any amino acid
  Variant (145)..(145): Xaa in position 145 is any amino acid
  Variant (149)..(150): Xaa in position 149 to 150 is any amino acid
  Variant (152)..(154): Xaa in position 152 to 154 is any amino acid
  Variant (156)..(157): Xaa in position 156 to 157 is any amino acid
  Variant (159)..(161): Xaa in position 159 to 161 is any amino acid
  Variant (163)..(164): Xaa in position 163 to 164 is any amino acid
  Variant (169)..(169): Xaa in position 169 is any amino acid
  Variant (172)..(172): Xaa in position 172 is any amino acid
  Variant (174)..(174): Xaa in position 174 is any amino acid
  Variant (176)..(177): Xaa in position 176 to 177 is any amino acid
  Variant (180)..(180): Xaa in position 180 is any amino acid
  Variant (184)..(185): Xaa in position 184 to 185 is any amino acid
  Variant (187)..(187): Xaa in position 187 is any amino acid
  Variant (191)..(191): Xaa in position 191 is any amino acid
  Variant (201)..(205): Xaa in position 201 to 205 is any amino acid
  Variant (207)..(207): Xaa in position 207 is any amino acid
  Variant (212)..(212): Xaa in position 212 is any amino acid
  Variant (214)..(214): Xaa in position 214 is any amino acid
  Variant (219)..(222): Xaa in position 219 to 222 is any amino acid
  Variant (226)..(226): Xaa in position 226 is any amino acid
  Variant (228)..(228): Xaa in position 228 is any amino acid
  Variant (230)..(232): Xaa in position 230 to 232 is any amino acid
  Variant (236)..(241): Xaa in position 236 to 241 is any amino acid
  Variant (243)..(243): Xaa in position 243 is any amino acid
  Variant (247)..(248): Xaa in position 247 to 248 is any amino acid
  Variant (250)..(251): Xaa in position 250 to 251 is any amino acid
  Variant (259)..(260): Xaa in position 259 to 260 is any amino acid
  Variant (263)..(263): Xaa in position 263 is any amino acid
  Variant (265)..(265): Xaa in position 265 is any amino acid
  Variant (268)..(269): Xaa in position 268 to 269 is any amino acid
  Variant (271)..(273): Xaa in position 271 to 273 is any amino acid
  Variant (275)..(276): Xaa in position 275 to 276 is any amino acid
  Variant (279)..(279): Xaa in position 279 is any amino acid
  Variant (292)..(292): Xaa in position 292 is any amino acid
  Variant (300)..(301): Xaa in position 300 to 301 is any amino acid
  Variant (308)..(312): Xaa in position 308 to 312 is any amino acid
  Variant (314)..(316): Xaa in position 314 to 316 is any amino acid
  Variant (318)..(326): Xaa in position 318 to 326 is any amino acid
  Variant (328)..(334): Xaa in position 328 to 334 is any amino acid
  Variant (337)..(338): Xaa in position 337 to 338 is any amino acid
  Variant (340)..(342): Xaa in position 340 to 342 is any amino acid
  Variant (344)..(345): Xaa in position 344 to 345 is any amino acid
  Variant (347)..(348): Xaa in position 347 to 348 is any amino acid
  Variant (352)..(352): Xaa in position 352 is any amino acid
  Variant (354)..(356): Xaa in position 354 to 356 is any amino acid
  Variant (358)..(359): Xaa in position 358 to 359 is any amino acid
  Variant (362)..(363): Xaa in position 362 to 363 is any amino acid
  Variant (366)..(366): Xaa in position 366 is any amino acid

SEQ ID NO: 30693 - protein, 62 aa, Artificial sequence; identical to SEQ ID NO: 21848
  Consensus
  Variant (2)..(3): Xaa in position 2 to 3 is any amino acid
  Variant (4)..(4): Xaa in position 4 is Leu or Ile
  Variant (6)..(7): Xaa in position 6 to 7 is any amino acid
  Variant (10)..(10): Xaa in position 10 is any amino acid
  Variant (11)..(11): Xaa in position 11 is Val, Leu or Ile
  Variant (13)..(13): Xaa in position 13 is Lys, Gln or Arg
  Variant (14)..(14): Xaa in position 14 is any amino acid
  Variant (15)..(15): Xaa in position 15 is Leu or Met
  Variant (16)..(16): Xaa in position 16 is Leu, Val or Ile
  Variant (17)..(17): Xaa in position 17 is any amino acid
  Variant (18)..(18): Xaa in position 18 is Leu or Val
  Variant (19)..(19): Xaa in position 19 is Leu or Phe
  Variant (20)..(20): Xaa in position 20 is Ala, Ser or Arg
  Variant (21)..(21): Xaa in position 21 is Lys, Gln or Arg
  Variant (24)..(24): Xaa in position 24 is any amino acid
  Variant (27)..(27): Xaa in position 27 is any amino acid
  Variant (28)..(28): Xaa in position 28 is Gln, Glu or Lys
  Variant (29)..(29): Xaa in position 29 is Val or Ile
  Variant (31)..(31): Xaa in position 31 is any amino acid
  Variant (32)..(32): Xaa in position 32 is Val or Ile
  Variant (34)..(34): Xaa in position 34 is Ser or His
  Variant (35)..(36): Xaa in position 35 to 36 is any amino acid
  Variant (39)..(39): Xaa in position 39 is any amino acid
  Variant (42)..(42): Xaa in position 42 is Ala, Val or Asp
  Variant (44)..(44): Xaa in position 44 is Asp, Glu or Gln
  Variant (47)..(48): Xaa in position 47 to 48 is any amino acid
  Variant (49)..(49): Xaa in position 49 is Met or Ile
  Variant (51)..(52): Xaa in position 51 to 52 is any amino acid
  Variant (54)..(54): Xaa in position 54 is Arg or Lys
  Variant (55)..(55): Xaa in position 55 is any amino acid
  Variant (58)..(60): Xaa in position 58 to 60 is any amino acid
  Variant (62)..(62): Xaa in position 62 is Val or Ile

SEQ ID NO: 30694 - protein, 23 aa, Artificial sequence
  Consensus
  Variant (2)..(2): Xaa in position 2 is Ile, Val or Leu
  Variant (3)..(3): Xaa in position 3 is Glu or Arg
  Variant (5)..(5): Xaa in position 5 is Ile, Val or Leu
  Variant (9)..(9): Xaa in position 9 is any amino acid
  Variant (15)..(16): Xaa in position 15 to 16 is any amino acid
  Variant (18)..(18): Xaa in position 18 is Asn, Lys or His
  Variant (19)..(20): Xaa in position 19 to 20 is any amino acid
LXXDXLRRXMRESYXXEXXXGFK

SEQ ID NO: 30695 - protein, 52 aa, Artificial sequence; identical to SEQ ID NO: 21850
  Consensus
  Variant (1)..(1): Xaa in position 1 is Val, Ile or Leu
  Variant (3)..(3): Xaa in position 3 is Ile, Val or Leu
  Variant (4)..(4): Xaa in position 4 is Val, Ile or Leu
  Variant (7)..(7): Xaa in position 7 is any amino acid
  Variant (9)..(9): Xaa in position 9 is Gln, Lys or Arg
  Variant (10)..(10): Xaa in position 10 is Leu or Met
  Variant (12)..(12): Xaa in position 12 is any amino acid
  Variant (13)..(13): Xaa in position 13 is Leu or Phe
  Variant (15)..(15): Xaa in position 15 is any amino acid
  Variant (16)..(16): Xaa in position 16 is Arg, Lys or Gln
  Variant (17)..(17): Xaa in position 17 is any amino acid
  Variant (18)..(18): Xaa in position 18 is Leu or Phe
  Variant (19)..(19): Xaa in position 19 is any amino acid
  Variant (20)..(20): Xaa in position 20 is Leu or Ala
  Variant (24)..(24): Xaa in position 24 is any amino acid
  Variant (25)..(25): Xaa in position 25 is Val or Ile
  Variant (26)..(27): Xaa in position 26 to 27 is any amino acid
  Variant (29)..(29): Xaa in position 29 is Glu, Gly or Asp
  Variant (30)..(31): Xaa in position 30 to 31 is any amino acid
  Variant (34)..(35): Xaa in position 34 to 35 is any amino acid
  Variant (37)..(38): Xaa in position 37 to 38 is any amino acid
  Variant (39)..(39): Xaa in position 39 is Ile or Leu
  Variant (40)..(40): Xaa in position 40 is Leu, Val or Phe
  Variant (41)..(42): Xaa in position 41 to 42 is any amino acid
  Variant (43)..(43): Xaa in position 43 is Ala, Val or Thr
  Variant (44)..(44): Xaa in position 44 is Gly, Asp or Asn
  Variant (45)..(45): Xaa in position 45 is Met, Leu, Val or Ala
  Variant (46)..(46): Xaa in position 46 is Val, Ile or Leu
  Variant (47)..(47): Xaa in position 47 is Ile, Leu, Val or Phe
  Variant (48)..(48): Xaa in position 48 is Val, Ile or Leu
  Variant (49)..(49): Xaa in position 49 is Ser, Thr or Cys

SEQ ID NO: 30696 - protein, 34 aa, Artificial sequence; identical to SEQ ID NO: 21851
  Consensus
  Variant (1)..(1): Xaa in position 1 is Ile, Leu or Val
  Variant (2)..(2): Xaa in position 2 is Leu, Ile or Val
  Variant (3)..(3): Xaa in position 3 is any amino acid
  Variant (6)..(6): Xaa in position 6 is Thr, Ala or Ser
  Variant (8)..(8): Xaa in position 8 is Val, Ile or Leu
  Variant (10)..(11): Xaa in position 10 to 11 is any amino acid
  Variant (12)..(12): Xaa in position 12 is Pro or Ser
  Variant (13)..(13): Xaa in position 13 is Leu or Met
  Variant (14)..(15): Xaa in position 14 to 15 is any amino acid
  Variant (16)..(16): Xaa in position 16 is Met or Ile
  Variant (18)..(18): Xaa in position 18 is any amino acid
  Variant (19)..(19): Xaa in position 19 is Val, Ala or Ile
  Variant (21)..(21): Xaa in position 21 is any amino acid
  Variant (23)..(23): Xaa in position 23 is Pro or Ala
  Variant (25)..(25): Xaa in position 25 is Leu, Val or Ile
  Variant (27)..(27): Xaa in position 27 is Leu or Phe
  Variant (32)..(32): Xaa in position 32 is Gly or Ser
  Variant (33)..(33): Xaa in position 33 is Pro or Ala

SEQ ID NO: 30697 - protein, 30 aa, Artificial sequence; identical to SEQ ID NO: 21852
  Consensus
  Variant (2)..(2): Xaa in position 2 is Leu or Met
  Variant (3)..(3): Xaa in position 3 is Ala, Ile or Val
  Variant (5)..(5): Xaa in position 5 is Gln or Lys
  Variant (7)..(8): Xaa in position 7 to 8 is Val, Ile or Leu
  Variant (9)..(9): Xaa in position 9 is any amino acid
  Variant (11)..(11): Xaa in position 11 is Asp or His
  Variant (14)..(17): Xaa in position 14 to 17 is any amino acid
  Variant (19)..(19): Xaa in position 19 is Gln or Glu
  Variant (21)..(21): Xaa in position 21 is Leu or Phe
  Variant (22)..(22): Xaa in position 22 is Leu, Ile or Val
  Variant (23)..(23): Xaa in position 23 is Glu, Gln or Thr
  Variant (25)..(25): Xaa in position 25 is Ile, Phe or Leu
  Variant (26)..(26): Xaa in position 26 is any amino acid
  Variant (27)..(27): Xaa in position 27 is Ile, Val, Leu or Met

SEQ ID NO: 30698 - protein, 23 aa, Artificial sequence
  Consensus
  Variant (3)..(4): Xaa in position 3 to 4 is any amino acid
  Variant (6)..(6): Xaa in position 6 is any amino acid
  Variant (7)..(7): Xaa in position 7 is Phe, Leu or Tyr
  Variant (8)..(8): Xaa in position 8 is Ile or Val
  Variant (10)..(10): Xaa in position 10 is Ala or Ser
  Variant (11)..(11): Xaa in position 11 is Leu or Met
  Variant (12)..(12): Xaa in position 12 is Arg or Cys
  Variant (15)..(15): Xaa in position 15 is Ala, Thr or Ser
  Variant (16)..(16): Xaa in position 16 is Thr, Ser or Ile
  Variant (18)..(18): Xaa in position 18 is Ala or Val
  Variant (19)..(19): Xaa in position 19 is any amino acid
  Variant (21)..(21): Xaa in position 21 is any amino acid
  Variant (22)..(22): Xaa in position 22 is His or Asn
HDXXMXXXQXXXHFXXFXXGXXL

SEQ ID NO: 30699 - protein, 37 aa, Artificial sequence; identical to SEQ ID NO: 21854
  Consensus
  Variant (4)..(4): Xaa in position 4 is Ile, Met, Leu or Phe
  Variant (5)..(5): Xaa in position 5 is Tyr or Phe
  Variant (6)..(6): Xaa in position 6 is Arg, Gln or Cys
  Variant (10)..(10): Xaa in position 10 is Ala or Ile
  Variant (11)..(11): Xaa in position 11 is Met, Leu, Val or Ile
  Variant (12)..(12): Xaa in position 12 is Val, Ile or Leu
  Variant (17)..(17): Xaa in position 17 is Ala, Gly or Thr
  Variant (19)..(21): Xaa in position 19 to 21 is any amino acid
  Variant (24)..(24): Xaa in position 24 is Ala or Gly
  Variant (28)..(28): Xaa in position 28 is Met, Leu or Phe
  Variant (29)..(29): Xaa in position 29 is Ser, Asp or Ala
  Variant (30)..(32): Xaa in position 30 to 32 is any amino acid
  Variant (33)..(33): Xaa in position 33 is Asn or Ser
  Variant (34)..(34): Xaa in position 34 is Leu, Ile, Val or Gln
  Variant (35)..(35): Xaa in position 35 is any amino acid
  Variant (36)..(36): Xaa in position 36 is Leu, Met, Val or Ala

SEQ ID NO: 30700 - DNA, 1071 bp, Escherichia coli K12; identical to SEQ ID NO: 1333
  CDS (1)..(1071)

SEQ ID NO: 30701 - protein, 356 aa, Escherichia coli K12; identical to SEQ ID NO: 1334

SEQ ID NO: 30702 - DNA, 1235 bp, Salmonella typhimurium; identical to SEQ ID NO: 1325
  CDS (165)..(1235)

SEQ ID NO: 30703 - protein, 356 aa, Salmonella typhimurium; identical to SEQ ID NO: 1326

SEQ ID NO: 30704 - DNA, 1086 bp, Deinococcus radiodurans; identical to SEQ ID NO: 1327
  CDS (1)..(1086)

SEQ ID NO: 30705 - protein, 361 aa, Deinococcus radiodurans; identical to SEQ ID NO: 1328

SEQ ID NO: 30706 - DNA, 1056 bp, Neisseria meningitidis; identical to SEQ ID NO: 1329
  CDS (1)..(1056)

SEQ ID NO: 30707 - protein, 351 aa, Neisseria meningitidis; identical to SEQ ID NO: 1330

SEQ ID NO: 30708 - DNA, 1047 bp, Yersinia pestis; identical to SEQ ID NO: 1331
  CDS (1)..(1047)

SEQ ID NO: 30709 - protein, 348 aa, Yersinia pestis; identical to SEQ ID NO: 1332

SEQ ID NO: 30710 - DNA, 1047 bp, Salmonella enterica subsp. enterica serovar Typhi; identical to SEQ ID NO: 1575
  CDS (1)..(1047)

SEQ ID NO: 30711 - protein, 348 aa, Salmonella enterica subsp. enterica serovar Typhi; identical to SEQ ID NO: 1576

SEQ ID NO: 30712 - DNA, 1047 bp, Escherichia coli; identical to SEQ ID NO: 1323
  CDS (1)..(1047)

SEQ ID NO: 30713 - protein, 348 aa, Escherichia coli; identical to SEQ ID NO: 1324

SEQ ID NO: 30714 - DNA, 1188 bp, Escherichia coli; identical to SEQ ID NO: 1579
  CDS (92)..(1144)

SEQ ID NO: 30715 - protein, 350 aa, Escherichia coli; identical to SEQ ID NO: 1580

SEQ ID NO: 30716 - DNA, 1131 bp, Nostoc sp. PCC 7120; identical to SEQ ID NO: 1335
  CDS (1)..(1131)

SEQ ID NO: 30717 - protein, 376 aa, Nostoc sp. PCC 7120; identical to SEQ ID NO: 1336

SEQ ID NO: 30718 - DNA, 1053 bp, Salmonella enterica subsp. enterica serovar Typhi; identical to SEQ ID NO: 1337
  CDS (1)..(1053)

SEQ ID NO: 30719 - protein, 350 aa, Salmonella enterica subsp. enterica serovar Typhi; identical to SEQ ID NO: 1338

SEQ ID NO: 30720 - DNA, 1077 bp, Pseudomonas aeruginosa; identical to SEQ ID NO: 1339
  CDS (1)..(1077)

SEQ ID NO: 30721 - protein, 358 aa, Pseudomonas aeruginosa; identical to SEQ ID NO: 1340

SEQ ID NO: 30722 - DNA, 1047 bp, Buchnera sp; identical to SEQ ID NO: 1341
  CDS (1)..(1047)

SEQ ID NO: 30723 - protein, 348 aa, Buchnera sp; identical to SEQ ID NO: 1342

SEQ ID NO: 30724 - DNA, 1032 bp, Streptococcus pneumoniae; identical to SEQ ID NO: 1589
  CDS (1)..(1032)

SEQ ID NO: 30725 - protein, 343 aa, Streptococcus pneumoniae; identical to SEQ ID NO: 1590

SEQ ID NO: 30726 - DNA, 1074 bp, Vibrio cholerae; identical to SEQ ID NO: 1343
  CDS (1)..(1074)

SEQ ID NO: 30727 - protein, 357 aa, Vibrio cholerae; identical to SEQ ID NO: 1344

SEQ ID NO: 30728 - DNA, 1038 bp, Lactococcus lactis subsp. lactis; identical to SEQ ID NO: 1345
  CDS (1)..(1038)

SEQ ID NO: 30729 - protein, 345 aa, Lactococcus lactis subsp. lactis; identical to SEQ ID NO: 1346

SEQ ID NO: 30730 - DNA, 1023 bp, Lactococcus lactis subsp. lactis; identical to SEQ ID NO: 1347
  CDS (1)..(1023)

SEQ ID NO: 30731 - protein, 340 aa, Lactococcus lactis subsp. lactis; identical to SEQ ID NO: 1348

SEQ ID NO: 30732 - DNA, 1032 bp, Streptococcus pneumoniae; identical to SEQ ID NO: 1597
  CDS (1)..(1032)

SEQ ID NO: 30733 - protein, 343 aa, Streptococcus pneumoniae; identical to SEQ ID NO: 1350

SEQ ID NO: 30734 - DNA, 1095 bp, Pseudomonas aeruginosa; identical to SEQ ID NO: 1351
  CDS (1)..(1095)

SEQ ID NO: 30735 - protein, 364 aa, Pseudomonas aeruginosa; identical to SEQ ID NO: 1352

SEQ ID NO: 30736 - DNA, 1110 bp, Caulobacter crescentus; identical to SEQ ID NO: 1353
  CDS (1)..(1110)

SEQ ID NO: 30737 - protein, 369 aa, Caulobacter crescentus; identical to SEQ ID NO: 1354

SEQ ID NO: 30738 - DNA, 1143 bp, Xylella fastidiosa; identical to SEQ ID NO: 1603
  CDS (1)..(1143)

SEQ ID NO: 30739 - protein, 380 aa, Xylella fastidiosa; identical to SEQ ID NO: 1604

SEQ ID NO: 30740 - DNA, 1047 bp, Buchnera aphidicola; identical to SEQ ID NO: 1357
  CDS (1)..(1047)

SEQ ID NO: 30741 - protein, 348 aa, Buchnera aphidicola; identical to SEQ ID NO: 1358

SEQ ID NO: 30742 - DNA, 1089 bp, Haemophilus influenzae; identical to SEQ ID NO: 1359
  CDS (1)..(1089)

SEQ ID NO: 30743 - protein, 362 aa, Haemophilus influenzae; identical to SEQ ID NO: 1360

SEQ ID NO: 30744 - DNA, 1502 bp, Candida albicans; identical to SEQ ID NO: 1361
  CDS (336)..(1442)

SEQ ID NO: 30745 - protein, 368 aa, Candida albicans; identical to SEQ ID NO: 1362

SEQ ID NO: 30746 - DNA, 1113 bp, Saccharomyces cerevisiae; identical to SEQ ID NO: 1363
  CDS (1)..(1113)

SEQ ID NO: 30747 - protein, 370 aa, Saccharomyces cerevisiae; identical to SEQ ID NO: 1364

SEQ ID NO: 30748 - DNA, 2048 bp, Saccharomyces cerevisiae; identical to SEQ ID NO: 1365
  CDS (619)..(1731)

SEQ ID NO: 30749 - protein, 370 aa, Saccharomyces cerevisiae; identical to SEQ ID NO: 1366

SEQ ID NO: 30750 - DNA, 1107 bp, Schizosaccharomyces pombe; identical to SEQ ID NO: 1367
  CDS (1)..(1107)

SEQ ID NO: 30751 - protein, 368 aa, Schizosaccharomyces pombe; identical to SEQ ID NO: 1368

SEQ ID NO: 30752 - DNA, 1089 bp, Amycolatopsis orientalis; identical to SEQ ID NO: 1369
  CDS (1)..(1089)

SEQ ID NO: 30753 - protein, 362 aa, Amycolatopsis orientalis; identical to SEQ ID NO: 1370

SEQ ID NO: 30754 - DNA, 1248 bp, Corynebacterium glutamicum; identical to SEQ ID NO: 1373
  CDS (101)..(1228)

SEQ ID NO: 30755 - protein, 375 aa, Corynebacterium glutamicum; identical to SEQ ID NO: 1374

SEQ ID NO: 30756 - DNA, 1083 bp, Methylophilus methylotrophus; identical to SEQ ID NO: 1375
  CDS (1)..(1083)

SEQ ID NO: 30757 - protein, 360 aa, Methylophilus methylotrophus; identical to SEQ ID NO: 1376

SEQ ID NO: 30758 - DNA, 1047 bp, Yersinia pseudotuberculosis IP 32953; identical to SEQ ID NO: 1623
  CDS (1)..(1047)

SEQ ID NO: 30759 - protein, 348 aa, Yersinia pseudotuberculosis IP 32953; identical to SEQ ID NO: 1624

SEQ ID NO: 30760 - DNA, 1053 bp, Yersinia pseudotuberculosis IP 32953; identical to SEQ ID NO: 1487
  CDS (1)..(1053)

SEQ ID NO: 30761 - protein, 350 aa, Yersinia pseudotuberculosis IP 32953; identical to SEQ ID NO: 1488

SEQ ID NO: 30762 - DNA, 1107 bp, Debaryomyces hansenii CBS767; identical to SEQ ID NO: 1377
  CDS (1)..(1107)

SEQ ID NO: 30763 - protein, 368 aa, Debaryomyces hansenii CBS767; identical to SEQ ID NO: 1378

SEQ ID NO: 30764 - DNA, 1074 bp, Yarrowia lipolytica CLIB99; identical to SEQ ID NO: 1379
  CDS (1)..(1074)

SEQ ID NO: 30765 - protein, 357 aa, Yarrowia lipolytica CLIB99; identical to SEQ ID NO: 1380

SEQ ID NO: 30766 - DNA, 1089 bp, Yarrowia lipolytica CLIB99; identical to SEQ ID NO: 1381
  CDS (1)..(1089)

SEQ ID NO: 30767 - protein, 362 aa, Yarrowia lipolytica CLIB99; identical to SEQ ID NO: 1382

SEQ ID NO: 30768 - DNA, 1119 bp, Kluyveromyces lactis NRRL Y; identical to SEQ ID NO: 1383
  CDS (1)..(1119)

SEQ ID NO: 30769 - protein, 372 aa, Kluyveromyces lactis NRRL Y; identical to SEQ ID NO: 1384

SEQ ID NO: 30770 - DNA, 1095 bp, Kluyveromyces lactis NRRL Y; identical to SEQ ID NO: 1385
  CDS (1)..(1095)

SEQ ID NO: 30771 - protein, 364 aa, Kluyveromyces lactis NRRL Y; identical to SEQ ID NO: 1386

SEQ ID NO: 30772 - DNA, 1074 bp, Erwinia carotovora; identical to SEQ ID NO: 1387
  CDS (1)..(1074)

SEQ ID NO: 30773 - protein, 357 aa, Erwinia carotovora; identical to SEQ ID NO: 1388

SEQ ID NO: 30774 - DNA, 1047 bp, Erwinia carotovora; identical to SEQ ID NO: 1389
  CDS (1)..(1047)

SEQ ID NO: 30775 - protein, 348 aa, Erwinia carotovora; identical to SEQ ID NO: 1390

SEQ ID NO: 30776 - DNA, 1056 bp, Erwinia carotovora; identical to SEQ ID NO: 1391
  CDS (1)..(1056)

SEQ ID NO: 30777 - protein, 351 aa, Erwinia carotovora; identical to SEQ ID NO: 1392

SEQ ID NO: 30778 - DNA, 1113 bp, Acinetobacter sp; identical to SEQ ID NO: 1393
  CDS (1)..(1113)

SEQ ID NO: 30779 - protein, 370 aa, Acinetobacter sp; identical to SEQ ID NO: 1394

SEQ ID NO: 30780 - DNA, 1056 bp, Acinetobacter sp; identical to SEQ ID NO: 1395
  CDS (1)..(1056)

SEQ ID NO: 30781 - protein, 351 aa, Acinetobacter sp; identical to SEQ ID NO: 1396

SEQ ID NO: 30782 - DNA, 1119 bp, Candida glabrata CBS138; identical to SEQ ID NO: 1397
  CDS (1)..(1119)

SEQ ID NO: 30783 - protein, 372 aa, Candida glabrata CBS138; identical to SEQ ID NO: 1398

SEQ ID NO: 30784 - DNA, 1071 bp, Candida glabrata CBS138; identical to SEQ ID NO: 1399
  CDS (1)..(1071)

SEQ ID NO: 30785 - protein, 356 aa, Candida glabrata CBS138; identical to SEQ ID NO: 1400

SEQ ID NO: 30786 - DNA, 1083 bp, Photobacterium profundum; identical to SEQ ID NO: 1401
  CDS (1)..(1083)

SEQ ID NO: 30787 - protein, 360 aa, Photobacterium profundum; identical to SEQ ID NO: 1402

SEQ ID NO: 30788 - DNA, 1053 bp, Photobacterium profundum; identical to SEQ ID NO: 1403
  CDS (1)..(1053)

SEQ ID NO: 30789 - protein, 350 aa, Photobacterium profundum; identical to SEQ ID NO: 1404

SEQ ID NO: 30790 - DNA, 1113 bp, Photobacterium profundum; identical to SEQ ID NO: 1405
  CDS (1)..(1113)

SEQ ID NO: 30791 - protein, 370 aa, Photobacterium profundum; identical to SEQ ID NO: 1406

SEQ ID NO: 30792 - DNA, 1056 bp, Photobacterium profundum; identical to SEQ ID NO: 1407
  CDS (1)..(1056)

SEQ ID NO: 30793 - protein, 351 aa, Photobacterium profundum; identical to SEQ ID NO: 1408

SEQ ID NO: 30794 - DNA, 1092 bp, Parachlamydia sp; identical to SEQ ID NO: 1409
  CDS (1)..(1092)

SEQ ID NO: 30795 - protein, 363 aa, Parachlamydia sp; identical to SEQ ID NO: 1410

SEQ ID NO: 30796 - DNA, 1095 bp, Rhodopseudomonas palustris; identical to SEQ ID NO: 1411
  CDS (1)..(1095)

SEQ ID NO: 30797 - protein, 364 aa, Rhodopseudomonas palustris; identical to SEQ ID NO: 1412

SEQ ID NO: 30798 - DNA, 1100 bp, Amycolatopsis methanolica; identical to SEQ ID NO: 1413
  CDS (1)..(1086)

SEQ ID NO: 30799 - protein, 361 aa, Amycolatopsis methanolica; identical to SEQ ID NO: 1414

SEQ ID NO: 30800 - DNA, 1071 bp, Treponema denticola; identical to SEQ ID NO: 1415
  CDS (1)..(1071)

SEQ ID NO: 30801 - protein, 356 aa, Treponema denticola; identical to SEQ ID NO: 1416

SEQ ID NO: 30802 - DNA, 1020 bp, Geobacter sulfurreducens; identical to SEQ ID NO: 1667
  CDS (1)..(1020)

SEQ ID NO: 30803 - protein, 339 aa, Geobacter sulfurreducens; identical to SEQ ID NO: 1668

SEQ ID NO: 30804 - DNA, 1068 bp, Geobacter sulfurreducens; identical to SEQ ID NO: 1417
  CDS (1)..(1068)

SEQ ID NO: 30805 - protein, 355 aa, Geobacter sulfurreducens; identical to SEQ ID NO: 1418

SEQ ID NO: 30806 - DNA, 1122 bp, Ashbya gossypii; identical to SEQ ID NO: 1421
  CDS (1)..(1122)

SEQ ID NO: 30807 - protein, 373 aa, Ashbya gossypii; identical to SEQ ID NO: 1422

SEQ ID NO: 30808 - DNA, 1098 bp, Amycolatopsis balhimycina; identical to SEQ ID NO: 1423
  CDS (1)..(1098)

SEQ ID NO: 30809 - protein, 365 aa, Amycolatopsis balhimycina; identical to SEQ ID NO: 1424

SEQ ID NO: 30810 - DNA, 1053 bp, Vibrio vulnificus; identical to SEQ ID NO: 1675
  CDS (1)..(1053)

SEQ ID NO: 30811 - protein, 350 aa, Vibrio vulnificus; identical to SEQ ID NO: 1676

SEQ ID NO: 30812 - DNA, 1047 bp, Photorhabdus luminescens; identical to SEQ ID NO: 1427
  CDS (1)..(1047)

SEQ ID NO: 30813 - protein, 348 aa, Photorhabdus luminescens; identical to SEQ ID NO: 1428

SEQ ID NO: 30814 - DNA, 1053 bp, Photorhabdus luminescens; identical to SEQ ID NO: 1429
  CDS (1)..(1053)

SEQ ID NO: 30815 - protein, 350 aa, Photorhabdus luminescens; identical to SEQ ID NO: 1430

SEQ ID NO: 30816 - DNA, 1095 bp, Photorhabdus luminescens; identical to SEQ ID NO: 1431
  CDS (1)..(1095)

SEQ ID NO: 30817 - protein, 364 aa, Photorhabdus luminescens; identical to SEQ ID NO: 1432

SEQ ID NO: 30818 - DNA, 1119 bp, Gloeobacter violaceus; identical to SEQ ID NO: 1433
  CDS (1)..(1119)

SEQ ID NO: 30819 - protein, 372 aa, Gloeobacter violaceus; identical to SEQ ID NO: 1434

SEQ ID NO: 30820 - DNA, 1107 bp, Chromobacterium violaceum; identical to SEQ ID NO: 1435
  CDS (1)..(1107)

SEQ ID NO: 30821 - protein, 368 aa, Chromobacterium violaceum; identical to SEQ ID NO: 1436

SEQ ID NO: 30822 - DNA, 1059 bp, Chromobacterium violaceum; identical to SEQ ID NO: 1437
  CDS (1)..(1059)

SEQ ID NO: 30823 - protein, 352 aa, Chromobacterium violaceum; identical to SEQ ID NO: 1438

SEQ ID NO: 30824 - DNA, 1140 bp, Neurospora crassa; identical to SEQ ID NO: 1439
  CDS (1)..(1140)

SEQ ID NO: 30825 - protein, 379 aa, Neurospora crassa; identical to SEQ ID NO: 1440

SEQ ID NO: 30826 - DNA, 1092 bp, Neurospora crassa; identical to SEQ ID NO: 1441
  CDS (1)..(1092)

SEQ ID NO: 30827 - protein, 363 aa, Neurospora crassa; identical to SEQ ID NO: 1442

SEQ ID NO: 30828 - DNA, 1068 bp, Synechococcus sp; identical to SEQ ID NO: 1443
  CDS (1)..(1068)

SEQ ID NO: 30829 - protein, 355 aa, Synechococcus sp; identical to SEQ ID NO: 1444

SEQ ID NO: 30830 - DNA, 1053 bp, Rhodopirellula baltica; identical to SEQ ID NO: 1445
  CDS (1)..(1053)

SEQ ID NO: 30831 - protein, 350 aa, Rhodopirellula baltica; identical to SEQ ID NO: 1446

SEQ ID NO: 30832 - DNA, 1068 bp, Prochlorococcus marinus subsp; identical to SEQ ID NO: 1447
  CDS (1)..(1068)

SEQ ID NO: 30833 - protein, 355 aa, Prochlorococcus marinus subsp; identical to SEQ ID NO: 1448

SEQ ID NO: 30834 - DNA, 1083 bp, Prochlorococcus marinus; identical to SEQ ID NO: 1449
  CDS (1)..(1083)

SEQ ID NO: 30835 - protein, 360 aa, Prochlorococcus marinus; identical to SEQ ID NO: 1450

SEQ ID NO: 30836 - DNA, 1074 bp, Prochlorococcus marinus; identical to SEQ ID NO: 1451
  CDS (1)..(1074)

SEQ ID NO: 30837 - protein, 357 aa, Prochlorococcus marinus; identical to SEQ ID NO: 1452

SEQ ID NO: 30838 - DNA, 1113 bp, Haemophilus ducreyi; identical to SEQ ID NO: 1453
  CDS (1)..(1113)

SEQ ID NO: 30839 - protein, 370 aa, Haemophilus ducreyi; identical to SEQ ID NO: 1454

SEQ ID NO: 30840 - DNA, 1080 bp, Haemophilus ducreyi; identical to SEQ ID NO: 1455
  CDS (1)..(1080)

SEQ ID NO: 30841 - protein, 359 aa, Haemophilus ducreyi; identical to SEQ ID NO: 1456

SEQ ID NO: 30842 - DNA, 1086 bp, Candidatus Blochmannia floridanus; identical to SEQ ID NO: 1457
  CDS (1)..(1086)

SEQ ID NO: 30843 - protein, 361 aa, Candidatus Blochmannia floridanus; identical to SEQ ID NO: 1458

SEQ ID NO: 30844 - DNA, 1074 bp, Bordetella pertussis; identical to SEQ ID NO: 1459
  CDS (1)..(1074)

SEQ ID NO: 30845 - protein, 357 aa, Bordetella pertussis; identical to SEQ ID NO: 1460

SEQ ID NO: 30846 - DNA, 1119 bp, Bordetella bronchiseptica; identical to SEQ ID NO: 1461
  CDS (1)..(1119)

SEQ ID NO: 30847 - protein, 372 aa, Bordetella bronchiseptica; identical to SEQ ID NO: 1462

SEQ ID NO: 30848 - DNA, 1179 bp, Nitrosomonas europaea; identical to SEQ ID NO: 1463
  CDS (1)..(1179)

SEQ ID NO: 30849 - protein, 392 aa, Nitrosomonas europaea; identical to SEQ ID NO: 1464

SEQ ID NO: 30850 - DNA, 1083 bp, Coxiella burnetii; identical to SEQ ID NO: 1465
  CDS (1)..(1083)

SEQ ID NO: 30851 - protein, 360 aa, Coxiella burnetii; identical to SEQ ID NO: 1466

SEQ ID NO: 30852 - DNA, 1143 bp, Xylella fastidiosa; identical to SEQ ID NO: 1469
  CDS (1)..(1143)

SEQ ID NO: 30853 - protein, 380 aa, Xylella fastidiosa; identical to SEQ ID NO: 1470

SEQ ID NO: 30854 - DNA, 1053 bp, Vibrio parahaemolyticus; identical to SEQ ID NO: 1471
  CDS (1)..(1053)

SEQ ID NO: 30855 - protein, 350 aa, Vibrio parahaemolyticus; identical to SEQ ID NO: 1472

SEQ ID NO: 30856 - DNA, 1053 bp, Vibrio parahaemolyticus; identical to SEQ ID NO: 1473
  CDS (1)..(1053)

SEQ ID NO: 30857 - protein, 350 aa, Vibrio parahaemolyticus; identical to SEQ ID NO: 1474

SEQ ID NO: 30858 - DNA, 1074 bp, Vibrio parahaemolyticus; identical to SEQ ID NO: 1475
  CDS (1)..(1074)

SEQ ID NO: 30859 - protein, 357 aa, Vibrio parahaemolyticus; identical to SEQ ID NO: 1476

SEQ ID NO: 30860 - DNA, 1083 bp, Pseudomonas syringae; identical to SEQ ID NO: 1477
  CDS (1)..(1083)

SEQ ID NO: 30861 - protein, 360 aa, Pseudomonas syringae; identical to SEQ ID NO: 1478

SEQ ID NO: 30862 - DNA, 1077 bp, Pseudomonas syringae; identical to SEQ ID NO: 1479
  CDS (1)..(1077)

SEQ ID NO: 30863 - protein, 358 aa, Pseudomonas syringae; identical to SEQ ID NO: 1480

SEQ ID NO: 30864 - DNA, 1062 bp, Pseudomonas putida; identical to SEQ ID NO: 1481
  CDS (1)..(1062)

SEQ ID NO: 30865 - protein, 353 aa, Pseudomonas putida; identical to SEQ ID NO: 1482

SEQ ID NO: 30866 - DNA, 1113 bp, Pseudomonas putida; identical to SEQ ID NO: 1483
  CDS (1)..(1113)

SEQ ID NO: 30867 - protein, 370 aa, Pseudomonas putida; identical to SEQ ID NO: 1484

SEQ ID NO: 30868 - DNA, 1086 bp, Bradyrhizobium japonicum; identical to SEQ ID NO: 1485
  CDS (1)..(1086)

SEQ ID NO: 30869 - protein, 361 aa, Bradyrhizobium japonicum; identical to SEQ ID NO: 1486

SEQ ID NO: 30870 - DNA, 1077 bp, Yersinia pestis; identical to SEQ ID NO: 1489
  CDS (1)..(1077)

SEQ ID NO: 30871 - protein, 358 aa, Yersinia pestis; identical to SEQ ID NO: 1490

SEQ ID NO: 30872 - DNA, 1038 bp, Wigglesworthia glossinidia brevipalpis; identical to SEQ ID NO: 1491
  CDS (1)..(1038)

SEQ ID NO: 30873 - protein, 345 aa, Wigglesworthia glossinidia brevipalpis; identical to SEQ ID NO: 1492

SEQ ID NO: 30874 - DNA, 1071 bp, Vibrio vulnificus; identical to SEQ ID NO: 1739
  CDS (1)..(1071)

SEQ ID NO: 30875 - protein, 356 aa, Vibrio vulnificus; identical to SEQ ID NO: 1740

SEQ ID NO: 30876 - DNA, 1053 bp, Vibrio vulnificus; identical to SEQ ID NO: 1495
  CDS (1)..(1053)

SEQ ID NO: 30877 - protein, 350 aa, Vibrio vulnificus; identical to SEQ ID NO: 1496

SEQ ID NO: 30878 - DNA, 1071 bp, Vibrio vulnificus; identical to SEQ ID NO: 1497
  CDS (1)..(1071)

SEQ ID NO: 30879 - protein, 356 aa, Vibrio vulnificus; identical to SEQ ID NO: 1498

SEQ ID NO: 30880 - DNA, 1062 bp, Synechococcus elongatus; identical to SEQ ID NO: 1499
  CDS (1)..(1062)

SEQ ID NO: 30881 - protein, 353 aa, Synechococcus elongatus; identical to SEQ ID NO: 1500

SEQ ID NO: 30882 - DNA, 1032 bp, Streptococcus mutans; identical to SEQ ID NO: 1501
  CDS (1)..(1032)

SEQ ID NO: 30883 - protein, 343 aa, Streptococcus mutans; identical to SEQ ID NO: 1502

SEQ ID NO: 30884 - DNA, 1035 bp, Streptococcus mutans; identical to SEQ ID NO: 1503
  CDS (1)..(1035)

SEQ ID NO: 30885 - protein, 344 aa, Streptococcus mutans; identical to SEQ ID NO: 1504

SEQ ID NO: 30886 - DNA, 1008 bp, Streptococcus agalactiae; identical to SEQ ID NO: 1505
  CDS (1)..(1008)

SEQ ID NO: 30887 - protein, 335 aa, Streptococcus agalactiae; identical to SEQ ID NO: 1506

SEQ ID NO: 30888 - DNA, 1065 bp, Shewanella oneidensis; identical to SEQ ID NO: 1507
  CDS (1)..(1065)

SEQ ID NO: 30889 - protein, 354 aa, Shewanella oneidensis; identical to SEQ ID NO: 1508

SEQ ID NO: 30890 - DNA, 1092 bp, Shewanella oneidensis; identical to SEQ ID NO: 1509
  CDS (1)..(1092)

SEQ ID NO: 30891 - protein, 363 aa, Shewanella oneidensis; identical to SEQ ID NO: 1510

SEQ ID NO: 30892 - DNA, 1059 bp, Shewanella oneidensis; identical to SEQ ID NO: 1511
  CDS (1)..(1059)

SEQ ID NO: 30893 - protein, 352 aa, Shewanella oneidensis; identical to SEQ ID NO: 1512

SEQ ID NO: 30894 - DNA, 1053 bp, Escherichia coli O6; identical to SEQ ID NO: 1513
  CDS (1)..(1053)

SEQ ID NO: 30895 - protein, 350 aa, Escherichia coli O6; identical to SEQ ID NO: 1514

SEQ ID NO: 30896 - DNA, 1170 bp, Corynebacterium efficiens; identical to SEQ ID NO: 1515
  CDS (1)..(1170)

SEQ ID NO: 30897 - protein, 389 aa, Corynebacterium efficiens; identical to SEQ ID NO: 1516

SEQ ID NO: 30898 - DNA, 1134 bp, Bifidobacterium longum; identical to SEQ ID NO: 1517
  CDS (1)..(1134)

SEQ ID NO: 30899 - protein, 377 aa, Bifidobacterium longum; identical to SEQ ID NO: 1518

SEQ ID NO: 30900 - DNA, 1233 bp, Bifidobacterium longum; identical to SEQ ID NO: 1519
  CDS (1)..(1233)

SEQ ID NO: 30901 - protein, 410 aa, Bifidobacterium longum; identical to SEQ ID NO: 1520

SEQ ID NO: 30902 - DNA, 1221 bp, Phytophthora infestans; identical to SEQ ID NO: 1521
  CDS (20)..(1153)

SEQ ID NO: 30903 - protein, 377 aa, Phytophthora infestans; identical to SEQ ID NO: 1522

SEQ ID NO: 30904 - DNA, 1062 bp, Chlorobium tepidum; identical to SEQ ID NO: 1523
  CDS (1)..(1062)

SEQ ID NO: 30905 - protein, 353 aa, Chlorobium tepidum; identical to SEQ ID NO: 1524

SEQ ID NO: 30906 - DNA, 1074 bp, Xanthomonas campestris; identical to SEQ ID NO: 1525
  CDS (1)..(1074)

SEQ ID NO: 30907 - protein, 357 aa, Xanthomonas campestris; identical to SEQ ID NO: 1526

SEQ ID NO: 30908 - DNA, 1074 bp, Xanthomonas axonopodis; identical to SEQ ID NO: 1527
  CDS (1)..(1074)

SEQ ID NO: 30909 - protein, 357 aa, Xanthomonas axonopodis; identical to SEQ ID NO: 1528

SEQ ID NO: 30910 - DNA, 1080 bp, Ralstonia solanacearum; identical to SEQ ID NO: 1529
  CDS (1)..(1080)

SEQ ID NO: 30911 - protein, 359 aa, Ralstonia solanacearum; identical to SEQ ID NO: 1530

SEQ ID NO: 30912 - DNA, 1179 bp, Ralstonia solanacearum; identical to SEQ ID NO: 1531
  CDS (1)..(1179)

SEQ ID NO: 30913 - protein, 392 aa, Ralstonia solanacearum; identical to SEQ ID NO: 1532

SEQ ID NO: 30914 - DNA, 1065 bp, Synechococcus sp; identical to SEQ ID NO: 1533
  CDS (1)..(1065)

SEQ ID NO: 30915 - protein, 354 aa, Synechococcus sp; identical to SEQ ID NO: 1534

SEQ ID NO: 30916 - DNA, 1035 bp, Escherichia coli; identical to SEQ ID NO: 1535
  CDS (1)..(1035)

SEQ ID NO: 30917 - protein, 344 aa, Escherichia coli; identical to SEQ ID NO: 1536

SEQ ID NO: 30918 - DNA, 1200 bp, Stigmatella aurantiaca; identical to SEQ ID NO: 1537
  CDS (62)..(1147)

SEQ ID NO: 30919 - protein, 361 aa, Stigmatella aurantiaca; identical to SEQ ID NO: 1538

SEQ ID NO: 30920 - DNA, 1092 bp, Rhizobium loti; identical to SEQ ID NO: 1539
  CDS (1)..(1092)

SEQ ID NO: 30921 - protein, 363 aa, Rhizobium loti; identical to SEQ ID NO: 1540

SEQ ID NO: 30922 - DNA, 1083 bp, Amycolatopsis mediterranei; identical to SEQ ID NO: 1541
  CDS (1)..(1083)

SEQ ID NO: 30923 - protein, 360 aa, Amycolatopsis mediterranei; identical to SEQ ID NO: 1542

SEQ ID NO: 30924 - DNA, 1053 bp, Pasteurella multocida; identical to SEQ ID NO: 1543
  CDS (1)..(1053)

SEQ ID NO: 30925 - protein, 350 aa, Pasteurella multocida; identical to SEQ ID NO: 1544

SEQ ID NO: 30926 - DNA, 1086 bp, Pasteurella multocida; identical to SEQ ID NO: 1545
  CDS (1)..(1086)

SEQ ID NO: 30927 - protein, 361 aa, Pasteurella multocida; identical to SEQ ID NO: 1546

SEQ ID NO: 30928 - DNA, 1089 bp, Emericella nidulans; identical to SEQ ID NO: 1549
  CDS (1)..(1089)

SEQ ID NO: 30929 - protein, 362 aa, Emericella nidulans; identical to SEQ ID NO: 1550

SEQ ID NO: 30930 - DNA, 1239 bp, Vibrio cholerae; identical to SEQ ID NO: 1551
  CDS (114)..(1175)

SEQ ID NO: 30931 - protein, 353 aa, Vibrio cholerae; identical to SEQ ID NO: 1552

SEQ ID NO: 30932 - DNA, 1113 bp, Candida albicans; identical to SEQ ID NO: 1797
  CDS (1)..(1113)

SEQ ID NO: 30933 - protein, 370 aa, Candida albicans; identical to SEQ ID NO: 1554

SEQ ID NO: 30934 - DNA, 1047 bp, Buchnera aphidicola; identical to SEQ ID NO: 1557
  CDS (1)..(1047)

SEQ ID NO: 30935 - protein, 348 aa, Buchnera aphidicola; identical to SEQ ID NO: 1558

SEQ ID NO: 30936 - DNA, 1047 bp, Erwinia herbicola; identical to SEQ ID NO: 1559
  CDS (1)..(1047)

SEQ ID NO: 30937 - protein, 348 aa, Erwinia herbicola; identical to SEQ ID NO: 1560

SEQ ID NO: 30938 - DNA, 23 bp, Artificial sequence
  Primer sequence
atgcaaaaagacgcgctgaataa

SEQ ID NO: 30939 - DNA, 21 bp, Artificial sequence
  Primer sequence
ttaagccacgcgagccgtcag

SEQ ID NO: 30940 - protein, 296 aa, Artificial sequence; identical to SEQ ID NO: 2896
  Consensus
  Variant (5)..(35): Xaa in position 5 to 35 is any amino acid
  Variant (37)..(37): Xaa in position 37 is any amino acid
  Variant (39)..(40): Xaa in position 39 to 40 is any amino acid
  Variant (42)..(42): Xaa in position 42 is any amino acid
  Variant (45)..(47): Xaa in position 45 to 47 is any amino acid
  Variant (49)..(50): Xaa in position 49 to 50 is any amino acid
  Variant (52)..(55): Xaa in position 52 to 55 is any amino acid
  Variant (57)..(66): Xaa in position 57 to 66 is any amino acid
  Variant (68)..(71): Xaa in position 68 to 71 is any amino acid
  Variant (73)..(108): Xaa in position 73 to 108 is any amino acid
  Variant (112)..(117): Xaa in position 112 to 117 is any amino acid
  Variant (120)..(122): Xaa in position 120 to 122 is any amino acid
  Variant (124)..(131): Xaa in position 124 to 131 is any amino acid
  Variant (134)..(136): Xaa in position 134 to 136 is any amino acid
  Variant (138)..(170): Xaa in position 138 to 170 is any amino acid
  Variant (173)..(179): Xaa in position 173 to 179 is any amino acid
  Variant (182)..(191): Xaa in position 182 to 191 is any amino acid
  Variant (193)..(222): Xaa in position 193 to 222 is any amino acid
  Variant (224)..(225): Xaa in position 224 to 225 is any amino acid
  Variant (227)..(227): Xaa in position 227 is any amino acid
  Variant (229)..(260): Xaa in position 229 to 260 is any amino acid
  Variant (262)..(262): Xaa in position 262 is any amino acid
  Variant (264)..(268): Xaa in position 264 to 268 is any amino acid
  Variant (270)..(288): Xaa in position 270 to 288 is any amino acid
  Variant (290)..(290): Xaa in position 290 is any amino acid
  Variant (292)..(292): Xaa in position 292 is any amino acid
  Variant (295)..(295): Xaa in position 295 is any amino acid

SEQ ID NO: 30941 - protein, 352 aa, Artificial sequence; identical to SEQ ID NO: 2895
  Consensus
  Variant (2)..(3): Xaa in position 2 to 3 is any amino acid
  Variant (5)..(11): Xaa in position 5 to 11 is any amino acid
  Variant (13)..(24): Xaa in position 13 to 24 is any amino acid
  Variant (26)..(30): Xaa in position 26 to 30 is any amino acid
  Variant (32)..(33): Xaa in position 32 to 33 is any amino acid
  Variant (35)..(35): Xaa in position 35 is any amino acid
  Variant (37)..(40): Xaa in position 37 to 40 is any amino acid
  Variant (43)..(43): Xaa in position 43 is any amino acid
  Variant (45)..(46): Xaa in position 45 to 46 is any amino acid
  Variant (51)..(51): Xaa in position 51 is any amino acid
  Variant (54)..(55): Xaa in position 54 to 55 is any amino acid
  Variant (58)..(59): Xaa in position 58 to 59 is any amino acid
  Variant (62)..(63): Xaa in position 62 to 63 is any amino acid
  Variant (65)..(76): Xaa in position 65 to 76 is any amino acid
  Variant (78)..(80): Xaa in position 78 to 80 is any amino acid
  Variant (83)..(83): Xaa in position 83 is any amino acid
  Variant (85)..(85): Xaa in position 85 is any amino acid
  Variant (91)..(93): Xaa in position 91 to 93 is any amino acid
  Variant (100)..(100): Xaa in position 100 is any amino acid
  Variant (103)..(112): Xaa in position 103 to 112 is any amino acid
  Variant (115)..(117): Xaa in position 115 to 117 is any amino acid
  Variant (119)..(119): Xaa in position 119 is any amino acid
  Variant (121)..(130): Xaa in position 121 to 130 is any amino acid
  Variant (132)..(132): Xaa in position 132 is any amino acid
  Variant (134)..(134): Xaa in position 134 is any amino acid
  Variant (136)..(136): Xaa in position 136 is any amino acid
  Variant (139)..(142): Xaa in position 139 to 142 is any amino acid
  Variant (144)..(146): Xaa in position 144 to 146 is any amino acid
  Variant (148)..(150): Xaa in position 148 to 150 is any amino acid
  Variant (152)..(152): Xaa in position 152 is any amino acid
  Variant (163)..(163): Xaa in position 163 is any amino acid
  Variant (167)..(167): Xaa in position 167 is any amino acid
  Variant (170)..(170): Xaa in position 170 is any amino acid
  Variant (173)..(173): Xaa in position 173 is any amino acid
  Variant (175)..(175): Xaa in position 175 is any amino acid
  Variant (182)..(182): Xaa in position 182 is any amino acid
  Variant (184)..(187): Xaa in position 184 to 187 is any amino acid
  Variant (189)..(190): Xaa in position 189 to 190 is any amino acid
  Variant (192)..(194): Xaa in position 192 to 194 is any amino acid
  Variant (196)..(198): Xaa in position 196 to 198 is any amino acid
  Variant (200)..(200): Xaa in position 200 is any amino acid
  Variant (202)..(207): Xaa in position 202 to 207 is any amino acid
  Variant (209)..(214): Xaa in position 209 to 214 is any amino acid
  Variant (216)..(216): Xaa in position 216 is any amino acid
  Variant (219)..(221): Xaa in position 219 to 221 is any amino acid
  Variant (223)..(224): Xaa in position 223 to 224 is any amino acid
  Variant (229)..(237): Xaa in position 229 to 237 is any amino acid
  Variant (240)..(268): Xaa in position 240 to 268 is any amino acid
  Variant (270)..(270): Xaa in position 270 is any amino acid
  Variant (273)..(273): Xaa in position 273 is any amino acid
  Variant (276)..(276): Xaa in position 276 is any amino acid
  Variant (278)..(281): Xaa in position 278 to 281 is any amino acid
  Variant (283)..(284): Xaa in position 283 to 284 is any amino acid
  Variant (286)..(291): Xaa in position 286 to 291 is any amino acid
  Variant (293)..(295): Xaa in position 293 to 295 is any amino acid
  Variant (297)..(304): Xaa in position 297 to 304 is any amino acid
  Variant (306)..(306): Xaa in position 306 is any amino acid
  Variant (308)..(308): Xaa in position 308 is any amino acid
  Variant (311)..(314): Xaa in position 311 to 314 is any amino acid
  Variant (316)..(316): Xaa in position 316 is any amino acid
  Variant (318)..(333): Xaa in position 318 to 333 is any amino acid
  Variant (336)..(336): Xaa in position 336 is any amino acid
  Variant (338)..(338): Xaa in position 338 is any amino acid
  Variant (341)..(341): Xaa in position 341 is any amino acid
  Variant (343)..(344): Xaa in position 343 to 344 is any amino acid
  Variant (346)..(347): Xaa in position 346 to 347 is any amino acid
  Variant (349)..(351): Xaa in position 349 to 351 is any amino acid

SEQ ID NO: 30942 - protein, 26 aa, Artificial sequence
  Consensus
  Variant (1)..(1): Xaa in position 1 is Asp or Asn
  Variant (2)..(2): Xaa in position 2 is any amino acid
  Variant (4)..(4): Xaa in position 4 is any amino acid
  Variant (5)..(5): Xaa in position 5 is Leu, Val, Ile, Phe, Ala or Met
  Variant (6)..(6): Xaa in position 6 is Val, Ile, Leu or Ala
  Variant (7)..(7): Xaa in position 7 is Val or Ile
  Variant (8)..(8): Xaa in position 8 is Val, Ile, Cys or Thr
  Variant (13)..(13): Xaa in position 13 is Ile, Val, Ser or Leu
  Variant (14)..(14): Xaa in position 14 is His or Asp
  Variant (15)..(15): Xaa in position 15 is Asp or Asn
  Variant (16)..(18): Xaa in position 16 to 18 is any amino acid
  Variant (19)..(19): Xaa in position 19 is Ala, Val or Gly
  Variant (20)..(20): Xaa in position 20 is any amino acid
  Variant (21)..(21): Xaa in position 21 is Glu, Asp, Ala or Gln
  Variant (23)..(23): Xaa in position 23 is Ala, Gly, Ser or Cys
  Variant (24)..(25): Xaa in position 24 to 25 is any amino acid
  Variant (26)..(26): Xaa in position 26 is Leu, Ile or Phe
XXRXXXXXGPCSXXXXXXXXXYXXXX

SEQ ID NO: 30943 - protein, 40 aa, Artificial sequence; identical to SEQ ID NO: 2890
  Consensus
  Variant (1)..(1): Xaa in position 1 is Ile, Val, Leu or Met
  Variant (2)..(2): Xaa in position 2 is Val, Ile or Leu
  Variant (5)..(5): Xaa in position 5 is Val, Ala or Thr
  Variant (7)..(7): Xaa in position 7 is Phe, Leu, Thr or Val
  Variant (8)..(8): Xaa in position 8 is Glu, Ala or Gln
  Variant (13)..(14): Xaa in position 13 to 14 is any amino acid
  Variant (15)..(15): Xaa in position 15 is any or no amino acid
  Variant (17)..(17): Xaa in position 17 is Trp or Tyr
  Variant (18)..(18): Xaa in position 18 is Lys or Arg
  Variant (20)..(20): Xaa in position 20 is Leu, Phe, Tyr or Met
  Variant (21)..(21): Xaa in position 21 is Ile, Val, Ala or Leu
  Variant (22)..(22): Xaa in position 22 is any amino acid
  Variant (23)..(23): Xaa in position 23 is Asp, Glu or Gln
  Variant (25)..(25): Xaa in position 25 is any amino acid
  Variant (26)..(26): Xaa in position 26 is Leu, Met, Ile, Val, Ala or Thr
  Variant (27)..(27): Xaa in position 27 is Asp, Asn or Ser
  Variant (28)..(31): Xaa in position 28 to 31 is any amino acid
  Variant (32)..(32): Xaa in position 32 is Ile, Val, Leu or Met
  Variant (33)..(34): Xaa in position 33 to 34 is any amino acid
  Variant (36)..(36): Xaa in position 36 is Leu, Ile, Met or Val
  Variant (37)..(38): Xaa in position 37 to 38 is any amino acid
  Variant (39)..(39): Xaa in position 39 is Ala, Ser, Gly, Val or Thr

SEQ ID NO: 30944 - protein, 58 aa, Artificial sequence; identical to SEQ ID NO: 2891
  Consensus
  Variant (1)..(1): Xaa in position 1 is Tyr, Phe or Leu
  Variant (2)..(3): Xaa in position 2 to 3 is any amino acid
  Variant (4)..(4): Xaa in position 4 is Asp or Glu
  Variant (5)..(6): Xaa in position 5 to 6 is any amino acid
  Variant (7)..(7): Xaa in position 7 is Ser, Ala, Thr or Cys
  Variant (8)..(8): Xaa in position 8 is Trp, Leu, Phe, Tyr or Val
  Variant (9)..(9): Xaa in position 9 is any amino acid
  Variant (10)..(10): Xaa in position 10 is Ala or Ser
  Variant (11)..(11): Xaa in position 11 is Ile or Val
  Variant (15)..(15): Xaa in position 15 is Thr, Ser or Asn
  Variant (16)..(16): Xaa in position 16 is Thr, Val, Ala or Ser
  Variant (17)..(17): Xaa in position 17 is Glu or Ala
  Variant (18)..(18): Xaa in position 18 is Ser, Asp or Asn
  Variant (20)..(20): Xaa in position 20 is any amino acid
  Variant (23)..(23): Xaa in position 23 is Glu, Gln, Phe or Met
  Variant (24)..(24): Xaa in position 24 is Leu, Met, Val or Ile
  Variant (25)..(25): Xaa in position 25 is Ala, Ser, Thr, Cys or Val
  Variant (27)..(27): Xaa in position 27 is Gly or Ala
  Variant (28)..(28): Xaa in position 28 is Leu, Ile, Met or Val
  Variant (29)..(30): Xaa in position 29 to 30 is any amino acid
  Variant (31)..(31): Xaa in position 31 is Pro or Ala
  Variant (32)..(32): Xaa in position 32 is Val, Ile or Thr
  Variant (34)..(34): Xaa in position 34 is Phe, Met, Tyr or Ile
  Variant (37)..(37): Xaa in position 37 is any amino acid
  Variant (38)..(38): Xaa in position 38 is Thr or Arg
  Variant (39)..(39): Xaa in position 39 is any amino acid
  Variant (41)..(41): Xaa in position 41 is any amino acid
  Variant (42)..(42): Xaa in position 42 is Leu, Ile, Val, Ala, Thr or Phe
  Variant (43)..(44): Xaa in position 43 to 44 is any amino acid
  Variant (45)..(45): Xaa in position 45 is Ala or Met
  Variant (46)..(46): Xaa in position 46 is any amino acid
  Variant (47)..(47): Xaa in position 47 is Asp, Asn or Glu
  Variant (48)..(48): Xaa in position 48 is Ala or Gly
  Variant (49)..(50): Xaa in position 49 to 50 is any amino acid
  Variant (51)..(51): Xaa in position 51 is Ala or Ser
  Variant (52)..(52): Xaa in position 52 is Ala, Ser, Val or Thr
  Variant (53)..(55): Xaa in position 53 to 55 is any amino acid
  Variant (56)..(56): Xaa in position 56 is His or Gln
  Variant (57)..(57): Xaa in position 57 is any amino acid
  Variant (58)..(58): Xaa in position 58 is Phe, Tyr, His or Val

SEQ ID NO: 30945 - protein, 25 aa, Artificial sequence
  Consensus
  Variant (1)..(1): Xaa in position 1 is Thr or Ser
  Variant (2)..(2): Xaa in position 2 is any amino acid
  Variant (5)..(7): Xaa in position 5 to 7 is any amino acid
  Variant (8)..(8): Xaa in position 8 is His or Phe
  Variant (9)..(9): Xaa in position 9 is Val, Ile, Leu or Ala
  Variant (10)..(10): Xaa in position 10 is Ile or Val
  Variant (11)..(11): Xaa in position 11 is Leu or Met
  Variant (14)..(14): Xaa in position 14 is Gly, Ser or Ala
  Variant (15)..(16): Xaa in position 15 to 16 is any amino acid
  Variant (17)..(22): Xaa in position 17 to 22 is any or no amino acid
  Variant (23)..(23): Xaa in position 23 is Pro, Thr or Ser
  Variant (25)..(25): Xaa in position 25 is Tyr, Phe or His
XXGNXXXXXXXRGXXXXXXXXXXNX

SEQ ID NO: 30946 - protein, 52 aa, Artificial sequence; identical to SEQ ID NO: 2893
  Consensus
  Variant (1)..(1): Xaa in position 1 is Leu, Ile or Val
  Variant (2)..(2): Xaa in position 2 is Met, Val, Ile or Leu
  Variant (3)..(3): Xaa in position 3 is Ile or Val
  Variant (5)..(5): Xaa in position 5 is any amino acid
  Variant (6)..(6): Xaa in position 6 is Ser, Asn or Ala
  Variant (8)..(8): Xaa in position 8 is Ala, Gly or Asp
  Variant (10)..(10): Xaa in position 10 is Ser or Cys
  Variant (11)..(11): Xaa in position 11 is any amino acid
  Variant (13)..(15): Xaa in position 13 to 15 is any amino acid
  Variant (16)..(16): Xaa in position 16 is Arg, Asn, Lys, Leu or Glu
  Variant (18)..(19): Xaa in position 18 to 19 is any amino acid
  Variant (20)..(20): Xaa in position 20 is Val or Ile
  Variant (21)..(23): Xaa in position 21 to 23 is any amino acid
  Variant (24)..(24): Xaa in position 24 is Val, Ile, Leu, Thr or Ala
  Variant (25)..(26): Xaa in position 25 to 26 is any amino acid
  Variant (27)..(27): Xaa in position 27 is Gln, Asn or Arg
  Variant (28)..(28): Xaa in position 28 is Ile, Leu, Val, Arg or Met
  Variant (29)..(30): Xaa in position 29 to 30 is any amino acid
  Variant (31)..(31): Xaa in position 31 is Gly, Asn or Asp
  Variant (32)..(34): Xaa in position 32 to 34 is any amino acid
  Variant (35)..(37): Xaa in position 35 to 37 is any or no amino acid
  Variant (38)..(38): Xaa in position 38 is Ile, Val or Leu
  Variant (39)..(39): Xaa in position 39 is any amino acid
  Variant (41)..(41): Xaa in position 41 is any amino acid
  Variant (43)..(43): Xaa in position 43 is Ile, Leu, Val, Ala or Met
  Variant (46)..(46): Xaa in position 46 is His, Phe, Asn or Tyr
  Variant (47)..(47): Xaa in position 47 is Leu or Ile
  Variant (48)..(49): Xaa in position 48 to 49 is any amino acid
  Variant (51)..(51): Xaa in position 51 is any amino acid

SEQ ID NO: 30947 - protein, 19 aa, Artificial sequence
  Consensus
  Variant (1)..(1): Xaa in position 1 is Tyr, Phe, Lys or Arg
  Variant (3)..(3): Xaa in position 3 is any amino acid
  Variant (5)..(5): Xaa in position 5 is Ile or Val
  Variant (8)..(8): Xaa in position 8 is any amino acid
  Variant (10)..(10): Xaa in position 10 is Ile, Leu or Val
  Variant (11)..(11): Xaa in position 11 is any amino acid
  Variant (12)..(12): Xaa in position 12 is Trp, Ile, Phe or Leu
  Variant (13)..(14): Xaa in position 13 to 14 is any amino acid
  Variant (15)..(15): Xaa in position 15 is Thr or Ser
  Variant (16)..(18): Xaa in position 16 to 18 is any amino acid
  Variant (19)..(19): Xaa in position 19 is Leu, Ile, Val or Phe
XGXSXTDXCXXXXXXXXXX

SEQ ID NO: 30948 - DNA, 1575 bp, Escherichia coli K12; identical to SEQ ID NO: 10324
  CDS (244)..(1575)

SEQ ID NO: 30949 - protein, 443 aa, Escherichia coli K12; identical to SEQ ID NO: 10325

SEQ ID NO: 30950 - DNA, 1326 bp, Yersinia pestis; identical to SEQ ID NO: 10326
  CDS (1)..(1326)

SEQ ID NO: 30951 - protein, 441 aa, Yersinia pestis; identical to SEQ ID NO: 10327

SEQ ID NO: 30952 - DNA, 1332 bp, Salmonella enterica subsp. enterica serovar Typhi; identical to SEQ ID NO: 10328
  CDS (1)..(1332)

SEQ ID NO: 30953 - protein, 443 aa, Salmonella enterica subsp. enterica serovar Typhi; identical to SEQ ID NO: 10329

SEQ ID NO: 30954 - DNA, 1311 bp, Neisseria meningitidis; identical to SEQ ID NO: 10330
  CDS (1)..(1311)

SEQ ID NO: 30955 - protein, 436 aa, Neisseria meningitidis; identical to SEQ ID NO: 10331

SEQ ID NO: 30956 - DNA, 1863 bp, Arabidopsis thaliana (mouse-ear cress); identical to SEQ ID NO: 10332
  CDS (1)..(1863)

SEQ ID NO: 30957 - protein, 620 aa, Arabidopsis thaliana (mouse-ear cress); identical to SEQ ID NO: 10333

SEQ ID NO: 30958 - DNA, 1371 bp, Vibrio cholerae; identical to SEQ ID NO: 10334
  CDS (1)..(1371)

SEQ ID NO: 30959 - protein, 456 aa, Vibrio cholerae; identical to SEQ ID NO: 10335

SEQ ID NO: 30960 - DNA, 1299 bp, Pseudomonas aeruginosa; identical to SEQ ID NO: 10336
  CDS (1)..(1299)

SEQ ID NO: 30961 - protein, 432 aa, Pseudomonas aeruginosa; identical to SEQ ID NO: 10337

SEQ ID NO: 30962 - DNA, 1259 bp, Pseudomonas aeruginosa; identical to SEQ ID NO: 10338
  CDS (45)..(1238)

SEQ ID NO: 30963 - protein, 397 aa, Pseudomonas aeruginosa; identical to SEQ ID NO: 10339

SEQ ID NO: 30964 - DNA, 1716 bp, Arabidopsis thaliana (mouse-ear cress); identical to SEQ ID NO: 10340
  CDS (1)..(1716)

SEQ ID NO: 30965 - protein, 571 aa, Arabidopsis thaliana (mouse-ear cress); identical to SEQ ID NO: 10341

SEQ ID NO: 30966 - DNA, 1326 bp, Erwinia carotovora; identical to SEQ ID NO: 10342
  CDS (1)..(1326)

SEQ ID NO: 30967 - protein, 441 aa, Erwinia carotovora; identical to SEQ ID NO: 10343

SEQ ID NO: 30968 - DNA, 1356 bp, Acinetobacter sp; identical to SEQ ID NO: 10344
  CDS (1)..(1356)

SEQ ID NO: 30969 - protein, 451 aa, Acinetobacter sp; identical to SEQ ID NO: 10345

SEQ ID NO: 30970 - DNA, 1326 bp, Photobacterium profundum; identical to SEQ ID NO: 10346
  CDS (1)..(1326)

SEQ ID NO: 30971 - protein, 441 aa, Photobacterium profundum; identical to SEQ ID NO: 10347

SEQ ID NO: 30972 - DNA, 1872 bp, Oryza sativa; identical to SEQ ID NO: 10348
  CDS (1)..(1731)

SEQ ID NO: 30973 - protein, 576 aa, Oryza sativa; identical to SEQ ID NO: 10349

SEQ ID NO: 30974 - DNA, 1308 bp, Chromobacterium violaceum; identical to SEQ ID NO: 10350
  CDS (1)..(1308)

SEQ ID NO: 30975 - protein, 435 aa, Chromobacterium violaceum; identical to SEQ ID NO: 10351

SEQ ID NO: 30976 - DNA, 1404 bp, Bordetella parapertussis; identical to SEQ ID NO: 10352
  CDS (1)..(1404)

SEQ ID NO: 30977 - protein, 467 aa, Bordetella parapertussis; identical to SEQ ID NO: 10353

SEQ ID NO: 30978 - DNA, 1335 bp, Nitrosomonas europaea; identical to SEQ ID NO: 10354
  CDS (1)..(1335)

SEQ ID NO: 30979 - protein, 444 aa, Nitrosomonas europaea; identical to SEQ ID NO: 10355

SEQ ID NO: 30980 - DNA, 2075 bp, Arabidopsis thaliana; identical to SEQ ID NO: 10356
  CDS (120)..(1949)

SEQ ID NO: 30981 - protein, 609 aa, Arabidopsis thaliana; identical to SEQ ID NO: 10357

SEQ ID NO: 30982 - DNA, 1728 bp, Oryza sativa; identical to SEQ ID NO: 10358
  CDS (1)..(1728)

SEQ ID NO: 30983 - protein, 575 aa, Oryza sativa; identical to SEQ ID NO: 10359

SEQ ID NO: 30984 - DNA, 1329 bp, Buchnera aphidicola; identical to SEQ ID NO: 10360
  CDS (1)..(1329)

SEQ ID NO: 30985 - protein, 442 aa, Buchnera aphidicola; identical to SEQ ID NO: 10361

SEQ ID NO: 30986 - DNA, 1314 bp, Haemophilus ducreyi; identical to SEQ ID NO: 10362
  CDS (1)..(1314)

SEQ ID NO: 30987 - protein, 437 aa, Haemophilus ducreyi; identical to SEQ ID NO: 10363

SEQ ID NO: 30988 - DNA, 1323 bp, Pasteurella multocida; identical to SEQ ID NO: 10364
  CDS (1)..(1323)

SEQ ID NO: 30989 - protein, 440 aa, Pasteurella multocida; identical to SEQ ID NO: 10365

SEQ ID NO: 30990 - DNA, 1347 bp, Photorhabdus luminescens; identical to SEQ ID NO: 10366
  CDS (1)..(1347)

SEQ ID NO: 30991 - protein, 448 aa, Photorhabdus luminescens; identical to SEQ ID NO: 10367

SEQ ID NO: 30992 - DNA, 1299 bp, Pseudomonas putida; identical to SEQ ID NO: 10368
  CDS (1)..(1299)

SEQ ID NO: 30993 - protein, 432 aa, Pseudomonas putida; identical to SEQ ID NO: 10369

SEQ ID NO: 30994 - DNA, 1299 bp, Pseudomonas syringae; identical to SEQ ID NO: 10370
  CDS (1)..(1299)

SEQ ID NO: 30995 - protein, 432 aa, Pseudomonas syringae; identical to SEQ ID NO: 10371

SEQ ID NO: 30996 - DNA, 1356 bp, Ralstonia solanacearum; identical to SEQ ID NO: 10372
  CDS (1)..(1356)

SEQ ID NO: 30997 - protein, 451 aa, Ralstonia solanacearum; identical to SEQ ID NO: 10373

SEQ ID NO: 30998 - DNA, 1338 bp, Shewanella oneidensis; identical to SEQ ID NO: 10374
  CDS (1)..(1338)

SEQ ID NO: 30999 - protein, 445 aa, Shewanella oneidensis; identical to SEQ ID NO: 10375

SEQ ID NO: 31000 - DNA, 1338 bp, Vibrio parahaemolyticus; identical to SEQ ID NO: 10376
  CDS (1)..(1338)

SEQ ID NO: 31001 - protein, 445 aa, Vibrio parahaemolyticus; identical to SEQ ID NO: 10377

SEQ ID NO: 31002 - DNA, 25 bp, Artificial sequence
  Primer sequence
atggtaaaggaacgtaaaaccgagt

SEQ ID NO: 31003 - DNA, 24 bp, Artificial sequence
  Primer sequence
ttaccctaaatccgccatcaacac

SEQ ID NO: 31004 - protein, 528 aa, Artificial sequence; identical to SEQ ID NO: 13504
  Consensus
  Variant (2)..(3): Xaa in position 2 to 3 is any amino acid
  Variant (6)..(8): Xaa in position 6 to 8 is any amino acid
  Variant (11)..(13): Xaa in position 11 to 13 is any amino acid
  Variant (16)..(17): Xaa in position 16 to 17 is any amino acid
  Variant (21)..(24): Xaa in position 21 to 24 is any amino acid
  Variant (26)..(42): Xaa in position 26 to 42 is any amino acid
  Variant (44)..(45): Xaa in position 44 to 45 is any amino acid
  Variant (49)..(49): Xaa in position 49 is any amino acid
  Variant (52)..(54): Xaa in position 52 to 54 is any amino acid
  Variant (56)..(56): Xaa in position 56 is any amino acid
  Variant (58)..(58): Xaa in position 58 is any amino acid
  Variant (60)..(60): Xaa in position 60 is any amino acid
  Variant (62)..(62): Xaa in position 62 is any amino acid
  Variant (65)..(67): Xaa in position 65 to 67 is any amino acid
  Variant (69)..(76): Xaa in position 69 to 76 is any amino acid
  Variant (78)..(81): Xaa in position 78 to 81 is any amino acid
  Variant (83)..(83): Xaa in position 83 is any amino acid
  Variant (86)..(88): Xaa in position 86 to 88 is any amino acid
  Variant (90)..(94): Xaa in position 90 to 94 is any amino acid
  Variant (96)..(96): Xaa in position 96 is any amino acid
  Variant (98)..(102): Xaa in position 98 to 102 is any amino acid
  Variant (104)..(104): Xaa in position 104 is any amino acid
  Variant (106)..(106): Xaa in position 106 is any amino acid
  Variant (109)..(114): Xaa in position 109 to 114 is any amino acid
  Variant (115)..(123): Xaa in position 115 to 123 is any or no amino acid
  Variant (125)..(131): Xaa in position 125 to 131 is any amino acid
  Variant (133)..(133): Xaa in position 133 is any amino acid
  Variant (138)..(139): Xaa in position 138 to 139 is any amino acid
  Variant (141)..(141): Xaa in position 141 is any amino acid
  Variant (143)..(143): Xaa in position 143 is any amino acid
  Variant (146)..(147): Xaa in position 146 to 147 is any amino acid
  Variant (149)..(149): Xaa in position 149 is any amino acid
  Variant (151)..(154): Xaa in position 151 to 154 is any amino acid
  Variant (156)..(157): Xaa in position 156 to 157 is any amino acid
  Variant (159)..(159): Xaa in position 159 is any amino acid
  Variant (162)..(164): Xaa in position 162 to 164 is any amino acid
  Variant (166)..(168): Xaa in position 166 to 168 is any amino acid
  Variant (170)..(173): Xaa in position 170 to 173 is any amino acid
  Variant (177)..(178): Xaa in position 177 to 178 is any amino acid
  Variant (180)..(182): Xaa in position 180 to 182 is any amino acid
  Variant (184)..(184): Xaa in position 184 is any amino acid
  Variant (188)..(188): Xaa in position 188 is any amino acid
  Variant (192)..(193): Xaa in position 192 to 193 is any amino acid
  Variant (195)..(196): Xaa in position 195 to 196 is any amino acid
  Variant (199)..(200): Xaa in position 199 to 200 is any amino acid
  Variant (202)..(203): Xaa in position 202 to 203 is any amino acid
  Variant (205)..(205): Xaa in position 205 is any amino acid
  Variant (207)..(207): Xaa in position 207 is any amino acid
  Variant (209)..(209): Xaa in position 209 is any amino acid
  Variant (211)..(216): Xaa in position 211 to 216 is any amino acid
  Variant (218)..(222): Xaa in position 218 to 222 is any amino acid
  Variant (224)..(228): Xaa in position 224 to 228 is any amino acid
  Variant (230)..(248): Xaa in position 230 to 248 is any amino acid
  Variant (249)..(330): Xaa in position 249 to 330 is any or no amino acid
  Variant (332)..(333): Xaa in position 332 to 333 is any amino acid
  Variant (335)..(336): Xaa in position 335 to 336 is any amino acid
  Variant (339)..(340): Xaa in position 339 to 340 is any amino acid
  Variant (343)..(343): Xaa in position 343 is any amino acid
  Variant (345)..(345): Xaa in position 345 is any amino acid
  Variant (347)..(352): Xaa in position 347 to 352 is any amino acid
  Variant (355)..(355): Xaa in position 355 is any amino acid
  Variant (358)..(358): Xaa in position 358 is any amino acid
  Variant (362)..(364): Xaa in position 362 to 364 is any amino acid
  Variant (366)..(366): Xaa in position 366 is any amino acid
  Variant (369)..(376): Xaa in position 369 to 376 is any amino acid
  Variant (378)..(379): Xaa in position 378 to 379 is any amino acid
  Variant (381)..(381): Xaa in position 381 is any amino acid
  Variant (383)..(385): Xaa in position 383 to 385 is any amino acid
  Variant (387)..(388): Xaa in position 387 to 388 is any amino acid
  Variant (390)..(392): Xaa in position 390 to 392 is any amino acid
  Variant (395)..(395): Xaa in position 395 is any amino acid
  Variant (399)..(400): Xaa in position 399 to 400 is any amino acid
  Variant (402)..(402): Xaa in position 402 is any amino acid
  Variant (405)..(405): Xaa in position 405 is any amino acid
  Variant (407)..(407): Xaa in position 407 is any amino acid
  Variant (410)..(410): Xaa in position 410 is any amino acid
  Variant (413)..(417): Xaa in position 413 to 417 is any amino acid
  Variant (419)..(421): Xaa in position 419 to 421 is any amino acid
  Variant (423)..(423): Xaa in position 423 is any amino acid
  Variant (425)..(427): Xaa in position 425 to 427 is any amino acid
  Variant (429)..(429): Xaa in position 429 is any amino acid
  Variant (434)..(434): Xaa in position 434 is any amino acid
  Variant (436)..(442): Xaa in position 436 to 442 is any amino acid
  Variant (443)..(446): Xaa in position 443 to 446 is any or no amino acid
  Variant (448)..(448): Xaa in position 448 is any amino acid
  Variant (451)..(451): Xaa in position 451 is any amino acid
  Variant (454)..(454): Xaa in position 454 is any amino acid
  Variant (456)..(457): Xaa in position 456 to 457 is any amino acid
  Variant (459)..(462): Xaa in position 459 to 462 is any amino acid
  Variant (464)..(465): Xaa in position 464 to 465 is any amino acid
  Variant (468)..(473): Xaa in position 468 to 473 is any amino acid
  Variant (475)..(477): Xaa in position 475 to 477 is any amino acid
  Variant (479)..(481): Xaa in position 479 to 481 is any amino acid
  Variant (484)..(484): Xaa in position 484 is any amino acid
  Variant (488)..(491): Xaa in position 488 to 491 is any amino acid
  Variant (494)..(496): Xaa in position 494 to 496 is any amino acid
  Variant (499)..(505): Xaa in position 499 to 505 is any amino acid
  Variant (508)..(513): Xaa in position 508 to 513 is any amino acid
  Variant (516)..(518): Xaa in position 516 to 518 is any amino acid
  Variant (520)..(520): Xaa in position 520 is any amino acid
  Variant (522)..(527): Xaa in position 522 to 527 is any amino acid

SEQ ID NO: 31005 - protein, 108 aa, Artificial sequence; identical to SEQ ID NO: 13500
  Consensus
  Variant (1)..(1): Xaa in position 1 is Val or Ile
  Variant (2)..(3): Xaa in position 2 to 3 is any amino acid
  Variant (4)..(4): Xaa in position 4 is Phe or Leu
  Variant (6)..(6): Xaa in position 6 is any amino acid
  Variant (7)..(7): Xaa in position 7 is Ser, Ala or Val
  Variant (8)..(8): Xaa in position 8 is any amino acid
  Variant (10)..(10): Xaa in position 10 is Tyr or His
  Variant (11)..(11): Xaa in position 11 is Ile, Val or Leu
  Variant (12)..(14): Xaa in position 12 to 14 is any amino acid
  Variant (15)..(15): Xaa in position 15 is Arg, His or Ser
  Variant (16)..(17): Xaa in position 16 to 17 is any amino acid
  Variant (18)..(18): Xaa in position 18 is Thr, Lys or Val
  Variant (19)..(19): Xaa in position 19 is any amino acid
  Variant (21)..(21): Xaa in position 21 is Ile, Leu, Val or Ala
  Variant (22)..(24): Xaa in position 22 to 24 is any amino acid
  Variant (25)..(25): Xaa in position 25 is Gly, Ala, Ser or Asp
  Variant (26)..(26): Xaa in position 26 is Glu, Asp, Arg or Asn
  Variant (27)..(27): Xaa in position 27 is any amino acid
  Variant (28)..(28): Xaa in position 28 is Ile, Val or Leu
  Variant (29)..(38): Xaa in position 29 to 38 is any amino acid
  Variant (39)..(42): Xaa in position 39 to 42 is any or no amino acid
  Variant (44)..(44): Xaa in position 44 is Ile, Leu, Val or Phe
  Variant (45)..(45): Xaa in position 45 is any amino acid
  Variant (46)..(46): Xaa in position 46 is Leu or Phe
  Variant (47)..(47): Xaa in position 47 is Leu or Met
  Variant (48)..(49): Xaa in position 48 to 49 is any amino acid
  Variant (50)..(50): Xaa in position 50 is Leu or Met
  Variant (52)..(52): Xaa in position 52 is Ile, Val, Leu, Met or Ala
  Variant (53)..(54): Xaa in position 53 to 54 is any amino acid
  Variant (55)..(55): Xaa in position 55 is Val or Ile
  Variant (56)..(56): Xaa in position 56 is Leu, Val or Ile
  Variant (57)..(57): Xaa in position 57 is Val or Ile
  Variant (58)..(58): Xaa in position 58 is any amino acid
  Variant (60)..(62): Xaa in position 60 to 62 is any amino acid
  Variant (63)..(63): Xaa in position 63 is Gln or Phe
  Variant (64)..(64): Xaa in position 64 is Ile, Val or Leu
  Variant (65)..(67): Xaa in position 65 to 67 is any amino acid
  Variant (68)..(68): Xaa in position 68 is Leu or Ala
  Variant (69)..(75): Xaa in position 69 to 75 is any amino acid
  Variant (76)..(76): Xaa in position 76 is any or no amino acid
  Variant (77)..(77): Xaa in position 77 is Tyr, Phe or Ile
  Variant (78)..(81): Xaa in position 78 to 81 is any amino acid
  Variant (82)..(82): Xaa in position 82 is Arg or Ala
  Variant (83)..(83): Xaa in position 83 is Val, Ile or Pro
  Variant (85)..(85): Xaa in position 85 is Asp or Thr
  Variant (86)..(88): Xaa in position 86 to 88 is any amino acid
  Variant (89)..(89): Xaa in position 89 is Leu or Met
  Variant (90)..(91): Xaa in position 90 to 91 is any amino acid
  Variant (92)..(92): Xaa in position 92 is Val, Ala or Ile
  Variant (93)..(94): Xaa in position 93 to 94 is any amino acid
  Variant (95)..(95): Xaa in position 95 is Ala, Ser, Val or Phe
  Variant (96)..(96): Xaa in position 96 is Ala, Val or Ser
  Variant (98)..(102): Xaa in position 98 to 102 is any amino acid
  Variant (103)..(103): Xaa in position 103 is Ile, Phe or Val
  Variant (104)..(104): Xaa in position 104 is any amino acid
  Variant (105)..(105): Xaa in position 105 is Ala or Ser
  Variant (106)..(106): Xaa in position 106 is any amino acid
  Variant (107)..(107): Xaa in position 107 is Leu or Phe
  Variant (108)..(108): Xaa in position 108 is Ser or Cys

SEQ ID NO: 31006 - protein, 79 aa, Artificial sequence; identical to SEQ ID NO: 13501
  Consensus
  Variant (1)..(1): Xaa in position 1 is Val or Leu
  Variant (2)..(2): Xaa in position 2 is any amino acid
  Variant (3)..(3): Xaa in position 3 is Ser, Thr or Gly
  Variant (4)..(4): Xaa in position 4 is Gly or Ser
  Variant (6)..(8): Xaa in position 6 to 8 is any amino acid
  Variant (9)..(9): Xaa in position 9 is Ala or Ser
  Variant (10)..(10): Xaa in position 10 is Gln, Arg or Lys
  Variant (11)..(11): Xaa in position 11 is Pro or Arg
  Variant (12)..(12): Xaa in position 12 is any amino acid
  Variant (14)..(14): Xaa in position 14 is Val or Ile
  Variant (15)..(16): Xaa in position 15 to 16 is any amino acid
  Variant (18)..(18): Xaa in position 18 is Val, Ile or Thr
  Variant (20)..(22): Xaa in position 20 to 22 is any amino acid
  Variant (23)..(23): Xaa in position 23 is Thr, Ser or Ala
  Variant (25)..(25): Xaa in position 25 is any amino acid
  Variant (26)..(26): Xaa in position 26 is Val or Ile
  Variant (27)..(27): Xaa in position 27 is Arg or Lys
  Variant (28)..(28): Xaa in position 28 is Arg, Lys or Ala
  Variant (29)..(29): Xaa in position 29 is Ile, Val or Thr
  Variant (30)..(30): Xaa in position 30 is Asp or Asn
  Variant (31)..(33): Xaa in position 31 to 33 is any amino acid
  Variant (34)..(34): Xaa in position 34 is Ile, Leu or Val
  Variant (35)..(37): Xaa in position 35 to 37 is any amino acid
  Variant (38)..(38): Xaa in position 38 is Leu or Ile
  Variant (39)..(42): Xaa in position 39 to 42 is any amino acid
  Variant (43)..(43): Xaa in position 43 is Ile, Val or Leu
  Variant (45)..(45): Xaa in position 45 is Leu, Val or Trp
  Variant (46)..(46): Xaa in position 46 is Leu, Ile, Val or Met
  Variant (47)..(47): Xaa in position 47 is any amino acid
  Variant (48)..(48): Xaa in position 48 is Pro or Asn
  Variant (49)..(49): Xaa in position 49 is any amino acid
  Variant (50)..(50): Xaa in position 50 is Gly or Ala
  Variant (51)..(51): Xaa in position 51 is any amino acid
  Variant (53)..(53): Xaa in position 53 is any amino acid
  Variant (54)..(54): Xaa in position 54 is Thr or Ser
  Variant (56)..(57): Xaa in position 56 to 57 is any amino acid
  Variant (58)..(58): Xaa in position 58 is Phe or Leu
  Variant (59)..(59): Xaa in position 59 is Asn or Tyr
  Variant (60)..(60): Xaa in position 60 is Leu or Cys
  Variant (61)..(61): Xaa in position 61 is any amino acid
  Variant (62)..(62): Xaa in position 62 is any or no amino acid
  Variant (63)..(63): Xaa in position 63 is Glu, Tyr or Leu
  Variant (64)..(64): Xaa in position 64 is Glu, Asp, Asn or Gln
  Variant (65)..(65): Xaa in position 65 is any amino acid
  Variant (67)..(69): Xaa in position 67 to 69 is any amino acid
  Variant (70)..(70): Xaa in position 70 is Ala or Ser
  Variant (71)..(72): Xaa in position 71 to 72 is any amino acid
  Variant (73)..(73): Xaa in position 73 is Leu or Ile
  Variant (74)..(74): Xaa in position 74 is any amino acid
  Variant (75)..(75): Xaa in position 75 is Ala or Val
  Variant (76)..(76): Xaa in position 76 is Asp or Glu
  Variant (78)..(78): Xaa in position 78 is Leu or Met
  Variant (79)..(79): Xaa in position 79 is Ile, Leu or Val

SEQ ID NO: 31007 - protein, 103 aa, Artificial sequence; identical to SEQ ID NO: 13502
  Consensus
  Variant (1)..(1): Xaa in position 1 is Leu or Ile
  Variant (2)..(6): Xaa in position 2 to 6 is any amino acid
  Variant (7)..(7): Xaa in position 7 is Ala or Val
  Variant (8)..(10): Xaa in position 8 to 10 is any amino acid
  Variant (12)..(12): Xaa in position 12 is Val or Ile
  Variant (13)..(13): Xaa in position 13 is any amino acid
  Variant (15)..(15): Xaa in position 15 is any amino acid
  Variant (16)..(16): Xaa in position 16 is His or Gln
  Variant (17)..(17): Xaa in position 17 is Leu or Ile
  Variant (18)..(18): Xaa in position 18 is Ile, Val or Leu
  Variant (19)..(23): Xaa in position 19 to 23 is any amino acid
  Variant (25)..(25): Xaa in position 25 is Ala, Ser or Val
  Variant (26)..(26): Xaa in position 26 is Leu, Ile or Val
  Variant (27)..(27): Xaa in position 27 is Leu or Ile
  Variant (28)..(28): Xaa in position 28 is any amino acid
  Variant (30)..(30): Xaa in position 30 is Leu, His or Ile
  Variant (32)..(34): Xaa in position 32 to 34 is any amino acid
  Variant (36)..(36): Xaa in position 36 is any amino acid
  Variant (38)..(38): Xaa in position 38 is Thr or Ser
  Variant (39)..(39): Xaa in position 39 is any amino acid
  Variant (40)..(40): Xaa in position 40 is Ile, Val, Leu or Met
  Variant (41)..(47): Xaa in position 41 to 47 is any amino acid
  Variant (48)..(49): Xaa in position 48 to 49 is any or no amino acid
  Variant (51)..(51): Xaa in position 51 is any amino acid
  Variant (53)..(55): Xaa in position 53 to 55 is any amino acid
  Variant (57)..(57): Xaa in position 57 is Ile, Val or Leu
  Variant (58)..(59): Xaa in position 58 to 59 is any amino acid
  Variant (60)..(60): Xaa in position 60 is Ile or Leu
  Variant (61)..(62): Xaa in position 61 to 62 is any amino acid
  Variant (63)..(63): Xaa in position 63 is Leu or Ile
  Variant (64)..(64): Xaa in position 64 is Ile or Leu
  Variant (65)..(65): Xaa in position 65 is any amino acid
  Variant (69)..(70): Xaa in position 69 to 70 is any amino acid
  Variant (72)..(72): Xaa in position 72 is any amino acid
  Variant (74)..(74): Xaa in position 74 is Val or Leu
  Variant (75)..(75): Xaa in position 75 is any amino acid
  Variant (77)..(77): Xaa in position 77 is any amino acid
  Variant (78)..(78): Xaa in position 78 is Arg or Asp
  Variant (79)..(80): Xaa in position 79 to 80 is any amino acid
  Variant (81)..(81): Xaa in position 81 is Leu or Ile
  Variant (82)..(82): Xaa in position 82 is Glu or Leu
  Variant (83)..(84): Xaa in position 83 to 84 is any amino acid
  Variant (85)..(85): Xaa in position 85 is Ile, Leu or Val
  Variant (86)..(87): Xaa in position 86 to 87 is any amino acid
  Variant (88)..(88): Xaa in position 88 is Phe or Tyr
  Variant (89)..(89): Xaa in position 89 is any amino acid
  Variant (90)..(91): Xaa in position 90 to 91 is Ile, Val or Leu
  Variant (92)..(92): Xaa in position 92 is any amino acid
  Variant (93)..(93): Xaa in position 93 is Arg, His or Lys
  Variant (94)..(94): Xaa in position 94 is Asp or Glu
  Variant (95)..(95): Xaa in position 95 is Gly or Asn
  Variant (96)..(98): Xaa in position 96 to 98 is any amino acid
  Variant (99)..(99): Xaa in position 99 is Ala or Gly
  Variant (101)..(101): Xaa in position 101 is Ala, Ser or Val
  Variant (103)..(103): Xaa in position 103 is Leu or Met

SEQ ID NO: 31008 - protein, 76 aa, Artificial sequence; identical to SEQ ID NO: 13503
  Consensus
  Variant (1)..(1): Xaa in position 1 is Gly, Ala or Cys
  Variant (3)..(3): Xaa in position 3 is Met, Leu, Val, Ile or Phe
  Variant (5)..(5): Xaa in position 5 is Cys or Ala
  Variant (6)..(6): Xaa in position 6 is Val, Leu or Ile
  Variant (7)..(7): Xaa in position 7 is any amino acid
  Variant (8)..(8): Xaa in position 8 is Val or Ile
  Variant (9)..(12): Xaa in position 9 to 12 is any amino acid
  Variant (13)..(13): Xaa in position 13 is Arg or Gln
  Variant (14)..(17): Xaa in position 14 to 17 is any amino acid
  Variant (19)..(20): Xaa in position 19 to 20 is any amino acid
  Variant (21)..(22): Xaa in position 21 to 22 is Leu or Ile
  Variant (23)..(28): Xaa in position 23 to 28 is any amino acid
  Variant (29)..(29): Xaa in position 29 is Ala or Ser
  Variant (30)..(32): Xaa in position 30 to 32 is any amino acid
  Variant (33)..(33): Xaa in position 33 is Gly, Asn or Arg
  Variant (34)..(36): Xaa in position 34 to 36 is any amino acid
  Variant (37)..(37): Xaa in position 37 is Leu, Ile or Val
  Variant (39)..(39): Xaa in position 39 is Val, Ala or Leu
  Variant (41)..(41): Xaa in position 41 is Thr or Ser
  Variant (43)..(43): Xaa in position 43 is any amino acid
  Variant (44)..(44): Xaa in position 44 is Thr or Ser
  Variant (45)..(46): Xaa in position 45 to 46 is any amino acid
  Variant (49)..(49): Xaa in position 49 is any amino acid
  Variant (50)..(50): Xaa in position 50 is any or no amino acid
  Variant (51)..(51): Xaa in position 51 is Arg, Gln or His
  Variant (54)..(60): Xaa in position 54 to 60 is any amino acid
  Variant (61)..(61): Xaa in position 61 is Leu or Ile
  Variant (63)..(64): Xaa in position 63 to 64 is any amino acid
  Variant (65)..(65): Xaa in position 65 is Lys or Arg
  Variant (66)..(68): Xaa in position 66 to 68 is any amino acid
  Variant (69)..(69): Xaa in position 69 is Tyr or Ile
  Variant (70)..(72): Xaa in position 70 to 72 is any amino acid
  Variant (73)..(73): Xaa in position 73 is any or no amino acid
  Variant (75)..(75): Xaa in position 75 is any amino acid
  Variant (76)..(76): Xaa in position 76 is Ser or Ala

SEQ ID NO: 31009 - DNA, 2374 bp, Escherichia coli K12; identical to SEQ ID NO: 1805
  CDS (86)..(2281)

SEQ ID NO: 31010 - protein, 731 aa, Escherichia coli K12; identical to SEQ ID NO: 1806

SEQ ID NO: 31011 - DNA, 2961 bp, Hafnia alvei; identical to SEQ ID NO: 1807
  CDS (185)..(2404)

SEQ ID NO: 31012 - protein, 739 aa, Hafnia alvei; identical to SEQ ID NO: 1808

SEQ ID NO: 31013 - DNA, 4341 bp, Escherichia coli; identical to SEQ ID NO: 1809
  CDS (660)..(2858)

SEQ ID NO: 31014 - protein, 732 aa, Escherichia coli; identical to SEQ ID NO: 1810

SEQ ID NO: 31015 - DNA, 1850 bp, Bacillus subtilis; identical to SEQ ID NO: 1811
  CDS (312)..(1784)

SEQ ID NO: 31016 - protein, 490 aa, Bacillus subtilis; identical to SEQ ID NO: 1812

SEQ ID NO: 31017 - DNA, 3091 bp, Lactobacillus sp; identical to SEQ ID NO: 1813
  CDS (572)..(2767)

SEQ ID NO: 31018 - protein, 731 aa, Lactobacillus sp; identical to SEQ ID NO: 1814

SEQ ID NO: 31019 - DNA, 1449 bp, Bacillus halodurans; identical to SEQ ID NO: 1815
  CDS (1)..(1449)

SEQ ID NO: 31020 - protein, 482 aa, Bacillus halodurans; identical to SEQ ID NO: 1816

SEQ ID NO: 31021 - DNA, 2196 bp, Sinorhizobium meliloti; identical to SEQ ID NO: 1817
  CDS (1)..(2196)

SEQ ID NO: 31022 - protein, 731 aa, Sinorhizobium meliloti; identical to SEQ ID NO: 1818

SEQ ID NO: 31023 - DNA, 1380 bp, Listeria innocua; identical to SEQ ID NO: 1819
  CDS (1)..(1380)

SEQ ID NO: 31024 - protein, 459 aa, Listeria innocua; identical to SEQ ID NO: 1820

SEQ ID NO: 31025 - DNA, 2307 bp, Yersinia pestis; identical to SEQ ID NO: 1821
  CDS (1)..(2307)

SEQ ID NO: 31026 - protein, 768 aa, Yersinia pestis; identical to SEQ ID NO: 1822

SEQ ID NO: 31027 - DNA, 2145 bp, Salmonella enterica subsp. enterica serovar Typhi; identical to SEQ ID NO: 1823
  CDS (1)..(2145)

SEQ ID NO: 31028 - protein, 714 aa, Salmonella enterica subsp. enterica serovar Typhi; identical to SEQ ID NO: 1824

SEQ ID NO: 31029 - DNA, 1467 bp, Nostoc sp. PCC 7120; identical to SEQ ID NO: 1825
  CDS (1)..(1467)

SEQ ID NO: 31030 - protein, 488 aa, Nostoc sp. PCC 7120; identical to SEQ ID NO: 1826

SEQ ID NO: 31031 - DNA, 2163 bp, Yersinia pestis; identical to SEQ ID NO: 1827
  CDS (1)..(2163)

SEQ ID NO: 31032 - protein, 720 aa, Yersinia pestis; identical to SEQ ID NO: 1828

SEQ ID NO: 31033 - DNA, 2271 bp, Salmonella enterica subsp. enterica serovar Typhi; identical to SEQ ID NO: 1829
  CDS (1)..(2271)

SEQ ID NO: 31034 - protein, 756 aa, Salmonella enterica subsp. enterica serovar Typhi; identical to SEQ ID NO: 1830

SEQ ID NO: 31035 - DNA, 2148 bp, Escherichia coli; identical to SEQ ID NO: 1831
  CDS (1)..(2148)

SEQ ID NO: 31036 - protein, 715 aa, Escherichia coli; identical to SEQ ID NO: 1832

SEQ ID NO: 31037 - DNA, 2835 bp, Escherichia coli; identical to SEQ ID NO: 1833
  CDS (571)..(2712)

SEQ ID NO: 31038 - protein, 713 aa, Escherichia coli; identical to SEQ ID NO: 1834

SEQ ID NO: 31039 - DNA, 1446 bp, Clostridium acetobutylicum; identical to SEQ ID NO: 1835
  CDS (1)..(1446)

SEQ ID NO: 31040 - protein, 481 aa, Clostridium acetobutylicum; identical to SEQ ID NO: 1836

SEQ ID NO: 31041 - DNA, 1464 bp, Clostridium acetobutylicum; identical to SEQ ID NO: 1837
  CDS (1)..(1464)

SEQ ID NO: 31042 - protein, 487 aa, Clostridium acetobutylicum; identical to SEQ ID NO: 1838

SEQ ID NO: 31043 - DNA, 2256 bp, Pseudomonas aeruginosa; identical to SEQ ID NO: 1839
  CDS (1)..(2256)

SEQ ID NO: 31044 - protein, 751 aa, Pseudomonas aeruginosa; identical to SEQ ID NO: 1840

SEQ ID NO: 31045 - DNA, 2853 bp, Mycobacterium leprae; identical to SEQ ID NO: 1841
  CDS (1)..(2853)

SEQ ID NO: 31046 - protein, 950 aa, Mycobacterium leprae; identical to SEQ ID NO: 1842

SEQ ID NO: 31047 - DNA, 2202 bp, Vibrio cholerae; identical to SEQ ID NO: 1843
  CDS (1)..(2202)

SEQ ID NO: 31048 - protein, 733 aa, Vibrio cholerae; identical to SEQ ID NO: 1844

SEQ ID NO: 31049 - DNA, 2163 bp, Vibrio cholerae; identical to SEQ ID NO: 1845
  CDS (1)..(2163)

SEQ ID NO: 31050 - protein, 720 aa, Vibrio cholerae; identical to SEQ ID NO: 1846

SEQ ID NO: 31051 - DNA, 2163 bp, Haemophilus influenzae; identical to SEQ ID NO: 1847
  CDS (1)..(2163)

SEQ ID NO: 31052 - protein, 720 aa, Haemophilus influenzae; identical to SEQ ID NO: 1848

SEQ ID NO: 31053 - DNA, 2844 bp, Mycobacterium tuberculosis; identical to SEQ ID NO: 1849
  CDS (1)..(2844)

SEQ ID NO: 31054 - protein, 947 aa, Mycobacterium tuberculosis; identical to SEQ ID NO: 1850

SEQ ID NO: 31055 - DNA, 1476 bp, Streptococcus pneumoniae; identical to SEQ ID NO: 1851
  CDS (1)..(1476)

SEQ ID NO: 31056 - protein, 491 aa, Streptococcus pneumoniae; identical to SEQ ID NO: 1852

SEQ ID NO: 31057 - DNA, 1476 bp, Bacillus halodurans; identical to SEQ ID NO: 1853
  CDS (1)..(1476)

SEQ ID NO: 31058 - protein, 491 aa, Bacillus halodurans; identical to SEQ ID NO: 1854

SEQ ID NO: 31059 - DNA, 2349 bp, Sinorhizobium meliloti; identical to SEQ ID NO: 1855
  CDS (1)..(2349)

SEQ ID NO: 31060 - protein, 782 aa, Sinorhizobium meliloti; identical to SEQ ID NO: 1856

SEQ ID NO: 31061 - DNA, 1476 bp, Streptococcus pneumoniae; identical to SEQ ID NO: 1857
  CDS (1)..(1476)

SEQ ID NO: 31062 - protein, 491 aa, Streptococcus pneumoniae; identical to SEQ ID NO: 1858

SEQ ID NO: 31063 - DNA, 2271 bp, Escherichia coli; identical to SEQ ID NO: 1859
  CDS (1)..(2271)

SEQ ID NO: 31064 - protein, 756 aa, Escherichia coli; identical to SEQ ID NO: 1860

SEQ ID NO: 31065 - DNA, 1443 bp, Bacillus subtilis; identical to SEQ ID NO: 1861
  CDS (1)..(1443)

SEQ ID NO: 31066 - protein, 480 aa, Bacillus subtilis; identical to SEQ ID NO: 1862

SEQ ID NO: 31067 - DNA, 1452 bp, Synechocystis sp; identical to SEQ ID NO: 1863
  CDS (1)..(1452)

SEQ ID NO: 31068 - protein, 483 aa, Synechocystis sp; identical to SEQ ID NO: 1864

SEQ ID NO: 31069 - DNA, 2307 bp, Yersinia pseudotuberculosis IP 32953; identical to SEQ ID NO: 1865
  CDS (1)..(2307)

SEQ ID NO: 31070 - protein, 768 aa, Yersinia pseudotuberculosis IP 32953; identical to SEQ ID NO: 1866

SEQ ID NO: 31071 - DNA, 1467 bp, Symbiobacterium thermophilum; identical to SEQ ID NO: 1867
  CDS (1)..(1467)

SEQ ID NO: 31072 - protein, 488 aa, Symbiobacterium thermophilum; identical to SEQ ID NO: 1868

SEQ ID NO: 31073 - DNA, 1410 bp, Symbiobacterium thermophilum; identical to SEQ ID NO: 1869
  CDS (1)..(1410)

SEQ ID NO: 31074 - protein, 469 aa, Symbiobacterium thermophilum; identical to SEQ ID NO: 1870

SEQ ID NO: 31075 - DNA, 2154 bp, Erwinia carotovora; identical to SEQ ID NO: 1871
  CDS (1)..(2154)

SEQ ID NO: 31076 - protein, 717 aa, Erwinia carotovora; identical to SEQ ID NO: 1872

SEQ ID NO: 31077 - DNA, 2790 bp, Acinetobacter sp; identical to SEQ ID NO: 1873
  CDS (1)..(2790)

SEQ ID NO: 31078 - protein, 929 aa, Acinetobacter sp; identical to SEQ ID NO: 1874

SEQ ID NO: 31079 - DNA, 1482 bp, Bacillus thuringiensis; identical to SEQ ID NO: 1875
  CDS (1)..(1482)

SEQ ID NO: 31080 - protein, 493 aa, Bacillus thuringiensis; identical to SEQ ID NO: 1876

SEQ ID NO: 31081 - DNA, 1422 bp, Bacillus thuringiensis; identical to SEQ ID NO: 1877
  CDS (1)..(1422)

SEQ ID NO: 31082 - protein, 473 aa, Bacillus thuringiensis; identical to SEQ ID NO: 1878

SEQ ID NO: 31083 - DNA, 2358 bp, Rhodopseudomonas palustris; identical to SEQ ID NO: 1879
  CDS (1)..(2358)

SEQ ID NO: 31084 - protein, 785 aa, Rhodopseudomonas palustris; identical to SEQ ID NO: 1880

SEQ ID NO: 31085 - DNA, 2837 bp, Shigella boydii; identical to SEQ ID NO: 1881
  CDS (165)..(2435)

SEQ ID NO: 31086 - protein, 756 aa, Shigella boydii; identical to SEQ ID NO: 1882

SEQ ID NO: 31087 - DNA, 1380 bp, Listeria monocytogenes; identical to SEQ ID NO: 1883
  CDS (1)..(1380)

SEQ ID NO: 31088 - protein, 459 aa, Listeria monocytogenes; identical to SEQ ID NO: 1884

SEQ ID NO: 31089 - DNA, 1482 bp, Bacillus cereus; identical to SEQ ID NO: 1885
  CDS (1)..(1482)

SEQ ID NO: 31090 - protein, 493 aa, Bacillus cereus; identical to SEQ ID NO: 1886

SEQ ID NO: 31091 - DNA, 1422 bp, Bacillus cereus; identical to SEQ ID NO: 1887
  CDS (1)..(1422)

SEQ ID NO: 31092 - protein, 473 aa, Bacillus cereus; identical to SEQ ID NO: 1888

SEQ ID NO: 31093 - DNA, 1458 bp, Mycobacterium paratuberculosis; identical to SEQ ID NO: 1889
  CDS (1)..(1458)

SEQ ID NO: 31094 - protein, 485 aa, Mycobacterium paratuberculosis; identical to SEQ ID NO: 1890

SEQ ID NO: 31095 - DNA, 2853 bp, Mycobacterium paratuberculosis; identical to SEQ ID NO: 1891
  CDS (1)..(2853)

SEQ ID NO: 31096 - protein, 950 aa, Mycobacterium paratuberculosis; identical to SEQ ID NO: 1892

SEQ ID NO: 31097 - DNA, 2100 bp, Lactobacillus johnsonii; identical to SEQ ID NO: 1893
  CDS (1)..(2100)

SEQ ID NO: 31098 - protein, 699 aa, Lactobacillus johnsonii; identical to SEQ ID NO: 1894

SEQ ID NO: 31099 - DNA, 3625 bp, Vibrio parahaemolyticus; identical to SEQ ID NO: 1895
  CDS (1451)..(3625)

SEQ ID NO: 31100 - protein, 724 aa, Vibrio parahaemolyticus; identical to SEQ ID NO: 1896

SEQ ID NO: 31101 - DNA, 2142 bp, Shigella flexneri; identical to SEQ ID NO: 1897
  CDS (1)..(2142)

SEQ ID NO: 31102 - protein, 713 aa, Shigella flexneri; identical to SEQ ID NO: 1898

SEQ ID NO: 31103 - DNA, 2181 bp, Vibrio vulnificus; identical to SEQ ID NO: 1899
  CDS (1)..(2181)

SEQ ID NO: 31104 - protein, 726 aa, Vibrio vulnificus; identical to SEQ ID NO: 1900

SEQ ID NO: 31105 - DNA, 2307 bp, Photorhabdus luminescens; identical to SEQ ID NO: 1901
  CDS (1)..(2307)

SEQ ID NO: 31106 - protein, 768 aa, Photorhabdus luminescens; identical to SEQ ID NO: 1902

SEQ ID NO: 31107 - DNA, 1404 bp, Gloeobacter violaceus; identical to SEQ ID NO: 1903
  CDS (1)..(1404)

SEQ ID NO: 31108 - protein, 467 aa, Gloeobacter violaceus; identical to SEQ ID NO: 1904

SEQ ID NO: 31109 - DNA, 2259 bp, Chromobacterium violaceum; identical to SEQ ID NO: 1905
  CDS (1)..(2259)

SEQ ID NO: 31110 - protein, 752 aa, Chromobacterium violaceum; identical to SEQ ID NO: 1906

SEQ ID NO: 31111 - DNA, 1251 bp, Chromobacterium violaceum; identical to SEQ ID NO: 1907
  CDS (1)..(1251)

SEQ ID NO: 31112 - protein, 416 aa, Chromobacterium violaceum; identical to SEQ ID NO: 1908

SEQ ID NO: 31113 - DNA, 2352 bp, Fusobacterium nucleatum subsp; identical to SEQ ID NO: 1909
  CDS (1)..(2352)

SEQ ID NO: 31114 - protein, 783 aa, Fusobacterium nucleatum subsp; identical to SEQ ID NO: 1910

SEQ ID NO: 31115 - DNA, 2196 bp, Shigella flexneri; identical to SEQ ID NO: 1911
  CDS (1)..(2196)

SEQ ID NO: 31116 - protein, 731 aa, Shigella flexneri; identical to SEQ ID NO: 1912

SEQ ID NO: 31117 - DNA, 2271 bp, Bordetella pertussis; identical to SEQ ID NO: 1913
  CDS (1)..(2271)

SEQ ID NO: 31118 - protein, 756 aa, Bordetella pertussis; identical to SEQ ID NO: 1914

SEQ ID NO: 31119 - DNA, 2271 bp, Bordetella parapertussis; identical to SEQ ID NO: 1915
  CDS (1)..(2271)

SEQ ID NO: 31120 - protein, 756 aa, Bordetella parapertussis; identical to SEQ ID NO: 1916

SEQ ID NO: 31121 - DNA, 1422 bp, Bacillus cereus; identical to SEQ ID NO: 1917
  CDS (1)..(1422)

SEQ ID NO: 31122 - protein, 473 aa, Bacillus cereus; identical to SEQ ID NO: 1918

SEQ ID NO: 31123 - DNA, 1422 bp, Bacillus anthracis; identical to SEQ ID NO: 1919
  CDS (1)..(1422)

SEQ ID NO: 31124 - protein, 473 aa, Bacillus anthracis; identical to SEQ ID NO: 1920

SEQ ID NO: 31125 - DNA, 2271 bp, Shigella flexneri; identical to SEQ ID NO: 1921
  CDS (1)..(2271)

SEQ ID NO: 31126 - protein, 756 aa, Shigella flexneri; identical to SEQ ID NO: 1922

SEQ ID NO: 31127 - DNA, 2136 bp, Shigella flexneri; identical to SEQ ID NO: 1923
  CDS (1)..(2136)

SEQ ID NO: 31128 - protein, 711 aa, Shigella flexneri; identical to SEQ ID NO: 1924

SEQ ID NO: 31129 - DNA, 2127 bp, Escherichia coli; identical to SEQ ID NO: 1925
  CDS (1)..(2127)

SEQ ID NO: 31130 - protein, 708 aa, Escherichia coli; identical to SEQ ID NO: 1926

SEQ ID NO: 31131 - DNA, 1563 bp, Oryza sativa; identical to SEQ ID NO: 1927
  CDS (1)..(1563)

SEQ ID NO: 31132 - protein, 520 aa, Oryza sativa; identical to SEQ ID NO: 1928

SEQ ID NO: 31133 - DNA, 2181 bp, Vibrio parahaemolyticus; identical to SEQ ID NO: 1929
  CDS (1)..(2181)

SEQ ID NO: 31134 - protein, 726 aa, Vibrio parahaemolyticus; identical to SEQ ID NO: 1930

SEQ ID NO: 31135 - DNA, 4026 bp, Vibrio parahaemolyticus; identical to SEQ ID NO: 1931
  CDS (1779)..(3914)

SEQ ID NO: 31136 - protein, 711 aa, Vibrio parahaemolyticus; identical to SEQ ID NO: 1932

SEQ ID NO: 31137 - DNA, 1461 bp, Clostridium tetani; identical to SEQ ID NO: 1933
  CDS (1)..(1461)

SEQ ID NO: 31138 - protein, 486 aa, Clostridium tetani; identical to SEQ ID NO: 1934

SEQ ID NO: 31139 - DNA, 1416 bp, Clostridium tetani; identical to SEQ ID NO: 1935
  CDS (1)..(1416)

SEQ ID NO: 31140 - protein, 471 aa, Clostridium tetani; identical to SEQ ID NO: 1936

SEQ ID NO: 31141 - DNA, 2766 bp, Bradyrhizobium japonicum; identical to SEQ ID NO: 1937
  CDS (1)..(2766)

SEQ ID NO: 31142 - protein, 921 aa, Bradyrhizobium japonicum; identical to SEQ ID NO: 1938

SEQ ID NO: 31143 - DNA, 2517 bp, Bradyrhizobium japonicum; identical to SEQ ID NO: 1939
  CDS (1)..(2517)

SEQ ID NO: 31144 - protein, 838 aa, Bradyrhizobium japonicum; identical to SEQ ID NO: 1940

SEQ ID NO: 31145 - DNA, 2181 bp, Vibrio vulnificus; identical to SEQ ID NO: 1941
  CDS (1)..(2181)

SEQ ID NO: 31146 - protein, 726 aa, Vibrio vulnificus; identical to SEQ ID NO: 1942

SEQ ID NO: 31147 - DNA, 2109 bp, Vibrio vulnificus; identical to SEQ ID NO: 1943
  CDS (1)..(2109)

SEQ ID NO: 31148 - protein, 702 aa, Vibrio vulnificus; identical to SEQ ID NO: 1944

SEQ ID NO: 31149 - DNA, 2163 bp, Shewanella oneidensis; identical to SEQ ID NO: 1945
  CDS (1)..(2163)

SEQ ID NO: 31150 - protein, 720 aa, Shewanella oneidensis; identical to SEQ ID NO: 1946

SEQ ID NO: 31151 - DNA, 1419 bp, Oceanobacillus iheyensis; identical to SEQ ID NO: 1947
  CDS (1)..(1419)

SEQ ID NO: 31152 - protein, 472 aa, Oceanobacillus iheyensis; identical to SEQ ID NO: 1948

SEQ ID NO: 31153 - DNA, 2154 bp, Escherichia coli O6; identical to SEQ ID NO: 1949
  CDS (1)..(2154)

SEQ ID NO: 31154 - protein, 717 aa, Escherichia coli O6; identical to SEQ ID NO: 1950

SEQ ID NO: 31155 - DNA, 2271 bp, Escherichia coli O6; identical to SEQ ID NO: 1951
  CDS (1)..(2271)

SEQ ID NO: 31156 - protein, 756 aa, Escherichia coli O6; identical to SEQ ID NO: 1952

SEQ ID NO: 31157 - DNA, 2370 bp, Escherichia coli O6; identical to SEQ ID NO: 1953
  CDS (1)..(2370)

SEQ ID NO: 31158 - protein, 789 aa, Escherichia coli O6; identical to SEQ ID NO: 1954

SEQ ID NO: 31159 - DNA, 2136 bp, Escherichia coli O6; identical to SEQ ID NO: 1955
  CDS (1)..(2136)

SEQ ID NO: 31160 - protein, 711 aa, Escherichia coli O6; identical to SEQ ID NO: 1956

SEQ ID NO: 31161 - DNA, 2208 bp, Escherichia coli O6; identical to SEQ ID NO: 1957
  CDS (1)..(2208)

SEQ ID NO: 31162 - protein, 735 aa, Escherichia coli O6; identical to SEQ ID NO: 1958

SEQ ID NO: 31163 - DNA, 2142 bp, Escherichia coli O6; identical to SEQ ID NO: 1959
  CDS (1)..(2142)

SEQ ID NO: 31164 - protein, 713 aa, Escherichia coli O6; identical to SEQ ID NO: 1960

SEQ ID NO: 31165 - DNA, 1488 bp, Thermoanaerobacter tengcongensis; identical to SEQ ID NO: 1961
  CDS (1)..(1488)

SEQ ID NO: 31166 - protein, 495 aa, Thermoanaerobacter tengcongensis; identical to SEQ ID NO: 1962

SEQ ID NO: 31167 - DNA, 1419 bp, Thermoanaerobacter tengcongensis; identical to SEQ ID NO: 1963
  CDS (1)..(1419)

SEQ ID NO: 31168 - protein, 472 aa, Thermoanaerobacter tengcongensis; identical to SEQ ID NO: 1964

SEQ ID NO: 31169 - DNA, 2352 bp, Fusobacterium nucleatum; identical to SEQ ID NO: 1965
  CDS (1)..(2352)

SEQ ID NO: 31170 - protein, 783 aa, Fusobacterium nucleatum; identical to SEQ ID NO: 1966

SEQ ID NO: 31171 - DNA, 1431 bp, Clostridium perfringens; identical to SEQ ID NO: 1967
  CDS (1)..(1431)

SEQ ID NO: 31172 - protein, 476 aa, Clostridium perfringens; identical to SEQ ID NO: 1968

SEQ ID NO: 31173 - DNA, 1455 bp, Clostridium perfringens; identical to SEQ ID NO: 1969
  CDS (1)..(1455)

SEQ ID NO: 31174 - protein, 484 aa, Clostridium perfringens; identical to SEQ ID NO: 1970

SEQ ID NO: 31175 - DNA, 2280 bp, Ralstonia solanacearum; identical to SEQ ID NO: 1971
  CDS (1)..(2280)

SEQ ID NO: 31176 - protein, 759 aa, Ralstonia solanacearum; identical to SEQ ID NO: 1972

SEQ ID NO: 31177 - DNA, 2271 bp, Salmonella typhimurium; identical to SEQ ID NO: 1973
  CDS (1)..(2271)

SEQ ID NO: 31178 - protein, 756 aa, Salmonella typhimurium; identical to SEQ ID NO: 1974

SEQ ID NO: 31179 - DNA, 2136 bp, Salmonella typhimurium; identical to SEQ ID NO: 1975
  CDS (1)..(2136)

SEQ ID NO: 31180 - protein, 711 aa, Salmonella typhimurium; identical to SEQ ID NO: 1976

SEQ ID NO: 31181 - DNA, 2199 bp, Salmonella typhimurium; identical to SEQ ID NO: 1977
  CDS (1)..(2199)

SEQ ID NO: 31182 - protein, 732 aa, Salmonella typhimurium; identical to SEQ ID NO: 1978

SEQ ID NO: 31183 - DNA, 2142 bp, Salmonella typhimurium; identical to SEQ ID NO: 1979
  CDS (1)..(2142)

SEQ ID NO: 31184 - protein, 713 aa, Salmonella typhimurium; identical to SEQ ID NO: 1980

SEQ ID NO: 31185 - DNA, 2136 bp, Vibrio vulnificus; identical to SEQ ID NO: 1981
  CDS (1)..(2136)

SEQ ID NO: 31186 - protein, 711 aa, Vibrio vulnificus; identical to SEQ ID NO: 1982

SEQ ID NO: 31187 - DNA, 2163 bp, Pasteurella multocida; identical to SEQ ID NO: 1983
  CDS (1)..(2163)

SEQ ID NO: 31188 - protein, 720 aa, Pasteurella multocida; identical to SEQ ID NO: 1984

SEQ ID NO: 31189 - DNA, 2139 bp, Moritella japonica; identical to SEQ ID NO: 1985
  CDS (1)..(2139)

SEQ ID NO: 31190 - protein, 712 aa, Moritella japonica; identical to SEQ ID NO: 1986

SEQ ID NO: 31191 - DNA, 1479 bp, Streptomyces coelicolor; identical to SEQ ID NO: 1987
  CDS (1)..(1479)

SEQ ID NO: 31192 - protein, 492 aa, Streptomyces coelicolor; identical to SEQ ID NO: 1988

SEQ ID NO: 31193 - DNA, 2130 bp, Eikenella corrodens; identical to SEQ ID NO: 1989
  CDS (1)..(2130)

SEQ ID NO: 31194 - protein, 709 aa, Eikenella corrodens; identical to SEQ ID NO: 1990

SEQ ID NO: 31195 - DNA, 2271 bp, Escherichia coli; identical to SEQ ID NO: 1859
  CDS (4)..(2271)

SEQ ID NO: 31196 - protein, 755 aa, Escherichia coli; identical to SEQ ID NO: 1992

SEQ ID NO: 31197 - DNA, 2196 bp, Lactobacillus sp; identical to SEQ ID NO: 1993
  CDS (1)..(2196)

SEQ ID NO: 31198 - protein, 731 aa, Lactobacillus sp; identical to SEQ ID NO: 1814

SEQ ID NO: 31199 - DNA, 1482 bp, Bacillus anthracis; identical to SEQ ID NO: 1995
  CDS (1)..(1482)

SEQ ID NO: 31200 - protein, 493 aa, Bacillus anthracis; identical to SEQ ID NO: 1996

SEQ ID NO: 31201 - DNA, 1383 bp, Bacillus cereus; identical to SEQ ID NO: 1997
  CDS (1)..(1383)

SEQ ID NO: 31202 - protein, 460 aa, Bacillus cereus; identical to SEQ ID NO: 1998

SEQ ID NO: 31203 - DNA, 20 bp, Artificial sequence
  Primer sequence
atggggcagggttttccacc

SEQ ID NO: 31204 - DNA, 25 bp, Artificial sequence
  Primer sequence
ttacttcaacacataaccgtacaac

SEQ ID NO: 31205 - protein, 642 aa, Artificial sequence; identical to SEQ ID NO: 2902
  Consensus
  Variant (2)..(5): Xaa in position 2 to 5 is any amino acid
  Variant (7)..(58): Xaa in position 7 to 58 is any amino acid
  Variant (60)..(61): Xaa in position 60 to 61 is any amino acid
  Variant (63)..(66): Xaa in position 63 to 66 is any amino acid
  Variant (68)..(71): Xaa in position 68 to 71 is any amino acid
  Variant (73)..(76): Xaa in position 73 to 76 is any amino acid
  Variant (78)..(90): Xaa in position 78 to 90 is any amino acid
  Variant (92)..(92): Xaa in position 92 is any amino acid
  Variant (94)..(113): Xaa in position 94 to 113 is any amino acid
  Variant (116)..(116): Xaa in position 116 is any amino acid
  Variant (120)..(131): Xaa in position 120 to 131 is any amino acid
  Variant (133)..(188): Xaa in position 133 to 188 is any amino acid
  Variant (191)..(191): Xaa in position 191 is any amino acid
  Variant (193)..(215): Xaa in position 193 to 215 is any amino acid
  Variant (217)..(217): Xaa in position 217 is any amino acid
  Variant (219)..(224): Xaa in position 219 to 224 is any amino acid
  Variant (226)..(290): Xaa in position 226 to 290 is any amino acid
  Variant (292)..(292): Xaa in position 292 is any amino acid
  Variant (295)..(300): Xaa in position 295 to 300 is any amino acid
  Variant (302)..(302): Xaa in position 302 is any amino acid
  Variant (304)..(305): Xaa in position 304 to 305 is any amino acid
  Variant (307)..(333): Xaa in position 307 to 333 is any amino acid
  Variant (337)..(337): Xaa in position 337 is any amino acid
  Variant (339)..(341): Xaa in position 339 to 341 is any amino acid
  Variant (343)..(355): Xaa in position 343 to 355 is any amino acid
  Variant (357)..(370): Xaa in position 357 to 370 is any amino acid
  Variant (372)..(457): Xaa in position 372 to 457 is any amino acid
  Variant (460)..(460): Xaa in position 460 is any amino acid
  Variant (462)..(494): Xaa in position 462 to 494 is any amino acid
  Variant (496)..(497): Xaa in position 496 to 497 is any amino acid
  Variant (499)..(505): Xaa in position 499 to 505 is any amino acid
  Variant (507)..(520): Xaa in position 507 to 520 is any amino acid
  Variant (522)..(524): Xaa in position 522 to 524 is any amino acid
  Variant (526)..(620): Xaa in position 526 to 620 is any amino acid
  Variant (622)..(624): Xaa in position 622 to 624 is any amino acid
  Variant (626)..(630): Xaa in position 626 to 630 is any amino acid
  Variant (635)..(640): Xaa in position 635 to 640 is any amino acid

SEQ ID NO: 31206 - protein, 101 aa, Artificial sequence; identical to SEQ ID NO: 1322
  Consensus
  Variant (2)..(23): Xaa in position 2 to 23 is any amino acid
  Variant (24)..(30): Xaa in position 24 to 30 is any or no amino acid
  Variant (32)..(32): Xaa in position 32 is any amino acid
  Variant (37)..(39): Xaa in position 37 to 39 is any amino acid
  Variant (41)..(55): Xaa in position 41 to 55 is any amino acid
  Variant (56)..(57): Xaa in position 56 to 57 is any or no amino acid
  Variant (59)..(62): Xaa in position 59 to 62 is any amino acid
  Variant (64)..(64): Xaa in position 64 is any amino acid
  Variant (67)..(70): Xaa in position 67 to 70 is any amino acid
  Variant (72)..(72): Xaa in position 72 is any amino acid
  Variant (75)..(77): Xaa in position 75 to 77 is any amino acid
  Variant (79)..(85): Xaa in position 79 to 85 is any amino acid
  Variant (87)..(90): Xaa in position 87 to 90 is any amino acid
  Variant (92)..(93): Xaa in position 92 to 93 is any amino acid
  Variant (97)..(97): Xaa in position 97 is any amino acid
  Variant (100)..(100): Xaa in position 100 is any amino acid

SEQ ID NO: 31207 - protein, 76 aa, Artificial sequence; identical to SEQ ID NO: 2897
  Consensus
  Variant (1)..(1): Xaa in position 1 is Leu, Met or Val
  Variant (2)..(2): Xaa in position 2 is Gly or Asp
  Variant (3)..(3): Xaa in position 3 is Asp, Ser, Asn, Gln or Gly
  Variant (4)..(4): Xaa in position 4 is Leu or Arg
  Variant (5)..(6): Xaa in position 5 to 6 is any amino acid
  Variant (7)..(7): Xaa in position 7 is His or Pro
  Variant (8)..(8): Xaa in position 8 is any amino acid
  Variant (9)..(9): Xaa in position 9 is Gly, Ser, Glu or Asp
  Variant (10)..(13): Xaa in position 10 to 13 is any amino acid
  Variant (14)..(14): Xaa in position 14 is Ala or Ser
  Variant (15)..(15): Xaa in position 15 is Gln, Glu or Met
  Variant (16)..(18): Xaa in position 16 to 18 is any amino acid
  Variant (19)..(19): Xaa in position 19 is Ala or Ser
  Variant (20)..(21): Xaa in position 20 to 21 is any amino acid
  Variant (22)..(22): Xaa in position 22 is Phe, Tyr, Trp or Val
  Variant (23)..(23): Xaa in position 23 is any amino acid
  Variant (24)..(24): Xaa in position 24 is Ala, Ser or Val
  Variant (25)..(27): Xaa in position 25 to 27 is any amino acid
  Variant (28)..(28): Xaa in position 28 is Tyr, Phe or Trp
  Variant (29)..(30): Xaa in position 29 to 30 is any amino acid
  Variant (31)..(31): Xaa in position 31 is Val, Thr, Leu or Ile
  Variant (32)..(32): Xaa in position 32 is any amino acid
  Variant (34)..(34): Xaa in position 34 is Thr or Ser
  Variant (35)..(35): Xaa in position 35 is Ser or Thr
  Variant (36)..(36): Xaa in position 36 is any amino acid
  Variant (37)..(37): Xaa in position 37 is Ser, Ala or Gly
  Variant (38)..(38): Xaa in position 38 is Asn, Ile, Val or Ser
  Variant (39)..(51): Xaa in position 39 to 51 is any amino acid
  Variant (52)..(52): Xaa in position 52 is Val, Ile, Leu or Ala
  Variant (53)..(53): Xaa in position 53 is Leu, Ile, Val or Met
  Variant (54)..(55): Xaa in position 54 to 55 is any amino acid
  Variant (57)..(57): Xaa in position 57 is Asn or Asp
  Variant (58)..(58): Xaa in position 58 is any amino acid
  Variant (60)..(60): Xaa in position 60 is Lys, Gln or Arg
  Variant (61)..(61): Xaa in position 61 is Ser or Ala
  Variant (62)..(65): Xaa in position 62 to 65 is any amino acid
  Variant (66)..(66): Xaa in position 66 is any or no amino acid
  Variant (67)..(67): Xaa in position 67 is Leu, Ile, Met or Val
  Variant (68)..(73): Xaa in position 68 to 73 is any amino acid
  Variant (74)..(74): Xaa in position 74 is Pro or Ala
  Variant (75)..(75): Xaa in position 75 is any amino acid
  Variant (76)..(76): Xaa in position 76 is Tyr, Phe or Trp

SEQ ID NO: 31208 - protein, 39 aa, Artificial sequence; identical to SEQ ID NO: 2898
  Consensus
  Variant (1)..(1): Xaa in position 1 is Val, Ile, Leu, Phe or Thr
  Variant (2)..(2): Xaa in position 2 is Ile, Val, Leu, Phe or Ala
  Variant (3)..(5): Xaa in position 3 to 5 is any amino acid
  Variant (6)..(6): Xaa in position 6 is Thr, Asn or Ser
  Variant (7)..(7): Xaa in position 7 is Tyr, Phe or Pro
  Variant (8)..(8): Xaa in position 8 is Asp, Tyr, Phe or His
  Variant (10)..(12): Xaa in position 10 to 12 is any amino acid
  Variant (13)..(13): Xaa in position 13 is Asn, Asp or Ser
  Variant (14)..(25): Xaa in position 14 to 25 is any amino acid
  Variant (26)..(29): Xaa in position 26 to 29 is any or no amino acid
  Variant (30)..(30): Xaa in position 30 is Ile, Val, Leu or Phe
  Variant (31)..(31): Xaa in position 31 is any amino acid
  Variant (32)..(32): Xaa in position 32 is Phe, Val, Trp or Ile
  Variant (34)..(34): Xaa in position 34 is Glu, Ser or Cys
  Variant (36)..(36): Xaa in position 36 is Trp or His
  Variant (37)..(37): Xaa in position 37 is any amino acid
  Variant (38)..(38): Xaa in position 38 is Ala, Gly, Pro or Val
  Variant (39)..(39): Xaa in position 39 is Tyr, His or Phe

SEQ ID NO: 31209 - protein, 84 aa, Artificial sequence; identical to SEQ ID NO: 2899
  Consensus
  Variant (1)..(1): Xaa in position 1 is Ser or Leu
  Variant (2)..(2): Xaa in position 2 is any amino acid
  Variant (5)..(7): Xaa in position 5 to 7 is any amino acid
  Variant (8)..(8): Xaa in position 8 is Ala, Gly or Ser
  Variant (9)..(9): Xaa in position 9 is Leu, Phe, Met or Ile
  Variant (10)..(10): Xaa in position 10 is Ser, Thr, Arg or Glu
  Variant (11)..(11): Xaa in position 11 is Gln or Met
  Variant (12)..(12): Xaa in position 12 is any amino acid
  Variant (13)..(13): Xaa in position 13 is Ser or Ala
  Variant (14)..(14): Xaa in position 14 is any amino acid
  Variant (15)..(15): Xaa in position 15 is Ile, Leu, Met, Val or Phe
  Variant (16)..(16): Xaa in position 16 is His, Asn, Leu or Ile
  Variant (17)..(25): Xaa in position 17 to 25 is any amino acid
  Variant (26)..(33): Xaa in position 26 to 33 is any or no amino acid
  Variant (34)..(34): Xaa in position 34 is Phe, Val, Leu, Met or Ile
  Variant (35)..(42): Xaa in position 35 to 42 is any amino acid
  Variant (43)..(43): Xaa in position 43 is Ser or Thr
  Variant (44)..(44): Xaa in position 44 is Thr or Ser
  Variant (46)..(47): Xaa in position 46 to 47 is any amino acid
  Variant (48)..(48): Xaa in position 48 is Tyr, Gln or Val
  Variant (49)..(49): Xaa in position 49 is any amino acid
  Variant (50)..(50): Xaa in position 50 is Leu, Ile, Phe or Met
  Variant (51)..(51): Xaa in position 51 is any amino acid
  Variant (52)..(52): Xaa in position 52 is Ala or Ser
  Variant (53)..(53): Xaa in position 53 is Ser, Ala or Thr
  Variant (54)..(54): Xaa in position 54 is any amino acid
  Variant (55)..(55): Xaa in position 55 is Asp or Glu
  Variant (56)..(63): Xaa in position 56 to 63 is any amino acid
  Variant (64)..(65): Xaa in position 64 to 65 is any or no amino acid
  Variant (66)..(66): Xaa in position 66 is Gly, Ala, Lys or Asn
  Variant (67)..(73): Xaa in position 67 to 73 is any amino acid
  Variant (74)..(74): Xaa in position 74 is Ile, Val, Leu, Tyr or Phe
  Variant (75)..(80): Xaa in position 75 to 80 is any amino acid
  Variant (81)..(81): Xaa in position 81 is Arg or Lys
  Variant (82)..(83): Xaa in position 82 to 83 is any amino acid
  Variant (84)..(84): Xaa in position 84 is Ile, Leu, Val, Met, Phe, Ala or Thr

SEQ ID NO: 31210 - protein, 31 aa, Artificial sequence; identical to SEQ ID NO: 2900
  Consensus
  Variant (1)..(1): Xaa in position 1 is Val, Ile, Leu, Cys or Arg
  Variant (2)..(5): Xaa in position 2 to 5 is any amino acid
  Variant (6)..(9): Xaa in position 6 to 9 is any or no amino acid
  Variant (10)..(10): Xaa in position 10 is Gly, Thr, Asp or Asn
  Variant (11)..(11): Xaa in position 11 is any amino acid
  Variant (12)..(12): Xaa in position 12 is Ile, Val or Thr
  Variant (13)..(13): Xaa in position 13 is any amino acid
  Variant (14)..(14): Xaa in position 14 is Ala, Gly, Thr or Leu
  Variant (15)..(16): Xaa in position 15 to 16 is any amino acid
  Variant (17)..(17): Xaa in position 17 is Val, Ile, Ala, Leu or Phe
  Variant (18)..(19): Xaa in position 18 to 19 is any amino acid
  Variant (24)..(24): Xaa in position 24 is Ile, Val or Phe
  Variant (25)..(26): Xaa in position 25 to 26 is any amino acid
  Variant (27)..(27): Xaa in position 27 is Val, Leu, Ile, Phe or Met
  Variant (28)..(29): Xaa in position 28 to 29 is any amino acid
  Variant (31)..(31): Xaa in position 31 is Glu or Gln

SEQ ID NO: 31211 - DNA, 990 bp, Escherichia coli
  CDS (1)..(990)
atgcatattacatacgatctgccggttgctattgatgacattattgaagcgaaacaacgactggctgggcgaatttataaaacaggcatgcctcgctccaactattttagtgaacgttgcaaaggtgaaatattcctgaagtttgaaaatatgcagcgtacgggttcatttaaaattcgtggcgcatttaataaattaagttcactgactgatgcggaaaaacgcaaaggcgtggtggcctgttctgcgggcaaccatgcgcaaggggtttcgctctcctgcgcgatgctgggtatcgacggtaaagtggtgatgccaaaaggcgcgccgaaatccaaagtagcggcaacgtgcgactactccgcagaagtcgttctgcatggtgataacttcaacgacactatcgctaaagtgagcgaaattgtcgaaatggaaggccgtatttttatcccaccttacgatgatccgaaagtgattgctggtcagggaacgattggcctggaaattatggaagatctctatgatgtcgataacgtgattgtgccaattggtggtggcggtttaattgctggtattgcggtggcaattaaatctattaacccgaccattcgtgttattggcgtacagtctgaaaacgttcacggcatggcggcttctttccactccggagaaataaccacgcaccgaactaccggcaccctggcggatggttgtgatgtctcccgcccgggtaatttaacttacgaaatcgttcgtgaattagtcgatgacatcgtgctggtcagcgaagacgaaatcagaaacagtatgattgccttaattcagcgcaataaagtcgtcaccgaaggcgcaggcgctctggcatgtgctgcattattaagcggtaaattagaccaatatattcaaaacagaaaaaccgtcagtattatttccggcggcaatatcgatctttctcgcgtctctcaaatcaccggtttcgttgacgcttaa

SEQ ID NO: 31212 - protein, 329 aa, Escherichia coli
MHITYDLPVAIDDIIEAKQRLAGRIYKTGMPRSNYFSERCKGEIFLKFENMQRTGSFKIRGAFNKLSSLTDAEKRKGVVACSAGNHAQGVSLSCAMLGIDGKVVMPKGAPKSKVAATCDYSAEVVLHGDNFNDTIAKVSEIVEMEGRIFIPPYDDPKVIAGQGTIGLEIMEDLYDVDNVIVPIGGGGLIAGIAVAIKSINPTIRVIGVQSENVHGMAASFHSGEITTHRTTGTLADGCDVSRPGNLTYEIVRELVDDIVLVSEDEIRNSMIALIQRNKVVTEGAGALACAALLSGKLDQYIQNRKTVSIISGGNIDLSRVSQITGFVDA

SEQ ID NO: 31213 - DNA, 978 bp, Xenopus tropicalis
  CDS (1)..(978)
atggatttcacagagcaagctccttttcatattgtcacccctctgaaagagagccatgctttatccaaattggctgggaccacagttctcatgaagctggaaaatgttcagcccgcagggtcattcaagatacgtgggattggacactattgtcagaagcttgcgaagaaaggctgcacgaggtttgtctgttcctcagggggtaatgctgggcttgcagcagcttatgcttgcagaagattggccctgccagccaccattgttgttccacagaccactggagcagatattgtacagaagctgcaggatctgggagctgacgttgtggtgactggaaaggtctgggacgatgctgatgcacatgctcaccagctgactgaaactcctggcagtgtgtatatctctccgtttaaccatcctctcgtctgggaaggccatgccagccttgtgtgtgaactaaaggcttctttgggttctcagaagccaggtgcacttgtggtttctgtagggggtggcgggctccttgcggggctggctgaagggatgaagaaggtgggctggtctgatattcccataattgcaatggagactaaaggtgcccactgtttgaatgcagcgcttgaagcaggcaaacccatcagccttccagacattaccagtgttgccaagtgtcttggcgcaaagacagtatgtgacagagcctatgagtgtacaagggagcacaaagttatctccattactgttgatgacagagaagccattcgagctgtggaaatgtttttggatgatgagctaatgtttgtggaacctgcatgtggagctgcccttgctgctgtctattcaggacatatccaacgcctgcagcaggagggaagcttgaagacaccccttgaccccatagtgatggtagtgtgtggcggcagtgggatcagcatttctcagcttcaacactttaaatcccaactgaatataaactga

SEQ ID NO: 31214 - protein, 325 aa, Xenopus tropicalis
MDFTEQAPFHIVTPLKESHALSKLAGTTVLMKLENVQPAGSFKIRGIGHYCQKLAKKGCTRFVCSSGGNAGLAAAYACRRLALPATIVVPQTTGADIVQKLQDLGADVVVTGKVWDDADAHAHQLTETPGSVYISPFNHPLVWEGHASLVCELKASLGSQKPGALVVSVGGGGLLAGLAEGMKKVGWSDIPIIAMETKGAHCLNAALEAGKPISLPDITSVAKCLGAKTVCDRAYECTREHKVISITVDDREAIRAVEMFLDDELMFVEPACGAALAAVYSGHIQRLQQEGSLKTPLDPIVMVVCGGSGISISQLQHFKSQLNIN

SEQ ID NO: 31215 - DNA, 1773 bp, Cryptococcus neoformans var. neoformans JEC21
  CDS (1)..(1773)
atggcgcccacacccatccccgtccccgccgcccgcccggccgccagccacctctccaagtcgccgccgacgaccaacgagtacacctccaccgcgcccatccccgccctcccgccgcagcacacggacgagggcgtcccctcccacctctaccaaggcctgcccgcccatctcctgatcgacgatgcccagggacaaaaggtccccgactatctcaggatgatcctgatgtccaaggtctacgccgcgcccctcaacctcaaggaaacccctctcacatatgcagccaacctctccgcccggctcggcaacgagatctggatcaagcgggaggacctccagcccgtgttctcattcaagatccgcggcgcctacaacatgatggccagtctgtccgacgaagaaaagaaaaagggcgtcatcacgtgctccgccggcaaccacgcccagggcgtcgccctctccggccacgcactcaacatccccgccatcgtcgtcatgcccgtctccaccccgtccatcaagtggcgcaacgtccagcgtctcggcgccaccgtcctcctccacggccgcgactttgacgaggccaaggccgagtgtctccgcctcgaaaaggaaaagggcctgacctttgtgcccccgtacgataacccctacgtcgtcgccggccagggaactgtcgccatggaaatctgccgccaagtcacagatgccgaccagatcgatggcatattcgcttccgtcggcggaggcggccttgcggccggtatcgcggcgtacatgaagcgagtcgccaagcccagtgtcggaatctacggtgtcgagaccgttgacggtgatgccatggaccgctcactcaaggccggcaagagggtcctcctcgatgaagtcggcccgtttgcagacggtaccgcggtaaggcttgtcggcgaagaaccttttcgcgtatgcaaaaactttttggacgacgtcgtgcttgtcaacaatgacgagatttgcgccgccatcaaggatgtctttgaagaaacccgatctgtccccgaaccgtccggtgccctcgcactcgcaggcctgaaagcccacattatccgaaacaacctccaaggcgccggtaaacgctttgtcgccgtcatctccggcggtaacatgaactttggccgactccgattcgtcgctgagcgagcggatgtcggcgaacgacgagaagtgctgatgagtgtccgagtgcccgaaaagcctggcagctttttgaaattccactccctcctcggttcacgcgcagtcaccgagttctcctaccgccactccaacaattccaccggctacatcatctgctccttcctcctctcctcctcatcctcttcgtcctccgggccctcacccgaagcgcgcgcaaacgagattcacgagatggtcgaatcgtttaaacagcatgggatcgaagccgtcgatttgagcgaggatgagtttgcaaagagtcatgtgaggcatctggtcggtggacgcagtgccgtggagcacgaaaggatctttaggtttgagttcccggaaagacctggggcacttggaaactttttaaaaggtatgaaggtcgaatggaatatctccatgttccattacagaaaccacggtgccgacgtcggcaaagtcctcatcggcgtccaagtcccgtcccaggacaaccccgcatttgacgagtttttggaaaagctgggatatccatatgtcgaagagacccataatgaggtttacaccatgttcctcaggtcgtaa

SEQ ID NO: 31216 - protein, 590 aa, Cryptococcus neoformans var. neoformans JEC21
MAPTPIPVPAARPAASHLSKSPPTTNEYTSTAPIPALPPQHTDEGVPSHLYQGLPAHLLIDDAQGQKVPDYLRMILMSKVYAAPLNLKETPLTYAANLSARLGNEIWIKREDLQPVFSFKIRGAYNMMASLSDEEKKKGVITCSAGNHAQGVALSGHALNIPAIVVMPVSTPSIKWRNVQRLGATVLLHGRDFDEAKAECLRLEKEKGLTFVPPYDNPYVVAGQGTVAMEICRQVTDADQIDGIFASVGGGGLAAGIAAYMKRVAKPSVGIYGVETVDGDAMDRSLKAGKRVLLDEVGPFADGTAVRLVGEEPFRVCKNFLDDVVLVNNDEICAAIKDVFEETRSVPEPSGALALAGLKAHIIRNNLQGAGKRFVAVISGGNMNFGRLRFVAERADVGERREVLMSVRVPEKPGSFLKFHSLLGSRAVTEFSYRHSNNSTGYIICSFLLSSSSSSSSGPSPEARANEIHEMVESFKQHGIEAVDLSEDEFAKSHVRHLVGGRSAVEHERIFRFEFPERPGALGNFLKGMKVEWNISMFHYRNHGADVGKVLIGVQVPSQDNPAFDEFLEKLGYPYVEETHNEVYTMFLRS

SEQ ID NO: 31217 - DNA, 996 bp, Cryptococcus neoformans var. neoformans JEC21
  CDS (1)..(996)
atggctgccgtcaactacacaatcgaagatccaaacactgtgccatggatcaagacccccctcgtgcgctcagctgcactttcaaagcttgccggctgtgaaatcttactcaagctggaaaatatccagccgagtgggtcgttcaaatctagagggataggtaatctggtccttcagtctgtcaactcagctccaccagacactccgcttcacttctactcttcatcaggaggcaatgctggtctcgcttgcgttaacgcagcatctactctgggctatccttcctctgttatcgtgcctctcagcaccaaaccttttatgattgataagcttcgtaccgctggcgctacagaagtgatccagactggccaaacatggtttgaggcagataagcaccttcaggaagagatacttgcaagagatccgaacggcatctacctcccgccctttgatcactccgacatctggcaaggagcagctactatggtcgacgagattgtgcaagaattaacacacgtcccagatgcgatagtgtgctcagtaggaggaggaggactaatgattggtgtttgtaaaggactggagagactggataaggaaaagaaagcgaaagttgtggcggtcgaaactttaggggcagagtcactacacaagtcggtaaaggcgggacagttgatcactttgccgggtatcgcatcacttgctacttcactaggtgcgacgaccgtcgctgccaaagcactagagtatgctctacagcctcaggttcgtagtacggtagtatcagataaggaagctttagaagcctgtatccggtttcttgatgacgaaagaatcttggttgagccagcctgcggcgcgactttggcaatggtgtattcaggaaagctcaaagatgtgctgaaactcgacgccaaaagcaaagtggtgctcgtggtttgtgggggatcaaatatctcattagaattgatagaaggctataaaaagatgttttga

SEQ ID NO: 31218 - protein, 331 aa, Cryptococcus neoformans var. neoformans JEC21
MAAVNYTIEDPNTVPWIKTPLVRSAALSKLAGCEILLKLENIQPSGSFKSRGIGNLVLQSVNSAPPDTPLHFYSSSGGNAGLACVNAASTLGYPSSVIVPLSTKPFMIDKLRTAGATEVIQTGQTWFEADKHLQEEILARDPNGIYLPPFDHSDIWQGAATMVDEIVQELTHVPDAIVCSVGGGGLMIGVCKGLERLDKEKKAKVVAVETLGAESLHKSVKAGQLITLPGIASLATSLGATTVAAKALEYALQPQVRSTVVSDKEALEACIRFLDDERILVEPACGATLAMVYSGKLKDVLKLDAKSKVVLVVCGGSNISLELIEGYKKMF

SEQ ID NO: 31219 - DNA, 1146 bp, Thermococcus kodakaraensis
  CDS (1)..(1146)
atgaagcttaaatgtccaatatgtggaaaaacttacgatgagcccgtccagaggtgcgagtgcggtgaaccagttgagtttgaagccttcaatgcagagccttaccttggaaagaccgtctgggagagattctgggacttctggccaatagaaccagcaatggatctctcgctcggcgagggggatactcccctcgtgaagtccaaacttggaaaagagctcggggtaaagctctacctgaagaatgagaccgcaaacccgacctggagcttcaaggacaggggaacgtttctggcggtgagctacgcggtcaaagcgggatacaaggccattggaacggtttccactggcaacatggcggccagtgtagctgcttacgccgcgagggctggcctaaaggccaaaattctcgtctcagagagcgcgagcgaggagaagctcaaaactgtgagcgtttacggtgcggacgtgataagggttaggggagattacggaaggctctacttcgagagcctggagctgggtgagaagcttgggatatacttcatcaattccgacaacccattccgcgtcgagggctacaaggggattgccttcgagatggcggaggagcttactcctgactacgtcttaatccccacgagctcaggcggtctgttcaggggaattgccaagggcttcatcgagctgaaggagagcgggctcatcgaaaaactcccaacgctgatagcagtccaggctgaaggctgttcgccgatatgcagggcctttaacgaagggaacgagagaataaagcgcttcgaaaacccaaacacgatagcgaaggccatagcaaatccgtacccgccgagcggaaacgccgtccttaagttgctccgcgacttaggctggaagtgcaccaccgtgagcgacgaagaaatcctcgaagcgcagagagagcttgcaaaggaaggcctcttcgtccagccagcgagcgcaacggggattgctgttctcaaaaagctcgtcgagagtgaaaaaatcgatgaaggggcaaaagttgtgtctattctcacggggtcaggattaaaagtgctcgcacatatgccctccggcaaaatagtaaattgtccgctggaaggactggagaactgtgtgtcattttag

SEQ ID NO: 31220 - protein, 381 aa, Thermococcus kodakaraensis
MKLKCPICGKTYDEPVQRCECGEPVEFEAFNAEPYLGKTVWERFWDFWPIEPAMDLSLGEGDTPLVKSKLGKELGVKLYLKNETANPTWSFKDRGTFLAVSYAVKAGYKAIGTVSTGNMAASVAAYAARAGLKAKILVSESASEEKLKTVSVYGADVIRVRGDYGRLYFESLELGEKLGIYFINSDNPFRVEGYKGIAFEMAEELTPDYVLIPTSSGGLFRGIAKGFIELKESGLIEKLPTLIAVQAEGCSPICRAFNEGNERIKRFENPNTIAKAIANPYPPSGNAVLKLLRDLGWKCTTVSDEEILEAQRELAKEGLFVQPASATGIAVLKKLVESEKIDEGAKVVSILTGSGLKVLAHMPSGKIVNCPLEGLENCVSF

SEQ ID NO: 31221 - DNA, 1269 bp, Staphylococcus aureus subsp. aureus COL
  CDS (1)..(1269)
atgacagtcaaaacaacagtttctacgaaagatatcgatgaggcatttttaagacttaaagatattgtcaaagaaacacctttacaattagaccattacttatctcaaaagtatgattgtaaagtctatttaaaacgagaagatttacaatgggtacgttcttttaaattaagaggtgcttacaacgctatttctgttttatcagatgaagctaaaagtaaaggtattacatgtgcaagtgcaggtaatcatgctcaaggtgttgcctatacagctaaaaaacttaatttaaacgctgttatctttatgccagtcactacacctttacaaaaggtaaatcaagtaaagttctttggaaatagtaacgttgaagttgtactcactggtgatacatttgatcactgtttagctgaagctttaacttatacaagtgaacatcaaatgaactttatagatccattcaataatgttcatacaatttctggacaaggtacgcttgctaaagaaatgctagaacaagcaaagtctgacaatgttaactttgattatctatttgccgcaattggtggtggcggtttaatttcaggtattagtacttactttaaaacctattcacctaccacgaaaattataggtgttgaaccttcaggtgcaagtagtatgtatgaatctgttgtggtaaataatcaggtagtcacattgcctaatatcgataaatttgtggacggtgcatctgtagctagagttggcgatattacatttgaaattgcaaaagaaaatgtagatgattacgttcaagtagatgaaggtgcagtttgttctacgattttagatatgtattcaaaacaagcaattgtagcagaacctgctggcgcattaagtgtaagtgcgcttgaaaactataaagatcatattaaaggtaaaacagtggtttgtgtcattagtggtggtaataatgatattaatcgaatgaaagaaattgaagaacgttcattactatacgaagaaatgaagcattactttatcttaaatttccctcaacgtccaggtgcattgagagaatttgtaaatgacgtattaggacctcaagacgatattactaaatttgaatacttaaaaaaatcttctcaaaatacaggtactgtcattattggtattcaacttaaagatcatgatgatttaatacaactcaaacaacgtgtaaatcatttcgatccttccaatatttatattaatgaaaataagatgttatattcattgttaatttaa

SEQ ID NO: 31222 - protein, 422 aa, Staphylococcus aureus subsp. aureus COL
MTVKTTVSTKDIDEAFLRLKDIVKETPLQLDHYLSQKYDCKVYLKREDLQWVRSFKLRGAYNAISVLSDEAKSKGITCASAGNHAQGVAYTAKKLNLNAVIFMPVTTPLQKVNQVKFFGNSNVEVVLTGDTFDHCLAEALTYTSEHQMNFIDPFNNVHTISGQGTLAKEMLEQAKSDNVNFDYLFAAIGGGGLISGISTYFKTYSPTTKIIGVEPSGASSMYESVVVNNQVVTLPNIDKFVDGASVARVGDITFEIAKENVDDYVQVDEGAVCSTILDMYSKQAIVAEPAGALSVSALENYKDHIKGKTVVCVISGGNNDINRMKEIEERSLLYEEMKHYFILNFPQRPGALREFVNDVLGPQDDITKFEYLKKSSQNTGTVIIGIQLKDHDDLIQLKQRVNHFDPSNIYINENKMLYSLLI

SEQ ID NO: 31223 - DNA, 1104 bp, Staphylococcus epidermidis RP62A
  CDS (40)..(1104)
tatcaagaaagtttatcctgtagagggagtttaataattatgaaaagatggcaaggattagttaaagaatttaaagaatatttaccagtcaatcaatctacaccagcactaacactcaatgaaggacatacaccacttatttattgtgaaaatctttctcaaaaattagatattgaattatatgttaaatatgaaggagcaaatccgactggctcatttaaagatcgtggtatggttatggctgtaacaaaggcaaaagaacaagggaaaaaagttgttatttgtgcttcaactggtaatacttcagcatcagcagctgcttatgctgcaagagctggtttaaaagcaattgtcgtaattcctgaaggtaaaatagcattaggtaaattatcacaagcagttatgtatggtgcagaaattgtttctatagaaggaaacttcgatgaagcactagaaattgtaaaagagattgctgaagaaaatgatgaaattgaattagttaattctgttaatccatttaggattgaaggacaaaagacgggtgcctttgaaattgttgaacagttagatggtcaagcccctgacattttagcaataccagtgggaaatgcaggtaatataactgcttattggcaaggatttgttgaatatcataataaaaagaatacacaattaccacaaatgtttggcttccaagcagaaggagcatctccaattgttcaaaataaaataatcaaaaatccagaaacaatagctacagctatccgaatagggaatcctgctagttggcaaaaagctgttaatgcactagatgaatcaaatggtttaattgatagtgtgatagatgaagaaattttagaagcttatcagttaatgacaacaaatgaaggtgtttttagtgaaccagcgagtaatgcttcaattgcaggtctaatcaaacttcatcgctctggtaagttacctaaaggtaaaaagatagttgcaatattaactgggaatggacttaaagatcctgacacagctatttctctcttagataatcctattcaacctttacctaataataaagaaagtataattagatacatcaaaggggcaatctag

SEQ ID NO: 31224 - protein, 354 aa, Staphylococcus epidermidis RP62A
MKRWQGLVKEFKEYLPVNQSTPALTLNEGHTPLIYCENLSQKLDIELYVKYEGANPTGSFKDRGMVMAVTKAKEQGKKVVICASTGNTSASAAAYAARAGLKAIVVIPEGKIALGKLSQAVMYGAEIVSIEGNFDEALEIVKEIAEENDEIELVNSVNPFRIEGQKTGAFEIVEQLDGQAPDILAIPVGNAGNITAYWQGFVEYHNKKNTQLPQMFGFQAEGASPIVQNKIIKNPETIATAIRIGNPASWQKAVNALDESNGLIDSVIDEEILEAYQLMTTNEGVFSEPASNASIAGLIKLHRSGKLPKGKKIVAILTGNGLKDPDTAISLLDNPIQPLPNNKESIIRYIKGAI

SEQ ID NO: 31225 - DNA, 1269 bp, Staphylococcus epidermidis RP62A
  CDS (1)..(1269)
atgacagtaagaactaaagtttcgacaaaagatatagatgaagcatatttacgtctaaaaaatatagtaaaagaaactcccttacaattcgaccattacttatctcaaaaatataattgtaatgtttatttaaaaagagaagatttacagtgggtacgatcctttaaattaagaggagcttataatgctatttcagtattatccaatgaagaaaaaaataaaggtattacttgcgcaagtgctggaaatcatgctcaaggtgttgcttatactgccaaaaaactcaatttaaaagctgttattttcatgccagtaactacaccacgacaaaaaatcaatcaagtcaaattcttcggggatagtaacgtagaaatagtattaattggcgatacatttgatcactgcttagcacaagctttaaactatacgaagcaacataaaatgaattttattgacccatttaataatgtatatactattgcaggacaaggcactttagctaaggaaatattaaatcaagctgaaaaagaggataaaacatttgattatgtatttgctgctataggtggtggcggtcttatttcaggagtgagcacatattttaaagcacattccccccatactaaaattattggtgttgaaccaaccggtgccagtagtatgtatcaatcagtcgttatcaaccatagtatagttactttagaaaatattgataagtttgttgatggagcttcagtagcaagagttggtgatattacctttgatattgcgaaagataaagtggatgattatgttcaagttgacgaaggagctgtttgctccacaattctggatatgtactctaaacaagcgattgttgctgaaccagctggtgctttaagtgtaagtgccttagaacaatataaaaagcagattgaaaataaaactattgtatgcatagtaagtggaggcaacaatgatattaatcgaatgaaagaaattgaggagcgttcccttctatttgaagaaatgaaacattactttattttaaatttcccacaaagacctggtgctttaagagaatttgtcaatgatgtcctcggacctcaagacgatattacaaaatttgaatatttaaagaaaacatcacaaaacactggaactgttattataggtatacagctgaaacatcatgatgatctcattcagttaaaagatcgcgtatgtcaatttgatccttctaatatttatatcaatgaaaataaaatgttatattcattacttatttaa

SEQ ID NO: 31226 - protein, 422 aa, Staphylococcus epidermidis RP62A
MTVRTKVSTKDIDEAYLRLKNIVKETPLQFDHYLSQKYNCNVYLKREDLQWVRSFKLRGAYNAISVLSNEEKNKGITCASAGNHAQGVAYTAKKLNLKAVIFMPVTTPRQKINQVKFFGDSNVEIVLIGDTFDHCLAQALNYTKQHKMNFIDPFNNVYTIAGQGTLAKEILNQAEKEDKTFDYVFAAIGGGGLISGVSTYFKAHSPHTKIIGVEPTGASSMYQSVVINHSIVTLENIDKFVDGASVARVGDITFDIAKDKVDDYVQVDEGAVCSTILDMYSKQAIVAEPAGALSVSALEQYKKQIENKTIVCIVSGGNNDINRMKEIEERSLLFEEMKHYFILNFPQRPGALREFVNDVLGPQDDITKFEYLKKTSQNTGTVIIGIQLKHHDDLIQLKDRVCQFDPSNIYINENKMLYSLLI

SEQ ID NO: 31227 - DNA, 1227 bp, Gluconobacter oxydans 621H
  CDS (1)..(1227)
atgtctgacgtcctgacgtccaccacccctgtcgtgaccatcgcggacatcgagagcgcccatgagcgcatcgcgtccacggtggtccgcacgccgaccatcgcctgcccggccctttcccggctgacaggcgcggagattacgctcaagctcgaaaaccttcaggcgatcggctccttcaaggagcgcggagcggccaacaagatggccctcctgacgccggaagagcgggcgcgcggcgtcattaccgtctcggcaggcaaccacgcacagggtgtggcccgtcaggccagtcttcttggtattgatgcgaccatcgtcatgccgcgcttcacgccggccaccaaggtcgcggcaacgcaggcctggggcgcgaatgtcgtgctcgcaggggacgatttcgcacaggccagcgagaccgctgccgagctccagaagcaggacggccgcgttctcgtccacccgttcaatgatccggccgtcatcgccggtcagggcactgcggcgctggagcttctggaagatgctccggacatcgatacggtcgtcgtgcccgtgggcggcggtggcctgatcggtgggtttgcgaccgtcatggcggcgctgcgtccggatgtcgaggtcattggggtacaggtcgaggcctatgcctcgctgtcaaactacccgcaggaagacggcccgactcagggcggctcaaccatcgcggaaggtatcgccgtcacaaggctcggcgatcactgcctgaacgcctttcgcaacaagatctcgaagatcctcgttgtcagcgagcttcaggtcgaaagctccatcacgacgctggctgaaaaggccaagcaggtctgtgaaggtgcgggcgccacgggccttgctgcagttctggcctatccggagctgttcaagggacgccgcgttgccctgcccctgtctggcggcaacatcaacgcccgtatccttgccaacacaatcctgcgctcccttctccgggacggacggatcctgcggctgatcttccagatccccgaccgtccaggcatgctggcggatatttcggcccgcatcggcaattatggcggaaacatcatcgaagtctcccatcaccgcctgttcgcctccccgtccgttcagacggccgaactgctggtgatggtggaagcccgcgacaccgaacatgcccaccagatcgagaccgatctggcacggcattacatcgtccggcgcgactga

SEQ ID NO: 31228 - protein, 408 aa, Gluconobacter oxydans 621H
MSDVLTSTTPVVTIADIESAHERIASTVVRTPTIACPALSRLTGAEITLKLENLQAIGSFKERGAANKMALLTPEERARGVITVSAGNHAQGVARQASLLGIDATIVMPRFTPATKVAATQAWGANVVLAGDDFAQASETAAELQKQDGRVLVHPFNDPAVIAGQGTAALELLEDAPDIDTVVVPVGGGGLIGGFATVMAALRPDVEVIGVQVEAYASLSNYPQEDGPTQGGSTIAEGIAVTRLGDHCLNAFRNKISKILVVSELQVESSITTLAEKAKQVCEGAGATGLAAVLAYPELFKGRRVALPLSGGNINARILANTILRSLLRDGRILRLIFQIPDRPGMLADISARIGNYGGNIIEVSHHRLFASPSVQTAELLVMVEARDTEHAHQIETDLARHYIVRRD

SEQ ID NO: 31229 - DNA, 1071 bp, Xanthomonas oryzae pv. oryzae KACC10331
  CDS (1)..(1071)
atgaatcggtccttcattgtgcagcaacgcggcgctttgtcatcgatccagcccgcgcggcggcagtgcgtgcgacccgtgaagagggagcgatacgttaatcttgcaggcatgatcgagacggtccctcttgcccattccgacgttctgcaagccgctgcgcggatcgcgccgcactgcgcgccgacaccattgctgacatcgcacagcctggatgcgctcagcggtgcacggttgttcttcaaggccgaacatctgcaacgcagcggggccttcaagttccgcggggcgtgcaatgccgtgtggtcgctgccggacgagcggactgcacatggggtagtgacgcattcatccggcaaccacggcgcggcgctggcgctggccgcacgcacgcgtggcatgggttgccatgtggtggtgcccgaaggcgcggtggcggccaagctggccaatatttcccggcatggcgccaccttgtggcgctgcgcaccgaccatcgcagcgcgtgaacagctatgcgccgaggtgcaggccagcagcggtgccacgctggtgcacccgtataccgatgtcgcggtcatcgccggccaggggacggccacgctggagctgctgcatcaaagcggtggcctggacgtgctggtggcgccggtcggcggtggcgggttggcggccggtgccgcgctggcgctgcgctgcgcacccggctgcgagctggtgctggccgagccggccggcgcagccgataccgcgcgttcgttggcggcaggccagcggctggtcgattttgtgccggacactgtgtgcgatggtctgcgcggcaccttgggcgcgcccaatttcgcgctgctgcagcacgccggcgcgcaggtgatcacagtcgacgatgccgcggtcgtccaggcgatgcggctgatctggcagttgctcaaacaagtggtcgagccgtcttcggtgatcaccctggccgcggtgctggccgagccggcacggtttgccgggcgccgggtgggcttgatcctgtctggtggcaatgtcgatctggatgccttgccatgggccgcggcgtga

SEQ ID NO: 31230 - protein, 356 aa, Xanthomonas oryzae pv. oryzae KACC10331
MNRSFIVQQRGALSSIQPARRQCVRPVKRERYVNLAGMIETVPLAHSDVLQAAARIAPHCAPTPLLTSHSLDALSGARLFFKAEHLQRSGAFKFRGACNAVWSLPDERTAHGVVTHSSGNHGAALALAARTRGMGCHVVVPEGAVAAKLANISRHGATLWRCAPTIAAREQLCAEVQASSGATLVHPYTDVAVIAGQGTATLELLHQSGGLDVLVAPVGGGGLAAGAALALRCAPGCELVLAEPAGAADTARSLAAGQRLVDFVPDTVCDGLRGTLGAPNFALLQHAGAQVITVDDAAVVQAMRLIWQLLKQVVEPSSVITLAAVLAEPARFAGRRVGLILSGGNVDLDALPWAAA

SEQ ID NO: 31231 - DNA, 897 bp, Xanthomonas oryzae pv. oryzae KACC10331
  CDS (1)..(897)
atgcctgattccggccgcccttccgcttccgcacaggagccagaggtaggcgacgtggccgtcagcgtggccgacgtgctggcggcacaggcacgcctgcgcaagtacctgtcgcccacgccgctgcattacgccgaacgcttcggtgtgtggctgaagcttgagaatttgcagcgcaccggctcctacaaggtgcgcggcgcattgaatgcattgctggccgggctggagcgcggcgatgagcgtccggtgatctgtgcctcggccggcaatcatgcgcaaggcgtggcgtggtcggcgtatcggctgggtgtgcaggccatcacggtgatgccctacggcgcgccgcagaccaagatcgccggtgtcgcgcattggggcgccaccgtgcgccagcatggcaacagctacgacgaagcattcgcgtttgcgcgcgagctggccgaccagaacggttatcgctttttgtctgccttcgacgacccggatgtgattgccggccagggcacggtcggcatcgaactggctgcgcatgcgccggacgtggtgatcgtgccgattggcggcggcggggctggcgtctggggtagcgctggcgttgaaatcgcaaggcgtgcgtgtggtcggcgcgcaggtggaaggcgtcgattcgatggcgcgcgccgtgcgcggcgacctgcgcgaaattaccccggttgcaacgctggccgacggcgtgaaggtcaagattccgggctttctcacgcgccgcctgtgctcgagcctgctcgacgatgtggtgatcgtgcgcgaggccgaattacgcgaaacattggtgcgtctggcgctggaagaacacgtgatcgccgaaggcgccggcgcgctggcgctggccgccggacgccgcgtttccggtaa

SEQ ID NO: 31232 - protein, 298 aa, Xanthomonas oryzae pv. oryzae KACC10331
MPDSGRPSASAQEPEVGDVAVSVADVLAAQARLRKYLSPTPLHYAERFGVWLKLENLQRTGSYKVRGALNALLAGLERGDERPVICASAGNHAQGVAWSAYRLGVQAITVMPYGAPQTKIAGVAHWGATVRQHGNSYDEAFAFARELADQNGYRFLSAFDDPDVIAGQGTVGIELAAHAPDVVIVPIGGGGAGVWGSAGVEIARRACGRRAGGRRRFDGARRARRPARNYPGCNAGRRREGQDSGLSHAPPVLEPARRCGDRARGRITRNIGASGAGRTRDRRRRRRAGAGRRTPRFR

SEQ ID NO: 31233 - DNA, 1131 bp, Vibrio fischeri ES114
  CDS (1)..(1131)
atgaaatacctctgtatggcgtgtaataaagaatacgcaccgaaacctgaactcattaaatgtgaatgtggctccgccctatgggttaaacctcaaacgtcatttagtaaaaaagatctcatagaaaatgaattcacacctagacgctattctagtgctttcccagtaaaaaaagacgatatcaatatcactttcaatgaagccatcacacctctttgccaagctgaaatatcaggaactccaatactggttaaactcgattcgctacaaccaacaggctcatttaaagaccgaggtgcctctcttgtaatcaattaccttaacaaccatggaataacaagcattgcagaagactcaagcggtaatggaggaagtgcttatgccggttatgccgctaaaggaaacatgcaatgcaacatatttgtgcctgctggaacatccaaaggaaagacaacacaaacccgattatacggcgctaactgtattgaagtagaaggaacaagagaagatgttgctctagctgcaatagagagcagcgtcactcatggaagtcattatgttgggcataactggcatcccctatttatcgaaggcgtcaaatccatcgcttatgaaatatgggaacagtgtggatataaagcccctgataattttgttgttcccgcaggaaatggaagtttactcgctggagcatatatcggtttctctgaattattaaaaggcggagaaataagcaaactccctcgcctttttggtattcaaagtgaaagcattcagccgtttgtacaaacctttaacaataaagaaatcaacattacttcagaagataccattgctgagggtattaagattaagcgttcatcacgaatgaatgagatcgttcaatttgtaaaagaaacgaatgggaattttattagtgttaatgaacaacaaatccaatcagcattaaaagagatgggagcacaaggatactttatcgaaccaacatcagcgacggcatttgcaggaatcgctcagcttataaaaacgcaagaaatcaaacctgacgagcttaccgttggagtcgtaaccggaaatggactcaaagcaacaaactcaattgaacatttaatcaatgatatgagaggttaa

SEQ ID NO: 31234 - protein, 376 aa, Vibrio fischeri ES114
MKYLCMACNKEYAPKPELIKCECGSALWVKPQTSFSKKDLIENEFTPRRYSSAFPVKKDDINITFNEAITPLCQAEISGTPILVKLDSLQPTGSFKDRGASLVINYLNNHGITSIAEDSSGNGGSAYAGYAAKGNMQCNIFVPAGTSKGKTTQTRLYGANCIEVEGTREDVALAAIESSVTHGSHYVGHNWHPLFIEGVKSIAYEIWEQCGYKAPDNFVVPAGNGSLLAGAYIGFSELLKGGEISKLPRLFGIQSESIQPFVQTFNNKEINITSEDTIAEGIKIKRSSRMNEIVQFVKETNGNFISVNEQQIQSALKEMGAQGYFIEPTSATAFAGIAQLIKTQEIKPDELTVGVVTGNGLKATNSIEHLINDMRG

SEQ ID NO: 31235 - DNA, 1527 bp, Neisseria gonorrhoeae FA 1090
  CDS (1)..(1527)
atgaacacgccccttccttattccgattacctcatccgcatcctgacggcatctgtctatgatgtagcggtcgaaacgcctttggaaccggcacgcagcctttctgtacgtttgaaaaacaacatccttttgaaacgcgaagatttgcagccggttttttcgttcaaaatacgcggcgcgtacaacaaaatgtccaagttgccgaaagatgcgctcgcttgcggcgtgattgcggcaagcgcgggcaatcacgcacaaggcgtggcgttgtccgcacagcgtttgggctgccgtgccgttatcgtcatgccggagactacgccgaaaattaaagtggatgcggttaaaagccgtggcggcgaggtggttttgcggggtgtttcatacaacgatgcctacgattatgcgatggagctggcggaacaggaagggctgacctatatcgcgccgtttgacgatcccgatgtgattgcgggacaggggacggtggggatggaaattgtcagccagcatcccgatccaatccgcgccgtattcgtaccgatagggggcggcggtttggcggcgggcgtggcggcatttatcaaacaggttcgtcccgaaattaaagttatcggcgtacagaccaacgattcctgctgtatgaagcagtcggtcgaagcaggcgaaatcgtccatttgaaagatgtcgggctgttttcagacggtacggcggtcaaagtcgtcggaaacggaaccttccgcctctgcaaagaacttttggatgaaatcattacagtcgataccgatgcggtttgcggcgcggtcaaggatattttcgatgacacgcgcagcattaccgagccggccggcgcgttggcgttggcgggtctgaaagcctatattgcccgagaaggtgcggaaaaccaaaccctgattgccgttaccagcggtgcgaatatgaattttcaccgtttgcgccacgtttcggaacggagcgaattgggcgagggcaacgaaggtatttttgccgttaccatccccgaagaacgcggcagcttccttaagtttgtcaatatattgggaaataggaatattaccgagttcaactaccgctacggcggcgatgaaaaagcgcatatctttgtcggacttcaagcggcaggcccgcaggatttggcggttatcggcagccggttggatgaggcgggattgcccaatgtcgatttgaccaataatgagattgccaaaatccatatccgctatatggtcggagggcggacggacaaagtagggcacgagcgtctggtcagttttgagtttccggagcgtccgggcgcgttggcgcgctttttgaaccatatgcagggcggttggaacattacgctcttccattaccgcaaccacggtgcggattacgggcggattttggtcggtatcgacgtgccgccgcacgatgccgccgcatttgacggtttcttggaaagtctgggatacagctatcacgaggaaacgcaaaatgccgcgtacaagctgtttcttgcctga

SEQ ID NO: 31236 - protein, 508 aa, Neisseria gonorrhoeae FA 1090
MNTPLPYSDYLIRILTASVYDVAVETPLEPARSLSVRLKNNILLKREDLQPVFSFKIRGAYNKMSKLPKDALACGVIAASAGNHAQGVALSAQRLGCRAVIVMPETTPKIKVDAVKSRGGEVVLRGVSYNDAYDYAMELAEQEGLTYIAPFDDPDVIAGQGTVGMEIVSQHPDPIRAVFVPIGGGGLAAGVAAFIKQVRPEIKVIGVQTNDSCCMKQSVEAGEIVHLKDVGLFSDGTAVKVVGNGTFRLCKELLDEIITVDTDAVCGAVKDIFDDTRSITEPAGALALAGLKAYIAREGAENQTLIAVTSGANMNFHRLRHVSERSELGEGNEGIFAVTIPEERGSFLKFVNILGNRNITEFNYRYGGDEKAHIFVGLQAAGPQDLAVIGSRLDEAGLPNVDLTNNEIAKIHIRYMVGGRTDKVGHERLVSFEFPERPGALARFLNHMQGGWNITLFHYRNHGADYGRILVGIDVPPHDAAAFDGFLESLGYSYHEETQNAAYKLFLA

SEQ ID NO: 31237 - DNA, 1302 bp, Mesorhizobium loti MAFF303099
  CDS (1)..(1302): transl_table=11
atgacaggggggccgcgcagacatgcggcacaaggtggctttccgatgaacagtttttcctcccgcgtcgccaccgctgcggcggcgatccgccagatctttccggaaacgccgctgcaggaaaacgactatctgtcgaagaagaccggcgcgcgggtgctgctgaagcgggaggacctgtcgccggtgcgctcctacaagatccgtggcgccttcaacttcttccgcaaggcgctcggcgagggcaaccaggcagagctgttcgtctgtgcgtccgccggcaaccatgcccagggttttgccttcgtctgccgccatttcggcaaaaagggcgtggtgttcatgccggtgacaacgccgcagcagaagatcgacaagaccaggctgttcggcggtgatttcgtcgagatcaggctggtcggcgactttttcgacgactgctatcgcgccgccttcgaattcaccgaaaggtcgggtgcccacatggtgccgcccttcgaccacaaggacattatcgagggccaggcgacggtcgcctatgagatcgcggcccagatggcgggtgcgcgcatgcctgacatcgtcatgctgccggtcggcggtggcgggctcgccgccggcgtcacgcactatttcgccgatcagggccgcgaggcgcgttttgtcttctgcgagccggccggcgcgccgagcctgcacgacagcctcgcggccggaaaacggctgaagctcgccaaggtcgacaacttcgtcgacggcgcggcggtggccgaaatcggccgcgaacccttgcggtttctcaaggaattcgctgctgacaccgtgcggctgatcccggaaaaccggctctgcgccaccatgatcgagatgctcaatgtcgaaggcgtcgtgctcgagccggccggcgcattggccatcgacgcattgaaggatttttccaggaaggagatccgtggcaagaccattgtcgccgtggtctcaggcggcaatttcgatttcgagcggctgccggatgtcaaggaacgggcgctgcgcttcgaaggcctgaagaaatatttcatcatccgcttcccgcagcggccgggcgcgctgcgcgacttcctcgaaatgctgggacccgacgacgacattgcccgcttcgagtatctgaagaagtccgcgcgcaatttcggctcggtgctgatcggcatcgaaaccaaggaccgtcgcaatttcgacctgctcaaggcaaatttcgaggccgagggcgtccagtatcaggacatcaccgacaacgagacattggcgggcttcatcatatga

SEQ ID NO: 31238 - protein, 433 aa, Mesorhizobium loti MAFF303099
MTGGPRRHAAQGGFPMNSFSSRVATAAAAIRQIFPETPLQENDYLSKKTGARVLLKREDLSPVRSYKIRGAFNFFRKALGEGNQAELFVCASAGNHAQGFAFVCRHFGKKGVVFMPVTTPQQKIDKTRLFGGDFVEIRLVGDFFDDCYRAAFEFTERSGAHMVPPFDHKDIIEGQATVAYEIAAQMAGARMPDIVMLPVGGGGLAAGVTHYFADQGREARFVFCEPAGAPSLHDSLAAGKRLKLAKVDNFVDGAAVAEIGREPLRFLKEFAADTVRLIPENRLCATMIEMLNVEGVVLEPAGALAIDALKDFSRKEIRGKTIVAVVSGGNFDFERLPDVKERALRFEGLKKYFIIRFPQRPGALRDFLEMLGPDDDIARFEYLKKSARNFGSVLIGIETKDRRNFDLLKANFEAEGVQYQDITDNETLAGFII

SEQ ID NO: 31239 - DNA, 942 bp, Mesorhizobium loti MAFF303099
  CDS (1)..(942): transl_table=11
atggcgcagggcaataccgtcacacgcgaacgcattgccgcgatggaaccgcgcatccggccctatatcaggcacacgccggtgctgcacgtcgacatgaccgacttcgaccggccaccgctggctctcgacctcaaactcgaatgcctgcagcattccggctcgttcaaggcgcgcggcgccttcaccaatcttctggaaaggccggttcccaaggccggcgttgtcgccgcatcgggcggcaaccatggcgccgccgtagcctatgccgccatgcggctcggccacaaggcgaccatcttcgttcccgaagtgagcccacaggccaagctggaccgcattcgttcctatggcgccgacctggtcgtcggaggcgcccgctatgccgaggcgctgggcgccagcgaacgtttcgcgcaggaaactggcgccttgcagatccatgccttcaaccaggaggaaacgctggtcggccagggcacgctcgggctcgaaatcgagaacgacttgcctcagatcgacacgctgctggtcgccgtcggcggtggcggcctgatcggcggcatcgccgcctggtatgccggccgcatccgcatcatcgccatcgagcccgaaggcgcgccgacgctttatcgcgccttcgaggccggccatcccgtcgacgcaccggcggaaggcatcgccgccgattcgctggcgccgaagcgcgtcggcgagatgatgttcccgatcgcggaagccttcgtcgagcgctccatcctggtcagtgacgacgacatcatcgccgcgcagaaggcgttgtggaaccgggtgcgcatcatctccgaaccgggcggggctgcggccttcgccgcgatcctgtccggccgctacacgccggcacccggcgaacgcgtcgccgtgctggtctgtggcgccaacgcaaaccccgccaatttctga

SEQ ID NO: 31240 - protein, 313 aa, Mesorhizobium loti MAFF303099
MAQGNTVTRERIAAMEPRIRPYIRHTPVLHVDMTDFDRPPLALDLKLECLQHSGSFKARGAFTNLLERPVPKAGVVAASGGNHGAAVAYAAMRLGHKATIFVPEVSPQAKLDRIRSYGADLVVGGARYAEALGASERFAQETGALQIHAFNQEETLVGQGTLGLEIENDLPQIDTLLVAVGGGGLIGGIAAWYAGRIRIIAIEPEGAPTLYRAFEAGHPVDAPAEGIAADSLAPKRVGEMMFPIAEAFVERSILVSDDDIIAAQKALWNRVRIISEPGGAAAFAAILSGRYTPAPGERVAVLVCGANANPANF

SEQ ID NO: 31241 - DNA, 984 bp, Mesorhizobium loti MAFF303099
  CDS (1)..(984): transl_table=11
atgaccgccaccacccctcccggcatcgccgacatccgtgccgccgccgcccgcctctccggcctgatcgtcgaaacgccattgatcgaatcggccgagctgaacaagcgcttcggcggccgtatcctgttcaagccggagacgttgcagcgcaccggctcgttcaagttccgcggcgcctacaacaagctgtcgtcgctgagcgaggaagagcgcagccgtggcgtcgtcgccttctcctccggcaatcatgcgcaaggggttgccgcttcggccgccatgttcggcgtcaaggcggtcatcgccatgccggcggacgcgccggcgatgaagatcggcaatgtccgcaagatgggcgcggaggtggtgccgttcgaccgctttcgcgatgaccgcatgaccgtggttcgcccctatatcgacaagggcatggtgctggtgccgcccttcgacgatccggccatcattgccgggcaaggcacgatcggccttgaactgatgcggcagggcagggcgctcggcgtcagcctcgacaccgtcgtcatcccctgcgggggcggcggcctgtcgagcggcatttcggtggcggtcaaggatgcctcgccgggcacggcggtctgggcggtagagcccgagcatttcgacgacacgcgccgctcgctcgccgcaggcgcgcgggtttcgaacgagcccggccacagctcgatctgcgacgcgatcctgaccgccgagccgggcgccatcaccttcgaaatcaaccgcaggaacctcactggggccattgccgtctccgacaaggcgaccgcacaggcgatgcgcgatgccatggcctatctgaagctggtggtcgagccgggcggctgcgtggcgctggcggcgctgtcgtcgggcgagatcgaactgtccggcaaatgcgtcgccgtggtgctgtccggcggcaatgtcgatttcggcacctatgccgggatcatggcggccgcctga

SEQ ID NO: 31242 - protein, 327 aa, Mesorhizobium loti MAFF303099
MTATTPPGIADIRAAAARLSGLIVETPLIESAELNKRFGGRILFKPETLQRTGSFKFRGAYNKLSSLSEEERSRGVVAFSSGNHAQGVAASAAMFGVKAVIAMPADAPAMKIGNVRKMGAEVVPFDRFRDDRMTVVRPYIDKGMVLVPPFDDPAIIAGQGTIGLELMRQGRALGVSLDTVVIPCGGGGLSSGISVAVKDASPGTAVWAVEPEHFDDTRRSLAAGARVSNEPGHSSICDAILTAEPGAITFEINRRNLTGAIAVSDKATAQAMRDAMAYLKLVVEPGGCVALAALSSGEIELSGKCVAVVLSGGNVDFGTYAGIMAAA

SEQ ID NO: 31243 - DNA, 1059 bp, Mesorhizobium loti MAFF303099
  CDS (1)..(1059): transl_table=11
gtgtggcgacgagacgccgcgccccgaatttgggcagctgatgacgcttcctctgccgcgcgattgatgatcatgacgaccgtctcccttaacgatatccgcgccgcgcgtgagcgtattgccagcaaggtcgagtacacgccgactgttttatcctcgagcctttcggaacgtctcggtgtccccgtccatctcaagctcgagcatcgccagactaccggcagcttcaagctccgcggcgccacgaatgccgtctcttcgctgagcgcggaagaaaaggcaggcggtgtggtcgcggcctcgaccggcaaccatggccgggcgctggcacatgctgcgaagctcgaaggcatgcgcgcggtgatctgcatgtcgcggctggtgccccagaacaagctcgacgaaatccgccggctcggcgccgaggtccacatcgtcggcaacagccaggacgatgcccagcaggaggttgagcggctggtggcgcagcaggggctggtgatgctgccgcctttcgacaatcccgccatcatcgccgggcaaggcacgctcgggctggagatgatcgagcaggtcccggatgccgctctggtgcttgtgcaactctccggcggtggcctggcttccggcgtcgccacagccgtcaagggcatcaggcccgggacagaagtcatcggcgtttcgatggcgcggggtgctgcgatgaaggcgagcctcgatgccggccggcctgtcctggtggaggaactgccgacgttggcggactcgctgggtggcggcatcggcctcgacaacaggctgaccttcgccatgtgccgcgacctgctcgacgaaatcatcttgctcagcgaggacgagatcgccgcaggtatctgccatgcctatgcgcaggagcgcgagatcgtcgagggcgccggcgcggtcggcatcgcagcgcttctcgccggcaaggtcaaggcgaaagggccgatggtcgtacttctctccggccgcaacatcgacatgaatgcgcaccgccggatcatctgcggcgaggcaatcggggagcgcgccgcatga

SEQ ID NO: 31244 - protein, 352 aa, Mesorhizobium loti MAFF303099
MWRRDAAPRIWAADDASSAARLMIMTTVSLNDIRAARERIASKVEYTPTVLSSSLSERLGVPVHLKLEHRQTTGSFKLRGATNAVSSLSAEEKAGGVVAASTGNHGRALAHAAKLEGMRAVICMSRLVPQNKLDEIRRLGAEVHIVGNSQDDAQQEVERLVAQQGLVMLPPFDNPAIIAGQGTLGLEMIEQVPDAALVLVQLSGGGLASGVATAVKGIRPGTEVIGVSMARGAAMKASLDAGRPVLVEELPTLADSLGGGIGLDNRLTFAMCRDLLDEIILLSEDEIAAGICHAYAQEREIVEGAGAVGIAALLAGKVKAKGPMVVLLSGRNIDMNAHRRIICGEAIGERAA

SEQ ID NO: 31245 - DNA, 1005 bp, Mesorhizobium loti MAFF303099
  CDS (1)..(1005): transl_table=11
atgatggcagaccttctcgtcccctcgctggcccatctcaaacaggcctatgccgtcacctccagggcgacgcagatcacgccgctgctggaatcgaccgcactcgccagggagaccggtgctgcccgtgtcttcatcaagccggaatcgctgcaatgggccggatcgttcaagatccgcggcgcctattggcggttgaagcggctgtcggccgacgaagcgaggaaaggagtcgtcgcctactcctccggcaatttcgcgcaaggcctggcggcagccggccaagcgctcggcattcccgtcaccatcgtcatgccgatcgacgcacccgccgccaagcgtgacgcgacggcgggctatggcgcgcgtgtcgtgttgaccgaccatggcgagcgcgcgcgagaagaggttgccgctgccaaggcgcgcgagatcgccgagacggaagggctggccctgctgcatcccttcgacgatccggagatcgtcgccggccaggctggcgccgggctcgaagcgctcgaccagcttgaggccaaggacgccagcgccgacctgttgttctgctcggtcggcggcggcgggctgatcggcggcgtttcgctcgccttccactatctgtcgccggcgacggagatcatcggcgtcgagccggaaggcttcaatggcatgggctcgtcgctggcgcatggcagcatcgagaccatgccgatcgggccgaaatcgatttgcgacgggctgatgtcgcggcggccgggcgatgcgccgttcgcggcggtcaagaccgctggcgttcgcggaatcaccgtcgatgatcaatcggtgcggcgtgccatgcggatcgccttcgagcggatgaagctggtgctggagccgtccggggctgcgtcgctggcagcattgctcggtggcaaggtggatgtgactgataaaaccgtccttgttgtggctaccggcggcaatgtctcgctcgccgattttatggcgcatatgaaccatgcttga

SEQ ID NO: 31246 - protein, 334 aa, Mesorhizobium loti MAFF303099
MMADLLVPSLAHLKQAYAVTSRATQITPLLESTALARETGAARVFIKPESLQWAGSFKIRGAYWRLKRLSADEARKGVVAYSSGNFAQGLAAAGQALGIPVTIVMPIDAPAAKRDATAGYGARVVLTDHGERAREEVAAAKAREIAETEGLALLHPFDDPEIVAGQAGAGLEALDQLEAKDASADLLFCSVGGGGLIGGVSLAFHYLSPATEIIGVEPEGFNGMGSSLAHGSIETMPIGPKSICDGLMSRRPGDAPFAAVKTAGVRGITVDDQSVRRAMRIAFERMKLVLEPSGAASLAALLGGKVDVTDKTVLVVATGGNVSLADFMAHMNHA

SEQ ID NO: 31247 - DNA, 1221 bp, Thermoplasma volcanium GSS1
  CDS (1)..(1221): transl_table=11
atggaaaacctcgaaataccttcatttgatgagataatagaggcacagagatacctcgaaggcaaagtcaacaggactcctctcataagatcgactactatcggaaaagaatatggagcagatatttatttcaaacttgaaaattttcagaagacaggttcttttaagtcgaggggtgctatatttaggttttcaaagctatctgaagatgaaaaaaggcatggtgtaataactgccagtgcaggaaaccatgcacaaggggtagcctacgcagctatgataaacggcatagatgccaagatagttatgccagaatacacgataccgcaaaaagtaaacgcagttataagctacggggcccacgtcattttaaaaggatccgattatgatgaagcgcataggtacgcggacgagattgcaaaacaggagggtaggatcttcatagaggcattcaacgaccgttgggttatttcagggcaaggcacaataggcctggagataatggaggatttgccagatgttgatataatactcgttccggtaggtggcggcggcctcatctccggaatagcactggcagcaaagcatgcaagcaacaaggtcaaagtaataggaatagaatcagagctgtccgattctatgaaagcatcactccgggaaggaaagatagtggcacatactagcggagtcagcatatgcgacggcatctccgtcaagtatccaggagtcctcacatttgacatagcaagaaagtacgttgatgacatagtaacagtaactgaagaatatgtttctaaggctatctacaaactcttcgagagaaacaagatcgtagccgagccttcaggggcagtaggtctcgccgccataatggagggcaaggtagatgttaagggaaagaaggtcgctatagttgtttccggaggaaacataaacccgctgctcatgtcaaagataatatataaagaattggaaaaccttggccaacttgtacgcatagagtgtactataccagatcggcctgggaacctttacaggatagctatggctatagcagaaaacggcggtaatatataccatgccgaagtagataaccttaggaaggagacgccgccaggattccagtcagttacatttacggtaaatgtcagaggccaagatcacttggatcgtataataggaagcttgagggagatgggctatttatttaggataacatga

SEQ ID NO: 31248 - protein, 406 aa, Thermoplasma volcanium GSS1
MENLEIPSFDEIIEAQRYLEGKVNRTPLIRSTTIGKEYGADIYFKLENFQKTGSFKSRGAIFRFSKLSEDEKRHGVITASAGNHAQGVAYAAMINGIDAKIVMPEYTIPQKVNAVISYGAHVILKGSDYDEAHRYADEIAKQEGRIFIEAFNDRWVISGQGTIGLEIMEDLPDVDIILVPVGGGGLISGIALAAKHASNKVKVIGIESELSDSMKASLREGKIVAHTSGVSICDGISVKYPGVLTFDIARKYVDDIVTVTEEYVSKAIYKLFERNKIVAEPSGAVGLAAIMEGKVDVKGKKVAIVVSGGNINPLLMSKIIYKELENLGQLVRIECTIPDRPGNLYRIAMAIAENGGNIYHAEVDNLRKETPPGFQSVTFTVNVRGQDHLDRIIGSLREMGYLFRIT

SEQ ID NO: 31249 - DNA, 1320 bp, Pyrococcus abyssi GE5
  CDS (1)..(1320): transl_table=11
atgaagtgccctaaatgtgggcgagagtacaaagcagaaattccaccattctgtatttgtggtgaggagttagaaataacttacgactactcctctgttgatacgaggaaatggaagaatagacggcctggagtgtggcgatataaggagttattgcctaaggtaaagaagatagtaagtttgcaagaaggtggaaccccactaataaaggcaagaataagcgagcaacttaacgtagatgtttttattaaagacgagaccagaaacccaacgggatcttttagggacagacttgcaacggttgcaatttcatatggtttaccttatgcaaagaacggtttcatagtggcaagcgacgggaatgctgctgcttcggtagcagcgtattctgctagggccgagaaggaatgcttcgttgtcattccaaggaaggtagataagggaaagctaattcaaatgatagcctttggggcgaggataataaggtacggtgaaagcgttgatgatgctatagaatacgctaaagagcttgcaaagctaaacggattatacaatgtaactcctgaagagaatatagtagggctagagggccaaaagaccatagcatttgagctttgggaagaaattaacccaacccatgttatagtgccaactggaagtggaagttacctttactccatctacaaaggatttaaggagttaattgagattggagcccttgaagagatgcccaagctaatagcagttcaaacagatagatgcaatccaatagcttccgaaatattaggaattaaaggtgagtgcaaggaaactaaagctcttggtctttacgtaagggaacctcttatgaaacccaaagttatcagggccataagggaaagcagtggaacggctgttctagttagtgaagaagagatagagaaaggcgagaggttacttgcgaatgaaggaatttttgccgaattatcgtcggcggtagtcatgccagccttaattaagctcgtaaatgacggattcattgagaaaggggatagggtagttctagttgtaactggttctggattaaagacaggagaaggaggaagagagaaatttgggattggcggaactaagcttgaaattttgaagatactcaaggatggagaaaaatatgcctatgagatatggcaagccttaggaaaacccgttaagtatcaagccattcaccagcacataaaagagcttcaagagctaggactaattgaagaggcatatagaaggggaaagagaatttattataagcttactgaaaaagggattaggttagttgacaacctttaa

SEQ ID NO: 31250 - protein, 439 aa, Pyrococcus abyssi GE5
MKCPKCGREYKAEIPPFCICGEELEITYDYSSVDTRKWKNRRPGVWRYKELLPKVKKIVSLQEGGTPLIKARISEQLNVDVFIKDETRNPTGSFRDRLATVAISYGLPYAKNGFIVASDGNAAASVAAYSARAEKECFVVIPRKVDKGKLIQMIAFGARIIRYGESVDDAIEYAKELAKLNGLYNVTPEENIVGLEGQKTIAFELWEEINPTHVIVPTGSGSYLYSIYKGFKELIEIGALEEMPKLIAVQTDRCNPIASEILGIKGECKETKALGLYVREPLMKPKVIRAIRESSGTAVLVSEEEIEKGERLLANEGIFAELSSAVVMPALIKLVNDGFIEKGDRVVLVVTGSGLKTGEGGREKFGIGGTKLEILKILKDGEKYAYEIWQALGKPVKYQAIHQHIKELQELGLIEEAYRRGKRIYYKLTEKGIRLVDNL

SEQ ID NO: 31251 - DNA, 1185 bp, Pyrococcus abyssi GE5
  CDS (1)..(1185): transl_table=11
atggtattgagatgtataaggtgtggaagggagtatcccgaggatgagataaggtacaggtgtgagtgtggaggattgctggaagttgttgtagatcttgataaggtagatacaaaaatatttgatgggaataacattacgctgtggaagtacgagagctggctacctgtgaagaagattgtttctctaaatgagggaggaacccccctgtacagattaaataacttagaaaagattctcggagtgaaggagctgtatgccaagaacgagggtgcaaatccaactggttcgtttaaggatagaggaatgacggttggagtttcaaaggctcttgaactcggaatgaagagagttgcgtgtgcctcaactggaaacacctctgcatctttggctgcatatgcggctaaggctggaatagaggcatacgtccttgtgcctagtggaaagatagcacttggaaaacttgctcaagcgataatatatggggcaaaggttattccaataaagggaaatttcgatgatgcacttcgcgtggtaattgaagcaagcgaggaacttgggatatacatgttaaactcgataaatccatttagattagaaggacagaaaactatagcctatgaaatctatgatcaactacagaaggttccagataatgtagtcttgccagtgggaaacgctggaaatatctcggcgatatggaagggattcaaggagctgtatgaggctggagtcatagataagttacccagaatgataggtatacaagcagagggagcctcacctttagctaaagcatggaaagagaaaaggaaattcaagccagaaaagaatccggaaacccttgcaacggcaataaggattgggaatcctgcaaactgggagaaggcatggagagctgttgaagaatcaggaggtatgtttgagattgttagcgatgaagaaatattgaaggcccagaggatactcgcctcaaaggaaggtctcttcgttgaacccgcttcagcggcttctcttgccgggttaattaagctgttaaatgaggagaaggttgatagagatgaaagcttcgttttggtaacaaccggtcatggacttaaggatcccgacattgttcttaggaatttcaagttgcccgaacctatagaaccgacattagatgcatttaggagggtgattgaatga

SEQ ID NO: 31252 - protein, 394 aa, Pyrococcus abyssi GE5
MVLRCIRCGREYPEDEIRYRCECGGLLEVVVDLDKVDTKIFDGNNITLWKYESWLPVKKIVSLNEGGTPLYRLNNLEKILGVKELYAKNEGANPTGSFKDRGMTVGVSKALELGMKRVACASTGNTSASLAAYAAKAGIEAYVLVPSGKIALGKLAQAIIYGAKVIPIKGNFDDALRVVIEASEELGIYMLNSINPFRLEGQKTIAYEIYDQLQKVPDNVVLPVGNAGNISAIWKGFKELYEAGVIDKLPRMIGIQAEGASPLAKAWKEKRKFKPEKNPETLATAIRIGNPANWEKAWRAVEESGGMFEIVSDEEILKAQRILASKEGLFVEPASAASLAGLIKLLNEEKVDRDESFVLVTTGHGLKDPDIVLRNFKLPEPIEPTLDAFRRVIE

SEQ ID NO: 31253 - DNA, 1185 bp, Pyrococcus horikoshii OT3
  CDS (1)..(1185): transl_table=11
atggtattgagatgtgtagtttgcggaagagaataccctgaggacgaagttaggtataggtgtgattgcggaggattgctggaggtagttattgaccttgataaggttgatacctccattttcaacggtagggatataaagttatggaagtatgagagctggcttcccgtaaaaaagagggtaagcctagaggagggtggaactcccctttataggttgtcaaacctcgaaaatgagctaaaagtgaaggagctttatgcaaaaaatgaaggagcaaatccaactggttcctttaaggatcgtggaatgaccgtcggagtttcaaaggctctcgaactgggaatggataaggttatatgtgcatccacgggcaatacttcagcatcactagcagcttacgctgcaaaggcaggaataaaagcgtacgttctaatacccagcggaaagatagcattaggaaaacttgctcaggcgataatccatggagccaaggtaatcccaatcaagggaaacttcgacgatgcccttaggatagttgttgaggcaagtagagagcttgggatatacatgttgaactcgataaatccatttaggcttgaaggacagaagacaatagcatatgagatatacgatcaactagggaaagttccagacaacattatcctcccagttggaaacgctgggaacatttccgcgatatggaaggggttcaaggaaatgtatgaggctggagttatagatgagcttcccaggatgattggaattcaagctgaaggtgcctctcctttagtgaaagcttggaaggagaagaaaaagtttcaacctgaagagaacccagagactgttgcctctgcaataagaatagggaatccagcaaactggataaaggcatggaaagctgttgaagagtctggaggattgtttgaaagcgtgagtgatgaagagatactaagggcccaaaggctcctagcatctagagagggattattcgttgagcctgcctctgcagcatctttggctggcttgattaagctacttgaaagtggtgaaataagcagaaatgagagttacatcttaataacaactggacatgggttgaaggatccgaacatcgttataaagaactttcagatcccagaacctatagaaccaacattagaagcttttaaggaggtaattaaatga

SEQ ID NO: 31254 - protein, 394 aa, Pyrococcus horikoshii OT3
MVLRCVVCGREYPEDEVRYRCDCGGLLEVVIDLDKVDTSIFNGRDIKLWKYESWLPVKKRVSLEEGGTPLYRLSNLENELKVKELYAKNEGANPTGSFKDRGMTVGVSKALELGMDKVICASTGNTSASLAAYAAKAGIKAYVLIPSGKIALGKLAQAIIHGAKVIPIKGNFDDALRIVVEASRELGIYMLNSINPFRLEGQKTIAYEIYDQLGKVPDNIILPVGNAGNISAIWKGFKEMYEAGVIDELPRMIGIQAEGASPLVKAWKEKKKFQPEENPETVASAIRIGNPANWIKAWKAVEESGGLFESVSDEEILRAQRLLASREGLFVEPASAASLAGLIKLLESGEISRNESYILITTGHGLKDPNIVIKNFQIPEPIEPTLEAFKEVIK

SEQ ID NO: 31255 - DNA, 1323 bp, Pyrococcus horikoshii OT3
  CDS (1)..(1323): transl_table=11
atgaagtgcccaagatgtggtagggaatacatatcttcaatcccacctttttgtatctgtggggaagagctcgagataacttatgattattcctctgtagacgtgagaaaatggaaaagaagaaatcctggggtatggagatataaagagcttctgccagaagttaagaagatcataaccctacaagagggaggaacaccactaataaaggctaggataagcgagaaaatcaacgttgatgtttatataaaagatgaaaccagaaatccaaccggctcctttagggataggttagccacagttgcaatctcctatggtttaccttacgcatcaaatggatttatagttgcgagtgatggaaatgcagctgcttcagtcgctgcttactcggcaagagctgaaaaggagtgcttcgtagttgttcccaggaaagttgataaaggaaagctaattcaaatgatagcctttggagcgaggataatacgctatggtgacagcgttgatgaagcaatagaatatgcaagagagctttcaaaacttaacggcttatacaatgtcacacccgaggataatataatcggacttgagggtcagaagacgatagcattcgaactttgggaggaaattaatccaacgcatgtaatagtcccgacgggaagcgggagttacatatactcgatatacaaggggttcaaggaactcatcaaaattggagtgctagagaagatgccaagattaattgccgttcaaacggagagatgcaatcctatagccgctgaaattttgggattaaaaaaagaatgtaaagaaactaaagctctcggattatatgtgaagaacccggtaatgaagtctagagttataagggctataaaggaaagtggaggaacagcagttgttgtaaatgaaaacgacataattaccggggaaaagttgctagccaatgaagggatatttgcggagctttcctcggccgttgtaatgcccgccctattaagcctagttgaaaagggaataattgaaaaaggagataaagtagttttggttgttaccggttcaggactcaaaattggtgaagggggaagagagaaattctccattggtggaactaagcttgagattcttaaaatcctcgaggaaagagagatgtacgcctatgaaatttggcaagcactaggaaaacccctaaagtatcaagccgttcatcagcatataaaggaattacaagagttaggcctcataaaggaggcatatagaaaggggaagaggatatattacaagctgactgagagaggtagaaggcttattgaaaatcttgagtag

SEQ ID NO: 31256 - protein, 440 aa, Pyrococcus horikoshii OT3
MKCPRCGREYISSIPPFCICGEELEITYDYSSVDVRKWKRRNPGVWRYKELLPEVKKIITLQEGGTPLIKARISEKINVDVYIKDETRNPTGSFRDRLATVAISYGLPYASNGFIVASDGNAAASVAAYSARAEKECFVVVPRKVDKGKLIQMIAFGARIIRYGDSVDEAIEYARELSKLNGLYNVTPEDNIIGLEGQKTIAFELWEEINPTHVIVPTGSGSYIYSIYKGFKELIKIGVLEKMPRLIAVQTERCNPIAAEILGLKKECKETKALGLYVKNPVMKSRVIRAIKESGGTAVVVNENDIITGEKLLANEGIFAELSSAVVMPALLSLVEKGIIEKGDKVVLVVTGSGLKIGEGGREKFSIGGTKLEILKILEEREMYAYEIWQALGKPLKYQAVHQHIKELQELGLIKEAYRKGKRIYYKLTERGRRLIENLE

SEQ ID NO: 31257 - DNA, 1050 bp, Aeropyrum pernix K1
  CDS (1)..(1050): transl_table=11
gtgagaggacctcttttcaagctgggcagggcgctggagaagggcagtgtggagggagtggtcgccgcctcagccgggaaccatgcccagggtgttgcgtacgccgctagcttctacgggctcaagagcgttatagtcatgcccgagctggccccgccagccaaggttaaggctaccaggtcgtacggggctgaggtagtgctgcacggccgggttgtggacgaggcgtttaagctcgccgagaagatagcggaggagaggggatacatgcttgtccaccccttcgacgatcccgagataatggctggaaacgggactatagcgtgggaggcctacgagcaggggggtaagttcgacacggtgatagtgcctgtaggcgggggcggtttgatctctggtgtagtctcggttgtgcggaagctgatgcccggcgtcaaggtcataggtgttgaggcggaggctgcgcccaagttcgtagagagcttcaaggaggggaagccgatagaggttgaagtcacccatagcctggccgacgggcttgtgaccaagaagccgggtaggctcacctaccccatagtgaagcatcttgtcgacaaggttgtggctgtggacgagcatgagatagcgagcgccatgtacctcctcctcgagaggtctaagattctggctgagggtgccggagccgcgggcgtggcagcccttcttgccagggtggtgaagcccaagggtaagacccttgtaatagttagcggggggaacgcggaccttacaagcatagagaaggttatactggttggcctcgccagggagggtaggatagctaggataacgggtgtgatacccgacatcccgggccagctatacaaggttctggaggtgatagcggagaagaggtgcaatgttgtagacattatacatgacaggctccaccccaggataagccctggtatggcgagggttacaatcgtgctcgaagtgccagagcgcatgctcctcttcgagcttctagaggacctcagagacatgggttacaagttcgtcatagactga

SEQ ID NO: 31258 - protein, 349 aa, Aeropyrum pernix K1
MRGPLFKLGRALEKGSVEGVVAASAGNHAQGVAYAASFYGLKSVIVMPELAPPAKVKATRSYGAEVVLHGRVVDEAFKLAEKIAEERGYMLVHPFDDPEIMAGNGTIAWEAYEQGGKFDTVIVPVGGGGLISGVVSVVRKLMPGVKVIGVEAEAAPKFVESFKEGKPIEVEVTHSLADGLVTKKPGRLTYPIVKHLVDKVVAVDEHEIASAMYLLLERSKILAEGAGAAGVAALLARVVKPKGKTLVIVSGGNADLTSIEKVILVGLAREGRIARITGVIPDIPGQLYKVLEVIAEKRCNVVDIIHDRLHPRISPGMARVTIVLEVPERMLLFELLEDLRDMGYKFVID

SEQ ID NO: 31259 - DNA, 1182 bp, Aeropyrum pernix K1
  CDS (1)..(1182): transl_table=11
gtggcctgcggctccaaatatccgtcctcccctcgtctattcacctgccctaagtgcggggggcttctggagcccttctacattgacggaggatcgcccaggggcaggggggtgtggaggtatagggacctcctgccgaggccacgcaggatcgtgaccatgggggagggttctacgccgctggtcaagctggagaacctttctagggctatgggggttgaagtctatgggaaactcgagttcctaaaccctactggcagctttaaggataggggtatgactgttggtgtcagcatcgcctcgtccttcagctaccgacttgtagtagcggcaagcacgggtaacactgcggctagcatggcagcatacgctaggagagcagggcttaatccggttatactgattccgaaggggggtatagcctcgggcaagctctcccagatagccgcccttggggcttgggttcttgaggttgagggcagcttcgacgatgctctcgacgctgccagggccgctgcggagaaggggctcgcgtactcactcaacagcataaacccctacaggcttgaggggcagaagaccattgccttcgagattctagaggatgtggacagagtggaccatgtggtggtgcctgtgggtaatgcgggtaacatatctgcaatatggaaagggttcaaagaggccggcctcctaggccttcccagcatgaggcctaggatggtgggggtccaggctgagggcgcctcccccctgtacagggcttgggttgagaagatggactctgtggagagggttagaaacccgagcaccatagcctcggccataaggataggcaatccagtcaacgctgcgaaagccctggcagcggttagggagtcggacggtttaataatatctgtcagcgacgccgagatcctaaaggcggcggccacgctcgctgagaacgaggggatgctggtagagcctgccagtgcagccagccttgcaggcctcataaagctgaggaaccagggcatcatagcttctggctcaagcgtggtgctgatactcacaggccacggtcttaaggatcctagggccctagagtttatagcaagtagtgcgggtgtaaggagagcatatgccagcaccgccgaggaggctctactcaagctggaagagattgctgttggcggttag

SEQ ID NO: 31260 - protein, 393 aa, Aeropyrum pernix K1
MACGSKYPSSPRLFTCPKCGGLLEPFYIDGGSPRGRGVWRYRDLLPRPRRIVTMGEGSTPLVKLENLSRAMGVEVYGKLEFLNPTGSFKDRGMTVGVSIASSFSYRLVVAASTGNTAASMAAYARRAGLNPVILIPKGGIASGKLSQIAALGAWVLEVEGSFDDALDAARAAAEKGLAYSLNSINPYRLEGQKTIAFEILEDVDRVDHVVVPVGNAGNISAIWKGFKEAGLLGLPSMRPRMVGVQAEGASPLYRAWVEKMDSVERVRNPSTIASAIRIGNPVNAAKALAAVRESDGLIISVSDAEILKAAATLAENEGMLVEPASAASLAGLIKLRNQGIIASGSSVVLILTGHGLKDPRALEFIASSAGVRRAYASTAEEALLKLEEIAVGG

SEQ ID NO: 31261 - DNA, 1041 bp, Arabidopsis thaliana
  CDS (1)..(1041)
atggaagcaaatagagagaagtatgctgctgatatattgtccataaaagaagctcatgaccgtattaagccgtatatacatagaactccggtgttaacatctgaatcgttgaattcaatctccggaagaagcttgttctttaagtgtgagtgccttcagaaaggtattgaatgtcgatcgttttacttttctgtttattgtggaaaaagtggagctttcaaattccgtggagcttgcaatgctgttttgtctcttgatgctgaacaagcagccaaaggagttgtaacacacagcagtggaaaccatgctgctgcattgtctttggctgcaaagattcagggaataccggcatatattgttgtaccaaaaggtgctccaaagtgcaaagttgataatgtgatcaggtatggtggtaaggttatatggagtgaagcaacaatgtcttctagagaggaaatagcttcaaaagttttgcaggaaacaggttcagttctgatccatccatataatgatggacgcattataagtggtcagggtacaattgcattggaactgctggagcaaatccaagagattgatgctatagttgtgccgataagcgggggtggtttgatatctggtgtggcgcttgctgccaaatctattaagcctagtatccggattatagccgctgaaccaaaaggagctgatgatgcggctcagtctaaggtcgctggtaaaatcatcactttacctgtgactaatactatagctgatggccttcgagcttctcttggagatttaacctggccggtggtgagggacttggtagatgatgttgtcaccttggaagagtgtgaaataatcgaagccatgaaaatgtgctatgagatactgaaggtctctgtggaaccaagtggagctattggccttgcagcagttttatcaaacagtttccgcaacaatccttcttgtcgtgattgcaaaaacataggaattgtactctcaggaggtaatgttgatttgggctctctatgggattcatttaagagttcaaaataa

SEQ ID NO: 31262 - protein, 346 aa, Arabidopsis thaliana
MEANREKYAADILSIKEAHDRIKPYIHRTPVLTSESLNSISGRSLFFKCECLQKGIECRSFYFSVYCGKSGAFKFRGACNAVLSLDAEQAAKGVVTHSSGNHAAALSLAAKIQGIPAYIVVPKGAPKCKVDNVIRYGGKVIWSEATMSSREEIASKVLQETGSVLIHPYNDGRIISGQGTIALELLEQIQEIDAIVVPISGGGLISGVALAAKSIKPSIRIIAAEPKGADDAAQSKVAGKIITLPVTNTIADGLRASLGDLTWPVVRDLVDDVVTLEECEIIEAMKMCYEILKVSVEPSGAIGLAAVLSNSFRNNPSCRDCKNIGIVLSGGNVDLGSLWDSFKSSK

SEQ ID NO: 31263 - DNA, 1059 bp, Aquifex aeolicus VF5
  CDS (1)..(1059): transl_table=11
atgaatcggtggcaaggaataattaaacagtataaaaagtacctccccgttgacgaaaacacacccatcgtaaccctctacgaaggtaacactcctctcatagaggcggacaacctcgcaagggcgataggttttaaaggaaagatttatctgaagtacgaaggactaaatccgactggttcttttaaagatagggggatgacccttgccatttcgaaagcagtggaagcgggtaaaagagcggtgatatgtgcatccacgggaaacacctccgcttccgccgcggcttacgctgcaagggctggactcagggcttacgttctgctacccaagggtgctgtcgccataggaaagctctctcaggctatgatttacggggctaaagtcctcgccattcaaggaacttttgacgatgccctgaacatagtgagaaaaataggtgaaaattttcccgtggaaattgtgaactcggtcaacccctatagaatagaggggcaaaagacagccgcttttgagatatgcgataccttgggagaggctccagattatcactttatcccagtcgggaacgcaggaaacataaccgcctactggaagggctttaagatttattacgaggaggggaaaataacgaaactccctaggatgatgggctggcaagcggaaggtgctgctcctatagtgaagggctacccgattaaaaatccccagaccatagctacggctataaagataggaaatccctacagctggaagtctgccctgaaagccgctcaggagagtggtgggaaaatagatgcggtaagtgacagcgaaatcctttatgcttacaaactcatcgcctcaacggaaggtgttttctgcgagcctgcttctgccgcgagcgtggcagggttgataaaactcgtaagggaaggcttttttaaaggcggagaagtggtaacgtgtacacttaccggaaacggtttaaaggaccccgataccgctataaaagtttgtgaagaacctataacagtacctccggattttgacgaggtagtaaaggttctaggtttttaa

SEQ ID NO: 31264 - protein, 352 aa, Aquifex aeolicus VF5
MNRWQGIIKQYKKYLPVDENTPIVTLYEGNTPLIEADNLARAIGFKGKIYLKYEGLNPTGSFKDRGMTLAISKAVEAGKRAVICASTGNTSASAAAYAARAGLRAYVLLPKGAVAIGKLSQAMIYGAKVLAIQGTFDDALNIVRKIGENFPVEIVNSVNPYRIEGQKTAAFEICDTLGEAPDYHFIPVGNAGNITAYWKGFKIYYEEGKITKLPRMMGWQAEGAAPIVKGYPIKNPQTIATAIKIGNPYSWKSALKAAQESGGKIDAVSDSEILYAYKLIASTEGVFCEPASAASVAGLIKLVREGFFKGGEVVTCTLTGNGLKDPDTAIKVCEEPITVPPDFDEVVKVLGF

SEQ ID NO: 31265 - DNA, 1002 bp, Rickettsia prowazekii str. Madrid E
  CDS (1)..(1002): transl_table=11
atgaatttattactacaacctcctcaaaatgtagcaatagcacataatagaataaaacaatatataaatttaactccgatcattcactctgaaagcttaaatgcgatgctaggtcatgagattttttttaaggttgaatcattacaaaaaacaggagcatttaaaattagaggcgtattaaataatttgttaaaattaaaagagcaagaaaaattacctgataaaatagtttgttatagtagcggtaaccatggcattggtcttgcttattcaagtaaattatttggtattaaaacaagaatttatttaccgttaaatacttcaaaagtaaaacagcaagcagctctttattacggaggtgaagttatatacacgaatactcggcaagaagcagaatcaagagcaaaggcagatgaagaacaaggattctactatatgcacccttctgatagtgattctataatagcaggagccggtacgttatgctatgaagcattacagcaattaggttttagtcctgatgcaatttttgcttcttgcggcggtggaggtttaatttccggctcatatcttgctaaagaattaatatcacctacaagcttattaataggttcagaaccagttgcggctaatgatgcttatttatcgattaaaaataataatatatatagatttaatgactcaccaattaccattgcagatggtcttaaaactttaagtgtatcagctcgcacatttgaatatttgaaaaaacttgatcatttttatttagcagaagaatatgaaatatattactggacagcgtggcttactcatttacttaaagtaatatgtgagccatcaagtagtataaatatggcttcagtagtaagttggttaaaaacacaaaccaaaacacagaaactattagtattaatctcaggcggcaatatcgaccctactctttataatgagttatggaaaaatgattatctaactgttccaccaagcattagtaactaa

SEQ ID NO: 31266 - protein, 333 aa, Rickettsia prowazekii str. Madrid E
MNLLLQPPQNVAIAHNRIKQYINLTPIIHSESLNAMLGHEIFFKVESLQKTGAFKIRGVLNNLLKLKEQEKLPDKIVCYSSGNHGIGLAYSSKLFGIKTRIYLPLNTSKVKQQAALYYGGEVIYTNTRQEAESRAKADEEQGFYYMHPSDSDSIIAGAGTLCYEALQQLGFSPDAIFASCGGGGLISGSYLAKELISPTSLLIGSEPVAANDAYLSIKNNNIYRFNDSPITIADGLKTLSVSARTFEYLKKLDHFYLAEEYEIYYWTAWLTHLLKVICEPSSSINMASVVSWLKTQTKTQKLLVLISGGNIDPTLYNELWKNDYLTVPPSISN

SEQ ID NO: 31267 - DNA, 1206 bp, Thermotoga maritima MSB8
  CDS (1)..(1206): transl_table=11
gtgatcacactcgaggatataaaagaagcccaaagaacattgaagaatgtggtgcacaggacagctcttgcttacagctctgttctgagcgaggtaaccggtggagagatctacctgaagatggaaaatctccagaagaccggttcgttcaaaataaggggagcgtacaacaaaatagctcacctgagcgaagaagaaagaaagagaggagtcgttgccgcgtccgctggaaaccacgcgcagggagtggcacttgctgctcaaatcttcggtattcccgctaccattgtgatgccgaggtacgcccctctttctaaaatcaccaaaacgaggaatcttggagctcaggtgattcttgaggggaacattttcgacgaggcctacgaggcggctctcagaatacaggagaaaacaggtgcggtttttgtgcatcccttcaatgatcctcatgtcatcgccgggcagggaactatagggctggaaataatggaagatcttccggatgtggaagtggtggtggtgcccgttggtggaggtggtttgatttcgggagtatccgttgcgatcaaatcgatgaatcctgaggttaaagtaataggcgttcaaacggagaacatgccttccatgatcgcttcactgagaaggggcagggcagagcgggtcgaaggtaaacccacacttgccgatggaatagccgtgaaaaagcccggtgacctgaccttcgagctggtgaagaagtatgtcgatgagatggtcgcggtgaacgaagaagaaatagcggatgctatccttttccttcttgagcaggcaaaggtggttgctgaaggtgcaggagcggtgggtgtagccgctgttttgaacaaactggatgtgaagggaaagaaggtagcgatcgtgataagcggtggtaacatagatgtgaacatgatagacagaatcataaacaaagggctcgtgaagagcggaaggaaggtgttcatagaaacgttcgtgatggacagacccggtgccctgaaagagcttctcgggatagtggcggaactcggcgcaaacgttctttccgtttttcacaatcgctccgcaaaggaagttcccattggttttgccaaaatagagctcgagcttgaaacggtcgatgaaaaacacgtcgaagagatagagagggtgttgatcgcaaagggatacgaggtgaggatagtcgggtga

SEQ ID NO: 31268 - protein, 401 aa, Thermotoga maritima MSB8
MITLEDIKEAQRTLKNVVHRTALAYSSVLSEVTGGEIYLKMENLQKTGSFKIRGAYNKIAHLSEEERKRGVVAASAGNHAQGVALAAQIFGIPATIVMPRYAPLSKITKTRNLGAQVILEGNIFDEAYEAALRIQEKTGAVFVHPFNDPHVIAGQGTIGLEIMEDLPDVEVVVVPVGGGGLISGVSVAIKSMNPEVKVIGVQTENMPSMIASLRRGRAERVEGKPTLADGIAVKKPGDLTFELVKKYVDEMVAVNEEEIADAILFLLEQAKVVAEGAGAVGVAAVLNKLDVKGKKVAIVISGGNIDVNMIDRIINKGLVKSGRKVFIETFVMDRPGALKELLGIVAELGANVLSVFHNRSAKEVPIGFAKIELELETVDEKHVEEIERVLIAKGYEVRIVG

SEQ ID NO: 31269 - DNA, 1515 bp, Pseudomonas aeruginosa PAO1
  CDS (1)..(1515): transl_table=11
atgctcgaacaatacgtcaagaagatcctcacctcgcgcgtctacgacgtcgcggtggaaacgcccctgcaacccgcccgccagttgtccgaacgcctcggcaaccaggtcctgctcaagcgcgaggacctgcagccggtgttttccttcaagatccgcggcgcctacaacaaggtcgcgcagctcaccgaggaggagaaggcccgcggggtgatcgccgcctcggccggcaaccacgcccagggcctggccctggcggccaagcggcaggggatcagggcggtcatcgtgatgcccaagaccacccccgagatcaaggtccaggcggtgcgcgcccacggcgccaaggcggtgctgcacggcgacgccttccccgaggcgctggcccacgcgctgaagctggtcgacgagaagggctacaccttcgtccatccctacgacgatccggacaccatcgccggccagggcaccgtggccatggagattctccgccagcagcccggccgcctcgatgcgatcttcgtcccggtgggcggtggcggactggtcgccggcatcgccgcctacgtcaagtacctgcgtccggagatcaaggtgatcggcgtcgagccggacgagtcgaactgcctgcaggcggccatggccgccggcgagcgggtggtgctgggccaggtcgggctgttcgccgacggcgtggcggtggcgcagatcggccagcacaccttcgacatctgcaaggaccacgtcgacgaagtgatcaccgtcagcactgacgagatctgtgcggcgatcaaggacatctacgacgacacccgctcgatcaccgagccggccggcgcgctggcggtggccgggatcaagaagtacgtcgagcgcgagcgcgccgaggggcagaccctggtggcgatcgactccggcgccaacgtcaacttcgatcgcctgcggcatgtcgccgaacgcgccgaactgggcgagcgccgcgaagcgatcatcgcggtgaccattcccgagcggccgggcagcttcaaggccttctgcgaggcggtcggcaagcgccagatcaccgagttcaactatcgctaccacagcggcagcgaggcgcacatcttcgtcggcgtgcagacccacccggagaacgacccgcgcgaggcgctggtggcctatctgcgcgagaagggcttcccggtcctcgacctgaccgacaacgaactggccaagctgcacatccgccacatggttggcggccatgcggtgaaagtcagcgacgagatggtgttccgcttcgaattccccgagcggcccggcgcgctgttcaacttcctcaccaagctcggcgggcgctggaacatctcgatgttccactaccgtaaccatggtgcggccgacggccgggtggtggccgggttgcaggtgccggaagacgagcgccacctgatcccgcagaccctggaggcgatcggctatccgtactgggacgagaccgccaacccggcctaccagctgttcctcggctga

SEQ ID NO: 31270 - protein, 504 aa, Pseudomonas aeruginosa PAO1
MLEQYVKKILTSRVYDVAVETPLQPARQLSERLGNQVLLKREDLQPVFSFKIRGAYNKVAQLTEEEKARGVIAASAGNHAQGLALAAKRQGIRAVIVMPKTTPEIKVQAVRAHGAKAVLHGDAFPEALAHALKLVDEKGYTFVHPYDDPDTIAGQGTVAMEILRQQPGRLDAIFVPVGGGGLVAGIAAYVKYLRPEIKVIGVEPDESNCLQAAMAAGERVVLGQVGLFADGVAVAQIGQHTFDICKDHVDEVITVSTDEICAAIKDIYDDTRSITEPAGALAVAGIKKYVERERAEGQTLVAIDSGANVNFDRLRHVAERAELGERREAIIAVTIPERPGSFKAFCEAVGKRQITEFNYRYHSGSEAHIFVGVQTHPENDPREALVAYLREKGFPVLDLTDNELAKLHIRHMVGGHAVKVSDEMVFRFEFPERPGALFNFLTKLGGRWNISMFHYRNHGAADGRVVAGLQVPEDERHLIPQTLEAIGYPYWDETANPAYQLFLG

SEQ ID NO: 31271 - DNA, 963 bp, Pseudomonas aeruginosa PAO1
  CDS (1)..(963): transl_table=11
atgcctttttctctcgccgccctccaacaggccgccgccatcgtccaccagagcctgccgccgacgccgcagatacgctggccgctgctatgcgaggcactgggttgcgaagtgtggatgaagcacgagaaccacctgccggtgggggccttcaaactgcgcggcggcctggtgtatttccaccacctggcgcaccagggcgagcggccggccgccgtgatcagcgcgacccgcggcaaccacggccagtcggtggccttctcggcgagccgctacggcatccagccgatcatcgtcgtgccgcacggcaacagccgcgagaagaacgcggcgatgcgcagccttggcgcggagctgattgagcacggcgaggacttccaggcctcccgcgaatacgccgccgagcgcgcccggcgcgaaggcctgcacctgattccggcgttccatccctggctggtggccggggtcgccagctacagcctggagttgttcgccgcgctggccgaccttgacgaagtctacgtgccgatcggtatgggttcgggcatctgcggtctgatcgccgcgcgcgacgcgctgggcctgaagacccgcatcgtcggcgtggtgtccgcccatgcgccggcctacgccctgtcgttcgaggccggcacggcgatcagccacccggtcgacacccgcctggccgacggcatggcgtgcagtacgccggacccgagcgcgctggaaatgatcctggccggcgccgatcgcctggtgcgggtcagcgacagggagatcggcgcggccatgcgcctgtgcttcaccagcacccacaacgtcgccgagggcgccggggtggcggcgctggccgccgcctggcaggagcgcgagcgcctgaaggggctgaaggtaggcctgatcctcagcggagcgaacgtcgaccgcgaggtattcgccgagcaactggccgccggcgactga

SEQ ID NO: 31272 - protein, 320 aa, Pseudomonas aeruginosa PAO1
MPFSLAALQQAAAIVHQSLPPTPQIRWPLLCEALGCEVWMKHENHLPVGAFKLRGGLVYFHHLAHQGERPAAVISATRGNHGQSVAFSASRYGIQPIIVVPHGNSREKNAAMRSLGAELIEHGEDFQASREYAAERARREGLHLIPAFHPWLVAGVASYSLELFAALADLDEVYVPIGMGSGICGLIAARDALGLKTRIVGVVSAHAPAYALSFEAGTAISHPVDTRLADGMACSTPDPSALEMILAGADRLVRVSDREIGAAMRLCFTSTHNVAEGAGVAALAAAWQERERLKGLKVGLILSGANVDREVFAEQLAAGD

SEQ ID NO: 31273 - DNA, 1548 bp, Pseudomonas aeruginosa PAO1
  CDS (1)..(1548): transl_table=11
atgagcgcctcgaccctcagcgcaagcaaacccctgctggccggctacgtggaaagcatcctggccgcgccggtgtacgacgtcgccgtggaaacccccttgcaggtcgcgccgcagttgtcccagcgcctgggcaaccgggtgctgctcaagcgcgaggacctgcagccggtgttctccttcaagatccgcggcgcctacacccgtgtcgcgcgcctgagcgacgagcagaaggcccgcggggtgatcaccgcctccgccggcaaccatgcccagggcctggccctggcggcgcagcgcctgggcgtgcgggcggtgatcgtgatgccgcgcaccactcccgaactcaaggtcaagggcgtgctggcacgcggcggcgaggcgttgctgcacggcgacgccttccccgatgcgctggcccatgccctgcaactggccgagcgcgaaggcatgaccttcgtcccaccctacgacgatccggacgtgatcgccggacagggcacggtggcgatggagatcctccgccagcacagcggccgcctcgacgcgatcttcgtgccggtcggcggcggcagcctgatcgccgggatcgccgcctacgtcaagcacctgcgtccggatattcgcgtgatcggcgtcgagccggaggattccaactgcctgcaggcggcgctggccgccggcgaacgggtggtgctgggccaggtcgggctgttcgccgacggggtggcggtggcgcagatcggcgcttgcaacttcgaggtctgcaaggaccatgtcgacgaggtgatcaccgtcggcagcgacgaaatctgcgcggcgatcaaggacatctacgacgacacccgttcgatcaccgagccggccggcgccctggccgtagcggggatcaagaagtacgtggcccgcgaacgcaccgaggggcagaccctggtggccatcgactccggtgccaacatcaacttcgaccgcctgcgccacgttgccgagcgcgccgaactgggcgaacagcgcgaagcgatcatcgccgtcaccgtggccgagcggccgggcagcttcaaggccttctgcgcggcgctgggccggcgccagatcaccgagttcaactaccgctaccacagcgaccgccaggcccacctgttcgtcggcgtgcagacccatccgctcaccgacagccgcgccgacctgctcgccggcctgcgcgagcagggcttcccggtactcgacctgaccgacaacgagatggccaagctgcacatccgccacatggtcggcggccacggtaccgaggtgcgccgcgagcggctgttccgcttcgagtttcccgaacgccccggggccttgctgaacttcctcgacaagctcggctcgcgctggaacatcagcctgttccactaccgcaaccacggcgccgccgacggtcgggtgctggccggattgcaggtgccggacgaggagcgcggcgagctggaggcggcgttgcaagccatcggctatccgtactgggaggaaacccacaacccggcctaccggctgttcgccggttga

SEQ ID NO: 31274 - protein, 515 aa, Pseudomonas aeruginosa PAO1
MSASTLSASKPLLAGYVESILAAPVYDVAVETPLQVAPQLSQRLGNRVLLKREDLQPVFSFKIRGAYTRVARLSDEQKARGVITASAGNHAQGLALAAQRLGVRAVIVMPRTTPELKVKGVLARGGEALLHGDAFPDALAHALQLAEREGMTFVPPYDDPDVIAGQGTVAMEILRQHSGRLDAIFVPVGGGSLIAGIAAYVKHLRPDIRVIGVEPEDSNCLQAALAAGERVVLGQVGLFADGVAVAQIGACNFEVCKDHVDEVITVGSDEICAAIKDIYDDTRSITEPAGALAVAGIKKYVARERTEGQTLVAIDSGANINFDRLRHVAERAELGEQREAIIAVTVAERPGSFKAFCAALGRRQITEFNYRYHSDRQAHLFVGVQTHPLTDSRADLLAGLREQGFPVLDLTDNEMAKLHIRHMVGGHGTEVRRERLFRFEFPERPGALLNFLDKLGSRWNISLFHYRNHGAADGRVLAGLQVPDEERGELEAALQAIGYPYWEETHNPAYRLFAG

SEQ ID NO: 31275 - DNA, 1527 bp, Neisseria meningitidis MC58
  CDS (1)..(1527): transl_table=11
atgaacacgccccttccttattccgattacctcatccgcatcctgacggcatctgtctatgatgtggcggtcgaaacgcctttggaaccggcacgcagcctttctgtacgtttgaaaaacaacatccttttgaaacgcgaagatttgcagccggttttttcgttcaaaatacgcggcgcgtacaacaaaatgtccaagttgccgaaagatgcgctcgcttgcggcgtgattgcggcaagcgcgggcaatcatgctcaaggcgtggcattgtccgcacagcgtttgggctgccgtgccgttatcgttatgccggagactacgccgaaaatcaaagtggatgcggttaaaagccatggcggcgaggtggttttgcggggcgtttcatacaacgatgcctacgattatgcgatggagttggcggaaaaagaagggttaacctatatcgcgccgtttgatgatcctgatgtgattgcgggacaggggacggtggggatggaaattgtcagccagcatcccgatccaatccgcgccgtattcgtaccgataggcggtggcggtttggcggcgggcgtggcggcatttatcaagcaggtccgtcccgaaatcaaagttatcggcgttcagaccaacgattcctgctgtatgaagcagtcggtcgaagcgggtgaaatcgtccatttgaaagatgtcgggctgttttcagacggcactgcggtcaaagtcgtcggaaacgaaaccttccgcctctgcaaagaacttttggatgaaatcattacagtcgataccgatgcggtttgcggcgcggtcaaggatattttcgatgacacgcgcagcattaccgagccggcgggcgcgttggcgttggcgggtctgaaagcctatatcgcccgagaaggcgcggaaaaccaaaccctgattgccgttaccagcggtgcgaatatgaattttcaccgtttgcgccacgtttcggaacggagcgaattgggcgagggcaacgaaggtatttttgccgttaccatccctgaagaacgcggcagcttccttaagtttgtcaatatattgggaaataggaatattaccgagttcaactaccgctacggagacgatgaaaaagcgcatatctttgtcggacttcaagcggcaggcccgcaggatttggcggttatcggcagccggttggatgaggcgggattgcccaatgtcgatttgaccaacaatgagattgccaaaatccatatccgctatatggtcggagggcggacggacaaagtagaaaacgagcgtttggtcagttttgagtttccggagcgtccgggggcattggcacgctttttgaaccatatgcagggagggtggaatattacgcttttccattaccgcaaccacggtgcggattacgggcggattttggtcggtatcgatgtgccgccgcacgatgccgccgcatttgacggtttcttggaaagtctgggatacagctatcacgaggaaacgcaaaatgccgcgtacaagctgtttcttgcctga

SEQ ID NO: 31276 - protein, 508 aa, Neisseria meningitidis MC58
MNTPLPYSDYLIRILTASVYDVAVETPLEPARSLSVRLKNNILLKREDLQPVFSFKIRGAYNKMSKLPKDALACGVIAASAGNHAQGVALSAQRLGCRAVIVMPETTPKIKVDAVKSHGGEVVLRGVSYNDAYDYAMELAEKEGLTYIAPFDDPDVIAGQGTVGMEIVSQHPDPIRAVFVPIGGGGLAAGVAAFIKQVRPEIKVIGVQTNDSCCMKQSVEAGEIVHLKDVGLFSDGTAVKVVGNETFRLCKELLDEIITVDTDAVCGAVKDIFDDTRSITEPAGALALAGLKAYIAREGAENQTLIAVTSGANMNFHRLRHVSERSELGEGNEGIFAVTIPEERGSFLKFVNILGNRNITEFNYRYGDDEKAHIFVGLQAAGPQDLAVIGSRLDEAGLPNVDLTNNEIAKIHIRYMVGGRTDKVENERLVSFEFPERPGALARFLNHMQGGWNITLFHYRNHGADYGRILVGIDVPPHDAAAFDGFLESLGYSYHEETQNAAYKLFLA

SEQ ID NO: 31277 - DNA, 1221 bp, Methanothermobacter thermautotrophicus str. Delta H
  CDS (1)..(1221): transl_table=11
atggatggtgaatctgtgataaggtgcatatcatgtggtcgagagtatgacctggaggagatcatatacacctgcagggagtgcgggtcggtacttgaagttgaatgtgacgtggaggtctcaagggacgtcttcaggggcagaaggcagaacatgtggaggtacagggagttcatgcctgttgacccctcaaggatagtcagcctcgatgaggggggaacaccctttgtcaggtgtgacaccataggatctgaacttggtattgagctctatgtgaaggtggagggctccaaccccacagggagcttcaaggacagggggatgagcgtggggatcacaaaggcccttgaacttggcgttgatactgtggggtgcgcctcaaccggtaacacctcagcctcccttgcagcctacgcagccagggctgggctgggctgcgtcgttctactcccatcaggtaaggtcgccctcggtaaacttgcccaggctatgttccatggcgccagggtcctctcggtgaggggaaactttgacgaggcccttgaggctgtcacggaacttgcactgatgggtgaactctacctcctcaactccgtgaaccccttcaggcttgagggtcagaagtcaataggctttgagatagtggatgacctcggctgggagtcccctgaccgcatcatactgcctgtggggaatgcaggtaatatctcagccatctggaagggtatatcagagttttacagggctggattcatagatgagaggccgatgatgaccggtatacaggccgagggcgcttcaccggtggtagaagccttcaggaagggcagaaccgagattgaaccggtcagggatcctgaaacggttgcaacggccataaggataggggcccctgttagctatctcaaggccctccgggccatatatgagtcagatggttatgctgaatccgtgaccgatgaggagatactctctgcccagaaactccttgcaaggagggagggtataggtgttgagcccgcatcagcggcgtccatagcgggtctcatcaaactcgttgatgagggtgttgttgacaggggtgaacgtgtggtctgtgttgtcactggtcatgtactcaaggaccctgacaccgccataaaggcatcaacggaaccagttgaggtagaacctgatataaaccagttaagatccattataaggggtacggggtcctcctag

SEQ ID NO: 31278 - protein, 406 aa, Methanothermobacter thermautotrophicus str. Delta H
MDGESVIRCISCGREYDLEEIIYTCRECGSVLEVECDVEVSRDVFRGRRQNMWRYREFMPVDPSRIVSLDEGGTPFVRCDTIGSELGIELYVKVEGSNPTGSFKDRGMSVGITKALELGVDTVGCASTGNTSASLAAYAARAGLGCVVLLPSGKVALGKLAQAMFHGARVLSVRGNFDEALEAVTELALMGELYLLNSVNPFRLEGQKSIGFEIVDDLGWESPDRIILPVGNAGNISAIWKGISEFYRAGFIDERPMMTGIQAEGASPVVEAFRKGRTEIEPVRDPETVATAIRIGAPVSYLKALRAIYESDGYAESVTDEEILSAQKLLARREGIGVEPASAASIAGLIKLVDEGVVDRGERVVCVVTGHVLKDPDTAIKASTEPVEVEPDINQLRSIIRGTGSS

SEQ ID NO: 31279 - DNA, 1488 bp, Halobacterium salinarum NRC-1
  CDS (1)..(1488): transl_table=11
atgctttctcggtgtcctgtgctgcgtagaccgatccctcacggcacgatcgaccacctgattcgcagtcgcgactgcggaactggcacacgcgtgccccgtctaaccaagcccccactcgcagtttcactttcactccgcttcgatcggttttatgttcgtgggcgtcctaccgatagttgtcacacgctccgttctcgcgttcttcggcgctcaccaccaacggttaaacccggaccacgcataccagcgagtatgctctcgctgtccgacattcgggacgcccgcgagcgcgtctccgaaaccgcccgccacacaccgcttgagtactcgcatacgttctccgatctcaccggcgcggacgtccgcccgaagctggagtgtttccagcgcaccggctcgttcaagatccgtggcgcgaccaaccgcatccgcacgctctccgccgaccagcaggacgccggcgtggtcactgcgtcggccggcaaccacgcccagggcgtcgcgctcgcggcctcccggtcgggcgtcgactcgaaggtggtgatgccggagtccgcgcccatctcgaagatcaaggccaccaagagctacggcgccgaagtcgtcctccacggcgccgactacgacgacgcacaggcccacgcccacgaactcgaagccgccgaaggccgcacgtacgtccacgccttcgacgacgagtacatcatggccggccagggcaccctgggcctcgaaatcgccgcggactgtccgacggttgacaccgtcgttgtccccatcggtggcggtggcctcatctccggcgtcgccaccgcgctcaagggggaactcgacgacgtgcgcgtcatcggcgtgcaggccgagggggcctcgacggtcgcgcggtccctcgacaagggccagccacaggccgtcgatcacgtcgacaccatcgccgacggtatcgccgtccgacaggtcggggcgcagacgttccccgtcatccaggagcacgtcgacgaggtcgtcaccgtctccgacgacgagatcgccaccgcgctcgtgttgctgctggagcgcgggaaaaccctcgttgagggtgccggcgccaccgcgctcgcggccgtcctggaggacaaattcgagtacgcggacggcgaaaccatcgtgcccgcgctctgcggtggcaacatcgacctcaacctcctcaccacggtgatcgttcgcgggctcgtcgaccagggccgctacgtcaagatccgcaccgtgctcaaggacagcccgggcagcctcaacgacctgctggcgaccgccgccgaggagcgcgcgaacatctacgccatccagcacgaccgcaccaaccgcgacatcgcgatgaacgccaccgaggtcgaactcgacctcgaaacgcgaggccccgaacacgtcgaccggctgctcacccggatccaggacgagggcttcgacgtcacggtgctcaacggcccccagatcgtcagcgagtga

SEQ ID NO: 31280 - protein, 495 aa, Halobacterium salinarum NRC-1
MLSRCPVLRRPIPHGTIDHLIRSRDCGTGTRVPRLTKPPLAVSLSLRFDRFYVRGRPTDSCHTLRSRVLRRSPPTVKPGPRIPASMLSLSDIRDARERVSETARHTPLEYSHTFSDLTGADVRPKLECFQRTGSFKIRGATNRIRTLSADQQDAGVVTASAGNHAQGVALAASRSGVDSKVVMPESAPISKIKATKSYGAEVVLHGADYDDAQAHAHELEAAEGRTYVHAFDDEYIMAGQGTLGLEIAADCPTVDTVVVPIGGGGLISGVATALKGELDDVRVIGVQAEGASTVARSLDKGQPQAVDHVDTIADGIAVRQVGAQTFPVIQEHVDEVVTVSDDEIATALVLLLERGKTLVEGAGATALAAVLEDKFEYADGETIVPALCGGNIDLNLLTTVIVRGLVDQGRYVKIRTVLKDSPGSLNDLLATAAEERANIYAIQHDRTNRDIAMNATEVELDLETRGPEHVDRLLTRIQDEGFDVTVLNGPQIVSE

SEQ ID NO: 31281 - DNA, 1527 bp, Neisseria meningitidis Z2491
  CDS (1)..(1527): transl_table=11
atgaacacgccccttccttattccaattacctcatccgcatcctgacggcatctgtctatgatgtggcggtcgaaacgcctttggaaccggcacgcagcctttctgtacgtttgaaaaacaacatccttttgaaacgcgaagatttgcagccggttttttcgttcaaaatacgcggcgcgtacaacaaaatgtccaagttgccgaaagatgcgctcgcttgcggcgtgattgcggcaagcgcgggcaatcacgcacaaggcgtggcattgtccgcacagcgtttgggttgccgtgccgttatcgtcatgccggagactacgccgaaaatcaaagtggatgcggtcaaaagccgtggcggcgaggtggttttgcgcggtgtttcatacaacgatgcttacgattatgcgatggagctggcggaacaggaagggctgacctatatcgcaccgtttgacgatcctgatgtgattgcaggacaagggacggtagggatggaaattgtcagccagcatcccgatccaatccgcgccgtattcgtaccgataggcggtggcggtttggcggcgggcgtggcggcatttatcaagcaggtccgtcccgaaatcaaagttatcggcgttcagaccaacgattcctgctgtatgaagcagtcggtcgaagcgggtgaaatcgtccatttgaaagatgtcgggctgttttcagacggcacggcggtcaaagtcgtcggaaacgaaaccttccgtctctgcaaagaacttttggatgaaatcattacagtcgataccgatgcggtttgcggcgcggtcaaggatattttcgatgacacgcgcagcattaccgagccggcgggcgcgttggcgttggcgggtctgaaagcctatatcgcccgagaaggcgcggaaaaccaaaccctgattgccgttaccagcggtgcgaatatgaattttcaccgtttgcgccacgtttcggaacggagcgaattgggcgagggcaacgaaggtatttttgccgttaccatccctgaagaacgcggcagcttccttaagtttgtcaatatattgggaaataggaatattaccgagttcaactaccgctacggggacgatgaaaaagcgcatatctttgtcggacttcaagcggcaggcccgcaggatttggcggttatcggcagccggttggatgaggcgggattgcccaatgtcgacctgaccgatgatgagattgccaaaatccatatccgctatatggtcggagggcggacggacaaagtagaaaacgagcgtctggtcagttttgagtttccggagcgtccgggggcgttggcgcgttttttgaaccatatgcagggcggttggaacattacgctcttccattaccgcaaccacggtgcggattacgggcggattttggtcggtatcgatgtgccgcctcacgatgccgccgcatttgacggtttcttggaaagtctgggatacagctatcacgaggaaacgcaaaatgccgcgtacaagctgtttcttgcctga

SEQ ID NO: 31282 - protein, 508 aa, Neisseria meningitidis Z2491
MNTPLPYSNYLIRILTASVYDVAVETPLEPARSLSVRLKNNILLKREDLQPVFSFKIRGAYNKMSKLPKDALACGVIAASAGNHAQGVALSAQRLGCRAVIVMPETTPKIKVDAVKSRGGEVVLRGVSYNDAYDYAMELAEQEGLTYIAPFDDPDVIAGQGTVGMEIVSQHPDPIRAVFVPIGGGGLAAGVAAFIKQVRPEIKVIGVQTNDSCCMKQSVEAGEIVHLKDVGLFSDGTAVKVVGNETFRLCKELLDEIITVDTDAVCGAVKDIFDDTRSITEPAGALALAGLKAYIAREGAENQTLIAVTSGANMNFHRLRHVSERSELGEGNEGIFAVTIPEERGSFLKFVNILGNRNITEFNYRYGDDEKAHIFVGLQAAGPQDLAVIGSRLDEAGLPNVDLTDDEIAKIHIRYMVGGRTDKVENERLVSFEFPERPGALARFLNHMQGGWNITLFHYRNHGADYGRILVGIDVPPHDAAAFDGFLESLGYSYHEETQNAAYKLFLA

SEQ ID NO: 31283 - DNA, 1707 bp, Deinococcus radiodurans R1
  CDS (1)..(1707): transl_table=11
ttgccccccggcctattctcggcacaagacagcggcgctccgacgcctgacgcgggccgcttcctgggccagccctcctcccccgctgctggcgggggctgcgacttttgcccgtatgttctcctttctttgccgaggtttttcatgtcagacccccgccctgcccccgcccccgctcccttgcccggtacgctggacgggatggacgtgctgcggctcgcgctgaccagtcaggtctacggcgcggccaccgagacgccgctgagccccgccccgcgcctgagcgagcgcagcggcaaccgcgtgctgctcaagcgcgaggaccagcagcccattttctccttcaaattgcgcggcgcctataacaagatgagccagctcagcgccgaggaacgcgcccggggcgtgatttgcgcttcggcaggcaaccacgcacagggagtggcgtttgccggggagaagctcgggattcccgccgtcatcgtgatgcccgcgaccacgcccgacatcaaggtgcaggcgtgccgggcacggggggccgaggtgatcttgcacggcgactcgttcagcgacgccgaaaccttcgcactggcgctgcaacaggagcgcggcctgaccttcgtgcatccctacgacgacccgctggtgctggcggggcagggcaccatcgcgctcgaactgctgcggcaggtggaagaggacgactacgcggtgttcgtgccggtgggcggcggcggcctgatcgcgggggtggcgagcattctgaaagccctcaagcccggcgtgcgggtcatcggcgtggagcccgacgacagcgacgcgatgtaccagagcctgcaagcgggcgaacgggtgcggctcgacaccgtgggcattttcgtggacggggtggcggtcaagcaggtgggggcctacaccttcgacctgacccggcgttacgtggacgactgggtgcgggtgaacaccgacgaggtgtgcgccgccatcaaggacgtgttcgacgacacccgcgccgtgctggaacccgctggggcgctgagcgtggccgggctgaagaaatacgcggcgacccacggcctgcatgaccggacgctggtggcgctcacctgcggggcgaacatcaacttcgaccgcctgcgccacgtggccgagcgcaccgagataggcgagcagcgtgaggcgattctggccgtcacgattcccgagcggcccggcgcctttctggaatttatcgagctgatcggctcgcgggccatcaccgaattcaactaccgctacgctccgcgcgaagacgcccggatttttgtcggcgtgcagctcgggcagccgggcgagcgccaggaactgctgacgctgctgcgtgggcgcggctacgcggtgcttgacctcaccgaagacgaactcgccaaggtccacgtccgccacatggtcggtggccgcgcccccgaggcggtgaacgagcgggtctacgccttcaccttccccgagcggcccggcgccctgcacgactttttgacgcagctccagggcgagtggaacatcagcctctttcactaccgcaaccacggctcggcgcacgggcgggtgctggcgggcgtgcaggtgcctgacgcggcgctcacccgcttcggtgactttctcgctggcctcggctacccggcgcacgacgtgacgagcaatccggcgtaccggctgttcctgacctga

SEQ ID NO: 31284 - protein, 568 aa, Deinococcus radiodurans R1
MPPGLFSAQDSGAPTPDAGRFLGQPSSPAAGGGCDFCPYVLLSLPRFFMSDPRPAPAPAPLPGTLDGMDVLRLALTSQVYGAATETPLSPAPRLSERSGNRVLLKREDQQPIFSFKLRGAYNKMSQLSAEERARGVICASAGNHAQGVAFAGEKLGIPAVIVMPATTPDIKVQACRARGAEVILHGDSFSDAETFALALQQERGLTFVHPYDDPLVLAGQGTIALELLRQVEEDDYAVFVPVGGGGLIAGVASILKALKPGVRVIGVEPDDSDAMYQSLQAGERVRLDTVGIFVDGVAVKQVGAYTFDLTRRYVDDWVRVNTDEVCAAIKDVFDDTRAVLEPAGALSVAGLKKYAATHGLHDRTLVALTCGANINFDRLRHVAERTEIGEQREAILAVTIPERPGAFLEFIELIGSRAITEFNYRYAPREDARIFVGVQLGQPGERQELLTLLRGRGYAVLDLTEDELAKVHVRHMVGGRAPEAVNERVYAFTFPERPGALHDFLTQLQGEWNISLFHYRNHGSAHGRVLAGVQVPDAALTRFGDFLAGLGYPAHDVTSNPAYRLFLT

SEQ ID NO: 31285 - DNA, 1143 bp, Xylella fastidiosa 9a5c
  CDS (1)..(1143): transl_table=11
gtgcaatactgccgctggattttcttagcaggcacgagtcagcatggcatgccatcaggatgtgtgcagatcatcaggacgtatagctctatggatatacctgatgtaggtcacaccgttgtcaagcaacccaatgcaagtaacgtcaacaccgtgagtgtggccgatgtgttggctgcacaagcccgcttacgtcgttatctaatgcctaccccaattcactatgccgagcgtttcggagtgatgctgaagttggaaaatctgcaacgcaccggatcctataaagtgcgtggcgcgctgaacgcaatgttagttgcgctggaacgcggcgataaccgcccagtcatttgcgcatcagccggtaaccacgcccaaggcgtagcttggtcagcttaccggctgggtatacaagcaatcactgtcatgcctcacggtgctccggtcacgaaggttgcaggtgtctcacattggggggcgacggtacgccaacacggccaaagctatgacgaggcctatgcgttcgcatgtgagttggctgagcaaaacgattaccactttctatcagcattcgatgatccggatgtgattgccggtcagggaactgttggcatagagatcaccgcgcatgaaccggatgtagtcatcgtgccgatcggcggcggcggccttgcttcaggcattgctttggtgctgcgctcgcagggagtacgtgtcattggcgctcaggtcgagggcgtggatgcgatggcgcgtgcaatccgtggcgacacacgcgagatcgctccagtttcgaccttagctgacggggtgaaagtcaagattcctggtttcattacccgccgtctgtgtgccaacttgttagacgatgtagtgatcgtgcgtgaggctgaactgcgcgaaacattggtgcgtttagtattggaagaacacctgatcgccgaaggggcaggcgcactggcattggccgctggccgccgcgttgcaggtaagcgcaagtgtgcagtggtctccggaggtaatattgacgctgcagtactggccaaactgttgtccgaagtaagaccacggccaccccgcaaaccacgtaggcgtagtgcagatcgccccaacaattgcggcaatttaccgctcccttttaactga

SEQ ID NO: 31286 - protein, 380 aa, Xylella fastidiosa 9a5c
MQYCRWIFLAGTSQHGMPSGCVQIIRTYSSMDIPDVGHTVVKQPNASNVNTVSVADVLAAQARLRRYLMPTPIHYAERFGVMLKLENLQRTGSYKVRGALNAMLVALERGDNRPVICASAGNHAQGVAWSAYRLGIQAITVMPHGAPVTKVAGVSHWGATVRQHGQSYDEAYAFACELAEQNDYHFLSAFDDPDVIAGQGTVGIEITAHEPDVVIVPIGGGGLASGIALVLRSQGVRVIGAQVEGVDAMARAIRGDTREIAPVSTLADGVKVKIPGFITRRLCANLLDDVVIVREAELRETLVRLVLEEHLIAEGAGALALAAGRRVAGKRKCAVVSGGNIDAAVLAKLLSEVRPRPPRKPRRRSADRPNNCGNLPLPFN

SEQ ID NO: 31287 - DNA, 1218 bp, Sulfolobus solfataricus P2
  CDS (1)..(1218): transl_table=11
atgaattacttagaatattttgatagaattagactagcaaaagagaaaatagaaaaatatgtgcatattactccaatagattattctacaacgttttccagaattataaacgcaaaagtttatcttaagttggaaaatctacagaaaactggatcattcaaagttagaggtgcctttaataagttattatctttaaaggaggaagaaaaaaagaatggcgttattgcagtttcagcaggtaatcatgctcaaggagttgcttatgcagcctccacgttaaatatcaaatcgactatagtgatgccagaaacagctccagcttccaagtatttagctacaaaatcctatggggcagaagtagttctttatggtaagtacttgcatgagagtatgaagaaagcggaagaattgattcaaaatactggtttaatatttgttcatccttatagtgatttagatgtgataacgggtcaaggtaccataggattagaattgtatgatatcgaaccagattacgtaattattccaatagggggtggaggattgatttctggtataagtatagctttaaagtatagattcccaaacgtcaagataataggcgttcagtcttcttcttctccttcaatgaaggtttctaaggatcttgggaggcttgtagaaatagagcctagttattccatagctgatggcatattggttaagtctccttctgaattaacctttagtataattaatgagttagtagatgatatagtattagtggatgatgaagaaatagctgaggcaatagttttactacttgaaagaagtaaaacgctagcagaaggagcaggagctgcagcattagcgtcactaatttcagggaaggttaaagtaaatggaatagacaaaaaagtaatttcattagtaagtgggggaaatattgacttatcattattgtctactctaacagagaagtttttatatagacaaaaaagggtagtcaaagtgagggtaatagttccagataagccaggacagttaaataaagtattaagctatgtagttaagatcagaggtaatataatagatattgttcatgataggcacagtagtgatgtattgcctggatacactaaaatatatataactttcgagcttcagtcttcagaggctattaccttacttctgacaaatctggcaaacgagggaatagacgtgaaaattgtagaatag

SEQ ID NO: 31288 - protein, 405 aa, Sulfolobus solfataricus P2
MNYLEYFDRIRLAKEKIEKYVHITPIDYSTTFSRIINAKVYLKLENLQKTGSFKVRGAFNKLLSLKEEEKKNGVIAVSAGNHAQGVAYAASTLNIKSTIVMPETAPASKYLATKSYGAEVVLYGKYLHESMKKAEELIQNTGLIFVHPYSDLDVITGQGTIGLELYDIEPDYVIIPIGGGGLISGISIALKYRFPNVKIIGVQSSSSPSMKVSKDLGRLVEIEPSYSIADGILVKSPSELTFSIINELVDDIVLVDDEEIAEAIVLLLERSKTLAEGAGAAALASLISGKVKVNGIDKKVISLVSGGNIDLSLLSTLTEKFLYRQKRVVKVRVIVPDKPGQLNKVLSYVVKIRGNIIDIVHDRHSSDVLPGYTKIYITFELQSSEAITLLLTNLANEGIDVKIVE

SEQ ID NO: 31289 - DNA, 1038 bp, Sulfolobus solfataricus P2
  CDS (1)..(1038): transl_table=11
gtgattagtagtatggtaaaagaggtttgtatgaaatgcagaaaggaaagggaaagtatatacgagattaagtgtaacaaatgcggaggaccattcgagatcctgatagattttgaatttgataagaattctgagagaggttttccctatagtgaaaagattttcccttacatcaaacatttcatatccctaggagagggaagaactccattaattaaaaaggggaacatatggtttaaactcgacttcttaaatccatcaggatcatacaaggatagaggagcagtgactctggtctcttatcttgcggaaaaaggtgtaaaacaaattagtgaagactcttctggaaatgcaggatcagcaatagctgcgtattctgcagctgctggtattgaggcatacattttcgttcctgaaacggcaaaaggaggaaaacttaagcaaatagaatcctacggtgctcacgttgttagagtaagggggagtagagaagatgtagcaaaagctgcagagaattctggttactattacgcatcacatgttttacaacctcaatttagagatgggattagaactctggcatatgaaattgtaaaggatttagattggaaaattcctaattatgttttcattccagtatcagcaggaactttacttttaggtgtttataaggggttcaagcacttgctagattctggtgtcatatcggaaatgcctaaaatcgtagcagtccaaacagagcaagttatgccactttgtgctaaattcaaaaagatttcttacacaccaccagacaaggttacctccattgcagacgctttagtatcaactagaccatttctactagattatatggtaaaggcttctagtgaatgcatagttgtaagcgataatgaaatagtagaagcttggaaagaattggctaaaatgggactgctggtagaatatagttctgctactgtatttgctgcttataagaaatacagtgttaacgatgcagtattagttttaaccggtagcggattaaaggtattatga

SEQ ID NO: 31290 - protein, 345 aa, Sulfolobus solfataricus P2
MISSMVKEVCMKCRKERESIYEIKCNKCGGPFEILIDFEFDKNSERGFPYSEKIFPYIKHFISLGEGRTPLIKKGNIWFKLDFLNPSGSYKDRGAVTLVSYLAEKGVKQISEDSSGNAGSAIAAYSAAAGIEAYIFVPETAKGGKLKQIESYGAHVVRVRGSREDVAKAAENSGYYYASHVLQPQFRDGIRTLAYEIVKDLDWKIPNYVFIPVSAGTLLLGVYKGFKHLLDSGVISEMPKIVAVQTEQVMPLCAKFKKISYTPPDKVTSIADALVSTRPFLLDYMVKASSECIVVSDNEIVEAWKELAKMGLLVEYSSATVFAAYKKYSVNDAVLVLTGSGLKVL

SEQ ID NO: 31291 - DNA, 1191 bp, Sulfolobus solfataricus P2
  CDS (1)..(1191): transl_table=11
atgaagtgcttgaattgtggatatgaaacggaaatagatcaaagtcagatattatgtccaagatgtggaggactattagaaattatactagaaccaccaaaggacttctctttcagtaaattgagaggaagaggagtttggagatataaagaattaatagcaggcagatacaaaaatattgtaagcataaatgagggaaataccccactaattagatcctcaaatataaatgataatctttattttaaatttgaagggcttaatccaactggtagttttaaggatagaggaatgacagtggcagttagttctgcggtaagcttgaattacaaaactgtaatagccgcatccactggaaatactgcagcttctgcagctgcttatgctgcaagagctggtataaagagctttatcgtcttacctaaaggtaaggtagcattaggtaaattagctcaatcaatactttatggctcagttattttagaagttgatggaagttttgacgttgctatggatgcagtaatgagattatataaggatttaaaagtagtatatccattaaattcctttaatccatggagattagaaggacaaaagacaatcgcatttgagatagcagaagaactaggagttcctgacaacgtgatagtcccggtaggcaatgcaggcaatatctacgccatatggaaaggatttaatgagctagttaaaactggagttattaatactattcctagaatgattggaatccaagctgagggcgcatcaccaatagttaccgcaataataaaaggaaaagattctccagatttcatagaaaatccagatactgtagcaacagcaataaggatagggaaaccagttaattggcaaaaagcgatgaaagcaataagggaatctaatggaaccgcaatagctgtatctgattccgagatattagacgcacagaagaccctagctagaaaagagggcataggagctgagcctgcttcagcagctgccttagctggttatattaaggcaataaatgaaaaggtggtagataaagatgaaaaaacagttttaatcctaacaggacattcgttaaaggatcccgatagtatgacaaaagctgaggctaaaagaatattagttaatcctttacatatggaaaaaattatcctaggtgagataaatggctctaatagttaa

SEQ ID NO: 31292 - protein, 396 aa, Sulfolobus solfataricus P2
MKCLNCGYETEIDQSQILCPRCGGLLEIILEPPKDFSFSKLRGRGVWRYKELIAGRYKNIVSINEGNTPLIRSSNINDNLYFKFEGLNPTGSFKDRGMTVAVSSAVSLNYKTVIAASTGNTAASAAAYAARAGIKSFIVLPKGKVALGKLAQSILYGSVILEVDGSFDVAMDAVMRLYKDLKVVYPLNSFNPWRLEGQKTIAFEIAEELGVPDNVIVPVGNAGNIYAIWKGFNELVKTGVINTIPRMIGIQAEGASPIVTAIIKGKDSPDFIENPDTVATAIRIGKPVNWQKAMKAIRESNGTAIAVSDSEILDAQKTLARKEGIGAEPASAAALAGYIKAINEKVVDKDEKTVLILTGHSLKDPDSMTKAEAKRILVNPLHMEKIILGEINGSNS

SEQ ID NO: 31293 - DNA, 1251 bp, Streptococcus pneumoniae TIGR4
  CDS (1)..(1251): transl_table=11
atgttaagttcaaaagatataatcaaggctcacaaggtcttgaacggtgtggttgtgaatactccactggattacgatcattatttatcggagaagtatggtgctaagatttatttgaaaaaagaaaatgcccagcgtgttcgctcctttaaaattcgtggtgcctattatgccatttcccagctcagcaaggaagaacgtgaacgtggggtagtctgcgcttctgcgggaaatcatgcgcagggagtagcctatacttgtaatgaaatgaaaattcctgctactatctttatgcccattactacgccacaacaaaagattggtcaggttcgcttttttggtggggattttgtaactattaaactagttggagatacctttgatgcctcagccaaagcagctcaagaatttacagtctctgaaaatcgtacctttattgatccttttgatgatgctcatgttcaagcaggtcaaggaacagttgcttatgagattttagaagaagctcgaaaagaatcgattgattttgatgctgtcttggttcctgttggtggtggcggtctcattgccggggtttctacctatatcaaggaaacaagtccagagattgaggttatcggagtagaggcgaatggagcgcgttccatgaaagctgcctttgaggctggaggtccagtaaaactcaaggaaattgataaatttgctgatgggattgctgtgcaaaaggtaggtcagttgacctatgaagcaactcgtcaacatattaaaactttggtaggtgtcgatgagggattgatttctgaaaccttgattgacctttactctaagcaagggatagtcgcagaacctgctggagcggctagtatcgcctctttagaggttttagctgaatatattaaggggaaaaccatttgttgtatcatttctggaggaaataatgatatcaaccgtatgccagaaatggaagagcgtgccttgatttatgatggtatcaaacattactttgtggtcaatttcccacaacgtccaggagctttgcgtgagtttgtaaatgatatcctggggccaaatgatgatatcacacgttttgagtatatcaaacgagctagcaagggaacaggcccagtattaattgggatcgctttagcagataagcatgattatgcaggtttgattcgtagaatggaaggttttgatccagcttatattaacttaaatggtaatgaaacgctttataatatgcttgtctga

SEQ ID NO: 31294 - protein, 416 aa, Streptococcus pneumoniae TIGR4
MLSSKDIIKAHKVLNGVVVNTPLDYDHYLSEKYGAKIYLKKENAQRVRSFKIRGAYYAISQLSKEERERGVVCASAGNHAQGVAYTCNEMKIPATIFMPITTPQQKIGQVRFFGGDFVTIKLVGDTFDASAKAAQEFTVSENRTFIDPFDDAHVQAGQGTVAYEILEEARKESIDFDAVLVPVGGGGLIAGVSTYIKETSPEIEVIGVEANGARSMKAAFEAGGPVKLKEIDKFADGIAVQKVGQLTYEATRQHIKTLVGVDEGLISETLIDLYSKQGIVAEPAGAASIASLEVLAEYIKGKTICCIISGGNNDINRMPEMEERALIYDGIKHYFVVNFPQRPGALREFVNDILGPNDDITRFEYIKRASKGTGPVLIGIALADKHDYAGLIRRMEGFDPAYINLNGNETLYNMLV

SEQ ID NO: 31295 - DNA, 1314 bp, Agrobacterium tumefaciens str. C58
  CDS (1)..(1314): transl_table=11
ttgtctccgacgccttcctatggcatagcgggtgccattatgaatttcaatggattgactatcgtggacaagcagcttgtggaagcagcgcggcgggaagtgcgggagatattcccggaaacgccgctgcagttgaatgaacatctcagccgtcgctatggcgcatcgatttggctgaagcgtgaggatctgtccccggttcgttcctacaagattagaggcgcattcaattttctccgcaaggcggtggccaaggctggcaaggacaaggttttcgtctgcgcgtccgccggcaaccacgcccagggctttgctttcgcctgccgccatttcggcgttcacggcgtcgttttcatgccggtgacgacaccgcagcagaagatcgaaaaaacccgcatctttggcggagagttcatcaagatccgtctggtgggcgatatcttcgaccagtgttacgccgctgcgcgtcagcatgtgcaggaccatgacggctacatggttccgccctttgaccatgaggatattatcgaaggccaggcgacggtcgccgccgagatcatggaccagctgcccgaaggcaccaaacctgacatcgtcgtgatgcctgtcggtggtggcggtctttcggccggcctgaccgggtttctggccggcacggtgaagaaggagaacttcgtgttctgcgagccggaaggcgcgcccagcctgaaaaagagcctggaacgtggcgaaccggtgacgctgaacaaggtcgacaattttgtcgatggtgccgccgttgcccgcatcggcgacctgaacttcaaggcgctgaaggattttccggccgagcaggtgatgctcatcccggaaaatgcgatctgcgtgacgatcatcgagatgctgaacctagaaggcgtggtgctggagcctgcgggcgccctgtccatcgccgcgctggaaaggctcggccgcgagaggctggaaggcaagacggtcatcgccgtggtctccggcggtaatttcgatttcgagcgcctgccggacgtcaaggaacgcgccatgcgttacaccggcgtgaagaagtacttcatcctgcgcctgccgcagcgccccggcgcgctgcgcgatttcctcaatctgctcggtccggacgacgatatcgcccgtttcgaatatctgaagaaatccgcccgcaatttcggctcgatcctgatcggcatcgagaccaatgcgcaggaaaacttcgccgggttgctggagcgcttcgaggcagccggtctcggctatgaggatattaccgaaaacgacatcttgtcgaacctgatcatctga

SEQ ID NO: 31296 - protein, 437 aa, Agrobacterium tumefaciens str. C58
MSPTPSYGIAGAIMNFNGLTIVDKQLVEAARREVREIFPETPLQLNEHLSRRYGASIWLKREDLSPVRSYKIRGAFNFLRKAVAKAGKDKVFVCASAGNHAQGFAFACRHFGVHGVVFMPVTTPQQKIEKTRIFGGEFIKIRLVGDIFDQCYAAARQHVQDHDGYMVPPFDHEDIIEGQATVAAEIMDQLPEGTKPDIVVMPVGGGGLSAGLTGFLAGTVKKENFVFCEPEGAPSLKKSLERGEPVTLNKVDNFVDGAAVARIGDLNFKALKDFPAEQVMLIPENAICVTIIEMLNLEGVVLEPAGALSIAALERLGRERLEGKTVIAVVSGGNFDFERLPDVKERAMRYTGVKKYFILRLPQRPGALRDFLNLLGPDDDIARFEYLKKSARNFGSILIGIETNAQENFAGLLERFEAAGLGYEDITENDILSNLII

SEQ ID NO: 31297 - DNA, 915 bp, Agrobacterium tumefaciens str. C58
  CDS (1)..(915): transl_table=11
gtggagcgcacgccgctggttcgctcggagtttctctccgaacgctgcggtcatcctgttcatctcaaacttgaaacccttcagcctatcggcgccttcaaactgcgcggcgcgatgaacgcgatcctctcgcttgacgatgcggtgcgacggcgtggcctagtcaccgcctcgacgggcaaccatggtcgggccgttgcttacgccgccgccaaactcggcattcccgccacgatctgcatgtcggcgctggtgccggcaaacaaggttgaggcgatccgcatgcttggcgcggaaatccggattgtcggcagatcacaggatgatgcgcaggaggaagtggagcgcctgacaaaaaaccgaggcctgaccgcgatcccacctttcgatcatgctgacgtcgtggccggccagggcactatcggcctcgaggtcgttgaagacatgcctgaactggcgacaattctcgttcctctatcgggcggtggccttgcgggcggtatcgccgttgcggtgaaggcgctgaagccaagggcgcgggttatcggcatttccatggaacgaggtgcggccatgcatgcgtcagtgaaagccggccgccccgtctcggtttgcgaggaagaaacgctggcggattcgcttggcggcgggattggactggcaaaccgcgtgacctttgcactttgcaagacacttctcgatgagatcgtgctggtctccgaagatgaaatcgcgaccggcatctgccatgcatcccgcgaggaagacctgagagtggaaggcgcgggcgccgttggcttcgcagcaatcctcgccggcaagatcgcggtgagcggccctgccgccatcatcgtatcgggcgggaatatcgatccggcggtccacaagacgatcatcgacgggggagtcgcatga

SEQ ID NO: 31298 - protein, 304 aa, Agrobacterium tumefaciens str. C58
MERTPLVRSEFLSERCGHPVHLKLETLQPIGAFKLRGAMNAILSLDDAVRRRGLVTASTGNHGRAVAYAAAKLGIPATICMSALVPANKVEAIRMLGAEIRIVGRSQDDAQEEVERLTKNRGLTAIPPFDHADVVAGQGTIGLEVVEDMPELATILVPLSGGGLAGGIAVAVKALKPRARVIGISMERGAAMHASVKAGRPVSVCEEETLADSLGGGIGLANRVTFALCKTLLDEIVLVSEDEIATGICHASREEDLRVEGAGAVGFAAILAGKIAVSGPAAIIVSGGNIDPAVHKTIIDGGVA

SEQ ID NO: 31299 - DNA, 1215 bp, Sulfolobus tokodaii str. 7
  CDS (1)..(1215): transl_table=11
atgtcttatacaaaatattttgatgaaatagtaaaaattcaagatagaattaaacaatatattcatgagacgcctattgattactcaaaaaccttttctgatatgattggagctcaaatatatttaaagcttgaaaatttgcagaaaacaggttcttttaaggtaagaggagctttttcaaaattgacaagcctagccgaagaagaaaggaaaaaaggtgttatagcggtttccgcgggtaatcatgctcaaggtgttgcatatgctgcaaaagttttaggaattaaagcaactatagtaatgccagaaactgctccaatctcaaaatatcaagctacaaagtcatacggtgctcaagttattttgtatgggaaatttcttcatgagagtatgaaaaaagctgaggagattataagagaagaaggaagtattcttgttcatccttacggagatcttgatgtaattttgggtcaaggtacattaggactagaacttttgccatataatccagatattgttgttgttcctataggagggggaggactaatatcaggaatatctatagcattaaaagcaaaaaatccaaaaaccaaaataataggtgtacaatcttcagcttctccttcattaaaggtctcaaaagatcttcataggctagtagagattgagccctctttttcgatagcagatggaattctagtaaaatctccctctgaaataacgtttagcataatagatgaattagtggatgatattgttcttgttgatgatgaagaaatagcaaatgctatagtatatttattagaaagaaataaaacattagtagaaggagcagctgctgcttcattagcagcacttttatctggaaagattaaagttgcttataatcataaagctattccggttctaagtgggggcaatatagatctttcaatgttatccagaattatagataagatgcttttcaagaataaacgaatagtcaaagtgaaggtaatagtaccagataaacctggatatcttaataaagtattaagtagagtagcacaaataagagggaacgttatcgatgtagttcatgatagaacaagcagtgatgttaaacctggttatactaaaatttatgtaatgtttgaagtacctagtggtgatgctctttcagatttcatgtacaacttagctttagatggtattgaggctaaattagtagaatag

SEQ ID NO: 31300 - protein, 404 aa, Sulfolobus tokodaii str. 7
MSYTKYFDEIVKIQDRIKQYIHETPIDYSKTFSDMIGAQIYLKLENLQKTGSFKVRGAFSKLTSLAEEERKKGVIAVSAGNHAQGVAYAAKVLGIKATIVMPETAPISKYQATKSYGAQVILYGKFLHESMKKAEEIIREEGSILVHPYGDLDVILGQGTLGLELLPYNPDIVVVPIGGGGLISGISIALKAKNPKTKIIGVQSSASPSLKVSKDLHRLVEIEPSFSIADGILVKSPSEITFSIIDELVDDIVLVDDEEIANAIVYLLERNKTLVEGAAAASLAALLSGKIKVAYNHKAIPVLSGGNIDLSMLSRIIDKMLFKNKRIVKVKVIVPDKPGYLNKVLSRVAQIRGNVIDVVHDRTSSDVKPGYTKIYVMFEVPSGDALSDFMYNLALDGIEAKLVE

SEQ ID NO: 31301 - DNA, 1188 bp, Sulfolobus tokodaii str. 7
  CDS (1)..(1188): transl_table=11
atgcaaggctatctaaaatgcttagactgtggatcagaatatcctatccaacaagatattataacttgtcctaaatgtggaggattattagagataattgttgaacctaagaaagacttctcattcagtaaactaaaagggaaaggagtttggagatatagagaattaatagctggagaatacaaacatatagttagtttaaatgaaggaaataccccactaattgcttcttctactaataaaaatctatattttaagtttgaaggagccaaccctactggaagttttaaagatagaggaatgacagtagctataagttccgctaaatcattaaactataaagttgtagtagctgcatctactggaaatactgcagcttcagccgctgcatatgcaagtagagctggtttaagaagttacattgtattacctaaaggaaaagttgctttaggaaaattggctcaatctatactttatgggactactatacttgaagttgatggcagttttgatgttgctatgaatagtgtaatgaaattatatagagaactaaaaatagtttatccgcttaactcttttaatccatggagacttgaaggacaaaaaactattgcttttgaaatagttgaggatattggagtacctgataatgtgatagtacccgtaggtaatgccggaaacatttatgctatatggaagggatttgtagagttaatgaatattggggttaccgataaagtacctagaatgattgggatacaagctgaaggagcagcgccaatagctaaggctctagaaaaaggattagataaaccggaatttatagattcacctgaaactgtagcctctgctataagaataggtaaaccagtgaactggaaaaaagcaattaaggctataaaatcatctaatggatttgcaacttatgtttctgactctgagatcttagaggcgcaaaaagaattagctaggagagagggaataggtgcagaacctgcatcagctgcttcctatgctggttatttaaagcttgtaaattctggcaaaattgataaaagcgaaaaaactgttttaattttaactgggcatgcgctaaaggacccagatgcgatgataaaagctgaatcacgaagaattttagttaacccagaacatataaatgaaataatcttgagtgatctaaaatga

SEQ ID NO: 31302 - protein, 395 aa, Sulfolobus tokodaii str. 7
MQGYLKCLDCGSEYPIQQDIITCPKCGGLLEIIVEPKKDFSFSKLKGKGVWRYRELIAGEYKHIVSLNEGNTPLIASSTNKNLYFKFEGANPTGSFKDRGMTVAISSAKSLNYKVVVAASTGNTAASAAAYASRAGLRSYIVLPKGKVALGKLAQSILYGTTILEVDGSFDVAMNSVMKLYRELKIVYPLNSFNPWRLEGQKTIAFEIVEDIGVPDNVIVPVGNAGNIYAIWKGFVELMNIGVTDKVPRMIGIQAEGAAPIAKALEKGLDKPEFIDSPETVASAIRIGKPVNWKKAIKAIKSSNGFATYVSDSEILEAQKELARREGIGAEPASAASYAGYLKLVNSGKIDKSEKTVLILTGHALKDPDAMIKAESRRILVNPEHINEIILSDLK

SEQ ID NO: 31303 - DNA, 1248 bp, Sinorhizobium meliloti 1021
  CDS (1)..(1248): transl_table=11
atgaagcaggatgttgaaaaagcggcagcggcgatgcgcgagatctttccgccgacgccgcttcagctcaacgagcacctgagcgcgcgctgtggggcgaccgtcttcctgaagcgcgaggacctttcgccggtgcgctcctacaagatccgcggcgccttcaatttcttccgcaagtcgctcggctccggagcggccgggaagaccttcgtttgcgcttccgcgggcaatcacgctcagggctttgctttcgtctgccgccacttcggcgttcccggagtcgtcttcatgcccgtgacgacgccccagcagaagatcgacaaaacgcgcatgttcggggccgagttcatcacgatccgcctcgtcggcgatattttcgatcaatgctacaaggcggcgcgcgagcatgtggaagcgatcggcggcgtcatggtgcctcccttcgaccatgacgatatcatcgaaggccaggccacggttgcagcggagatagccgaacaattgccggccggccccgttgccgatctcgtcgtcctgcccgtcggcggcggcggcttggccgcgggcgtgaccgggtatttgggcgacagcctctcggccgaccgttttctgttctgtgaaccggagggggcgccgagcttcaggcgcagcctggaactcggcggcgtcgtcacgctcgaccaggtggacaatttcgtcgatggcgcggcggtcgcacggatcggcgacctgaactttgctgcgctccggagattttcgccggaacaggtgatgctgctgcctgagaatgcgatctgcctgacgatcaccgaaatgctgaatgtcgagggcgtggttctcgaacccgccggcgcgcttgcaatcaccgcactggaagcgcttggccgcgatagtctcgaaggcaagatcgtcgtagcggtcgtttccggaggcaatttcgacttcgagcgcctgccggacgtgaaggagcgggccatgcgccatgcggggctcaagaaatacttcatcctgcgcatggcgcagcgtccgggcgcgcttcgcgatttcctcggtctcctgggagaggaggacgacatcgcccggttcgaatacctgaaaaagtctgctcgaaacttcggctccgtgctcatcggtatcgaaacgaaacacgcggagaatttccccgttctcaaacagcgtttcgatgcggcgggtctccgctaccaggacatcaccgagaacgagatgctggccaacttcgtcatttga

SEQ ID NO: 31304 - protein, 415 aa, Sinorhizobium meliloti 1021
MKQDVEKAAAAMREIFPPTPLQLNEHLSARCGATVFLKREDLSPVRSYKIRGAFNFFRKSLGSGAAGKTFVCASAGNHAQGFAFVCRHFGVPGVVFMPVTTPQQKIDKTRMFGAEFITIRLVGDIFDQCYKAAREHVEAIGGVMVPPFDHDDIIEGQATVAAEIAEQLPAGPVADLVVLPVGGGGLAAGVTGYLGDSLSADRFLFCEPEGAPSFRRSLELGGVVTLDQVDNFVDGAAVARIGDLNFAALRRFSPEQVMLLPENAICLTITEMLNVEGVVLEPAGALAITALEALGRDSLEGKIVVAVVSGGNFDFERLPDVKERAMRHAGLKKYFILRMAQRPGALRDFLGLLGEEDDIARFEYLKKSARNFGSVLIGIETKHAENFPVLKQRFDAAGLRYQDITENEMLANFVI

SEQ ID NO: 31305 - DNA, 978 bp, Caulobacter crescentus CB15
  CDS (1)..(978): transl_table=11
atgaccgtctcgctcgccgacatccaagccgccgccgtacgcctgaagggctcggccgtcgagacgccgctgatcgagagccccgccttgaacgacaggctgggcgggcggatcttcctcaagcccgagaccttgcaacgtgccggcgccttcaagtttcgcggcgcctacaaccgtctttctcagctcagcgatgaggaaaaggcgcgcggcgtcgtggccttctcgtccggcaatcacgcccaaggggtggcgctggcggccaggctgctgggcgtgccggcgctgattgtgatgccctccgattcgcccagcgtgaaggtcgaaggcacgcgcgggtttggcgcggacatccgcttctacgaccgcttcaccgaggaccgcgtcgccatcgccgaccagatcgcggccgagcgcggctgcgtggtcgtgccctcgtatgacgacccgcacatcatcgccggccagggcacggtgggtctggagatcgtcgcccaggccgccgcgcaaggcgcgacgctggaccgcctgatctgctgcgtcggcggcggcggtctgatcgccggaacctcgacggcggtgaaggccctctcgccggccaccgagatctggggcgtggagcccgccggcttcgacgagacgcggcgctcgctggaaagcggccggcgcgagaccatcgacaaggacgcccgctcgatctgcgacgccctgctgaccccgatccccggcgacctgacctggccgatcaaccagaaaaacctctcaggcgtggtcgcggtgaccgacgccgaggtggccgaggcgatgcgctatgcgttctcgaccttgaaactggtggtggagcccggcggctgcgtggccctgacggcggcgctgacaggcaaggtcgacgtcgccggcaagaccgtggcgatcgtgctgtcgggcggcaatgtcgatccggggttgttcgcgcaggtcttgggcggtcaaatctga

SEQ ID NO: 31306 - protein, 325 aa, Caulobacter crescentus CB15
MTVSLADIQAAAVRLKGSAVETPLIESPALNDRLGGRIFLKPETLQRAGAFKFRGAYNRLSQLSDEEKARGVVAFSSGNHAQGVALAARLLGVPALIVMPSDSPSVKVEGTRGFGADIRFYDRFTEDRVAIADQIAAERGCVVVPSYDDPHIIAGQGTVGLEIVAQAAAQGATLDRLICCVGGGGLIAGTSTAVKALSPATEIWGVEPAGFDETRRSLESGRRETIDKDARSICDALLTPIPGDLTWPINQKNLSGVVAVTDAEVAEAMRYAFSTLKLVVEPGGCVALTAALTGKVDVAGKTVAIVLSGGNVDPGLFAQVLGGQI

SEQ ID NO: 31307 - DNA, 1203 bp, Caulobacter crescentus CB15
  CDS (1)..(1203): transl_table=11
atgaccctcgacctcgccgctatccaggccgccgccggccgtctccagggccagatcgagcgcacgccgtgccgccactccaagaccctctcgaagatcaccggcgccgaggtgtgggtgaagttcgagaacctgcagttcaccgccgcctacaaggagcgcggcgcgctcaacaagctgatgctcctctcggagaccgagaagcagcgcggcgtcatcgccgccagcgccggcaaccacgcccagggcttggcctatcacggcgcgcgcctcggcgtgccggtcaccatcgtcatgcccaagaccacgcctttcgtgaaggtgcagcacacccgcgacttcggcgcgaccgtggtcatcgagggcgagacctatgacgacgccaacgcccatgcccgcaagctgcgcgacgagcagggcctgaccttcgtccacccgttcgacgactacgacatcatggccggacagggcaccatcgccctggaaatgctggaagacgcgcccgatctggagatcctgcccgtgccgatcggcggcggcggcctgatcagcggcgtggcgacggcggccaaggcgctgaagccggatatccgcatcatcggctgcgagccggccatgtatccgtccttcaccgccaagatgcgcggtgtcgccgcccactgcggcggccagaccatcgccgaaggggtcgcggtcaagcaggtcggcgagctgacctatggcgtcgttcgcccgttgctggacgacgtgctgctgctggaagagccctatctggagcaggccgtctcgctctattgcaatgtcgagaagaccatcgccgagggcgcgggcgcagcctcgctggccgctttgctggcctatcccgaacgcttccggggcaagaagtgcggcctgatcctgtgcggcggcaatatcgacacccgcctcttggcctcggtgctgacccgcgaactggtgcgcgcccagcgcctggccagcttgcgaatcatcggcgacgaccgtccgggcctgttgtcgaccgtcgcctcggtcatcggcgccatgggcgccaacatcatcgaagtgaatcacaaccgcctggccctggacgtgccggccaagggcgcggagttcgacatcaccatcgaaacccgcgacgcccagcacacccaggaggtcatggaggccctgcgcgagagcggctacccgccgcgggtggtttga

SEQ ID NO: 31308 - protein, 400 aa, Caulobacter crescentus CB15
MTLDLAAIQAAAGRLQGQIERTPCRHSKTLSKITGAEVWVKFENLQFTAAYKERGALNKLMLLSETEKQRGVIAASAGNHAQGLAYHGARLGVPVTIVMPKTTPFVKVQHTRDFGATVVIEGETYDDANAHARKLRDEQGLTFVHPFDDYDIMAGQGTIALEMLEDAPDLEILPVPIGGGGLISGVATAAKALKPDIRIIGCEPAMYPSFTAKMRGVAAHCGGQTIAEGVAVKQVGELTYGVVRPLLDDVLLLEEPYLEQAVSLYCNVEKTIAEGAGAASLAALLAYPERFRGKKCGLILCGGNIDTRLLASVLTRELVRAQRLASLRIIGDDRPGLLSTVASVIGAMGANIIEVNHNRLALDVPAKGAEFDITIETRDAQHTQEVMEALRESGYPPRVV

SEQ ID NO: 31309 - DNA, 972 bp, Sinorhizobium meliloti 1021
  CDS (1)..(972)
atgcgcaattaccccaccattcaggacatccgtgaagcccgggaacggctgaaaccgcacgtcaggcacacgccgctcttgcgtgcggagaaaatcgagaaggccgctggctgtcagctttatctcaaacccgaaaccctgcagatcactggcgccttcaagatccgcggcgccctgaacaaggctctctcgctctcgagagaagagatcgcaaacggcattatcgcgacgtcgtcgggcaaccatgcccaggggctttcttacgcggccaagatgctcggcgtaaaagtgatattggtacttccggtcaccacacccaaaatcaagattgaaaatacaaaagccctgggtgcggaagtcattctttttgatggtgataatgctgctagatggaaaaaggtctacgaaatcgctgaaggaaacaagtatgcggttattcacggcttcgaggaccccgttgtaatggctggccagggaacgatcgggtgcgagatactcgaagacctggacgatgtagatacggtcatcgttcccttaggcggcggaggcctgatctcgggaatcgctaccgccataaaagaaacgaaaccatcggtgcgcgttatcggggcagagcctgccttgacaccgaagtattttcacagccgggtaaacaaggagcgcacatcgcttcccttgaagaacaccattgcggatggcttgaggataagcgttccgggtcaaaacccgtatccgattatcgaaaagtatgtggacgagattgttcttgttgaagacgagcacatcatcgccgggatgcgtgctcttgccaaggatgcgaaattgatcgctgaaccagccgcctcgattggcgtcggagcactgttggcgggcatcatagacgtcaagctggatgaaaaagtctgtgcggtgttgtctggcgggaactgggatctacgcgaccttgccgcgatatacaatgtagcggggtaa

SEQ ID NO: 31310 - protein, 323 aa, Sinorhizobium meliloti 1021
MRNYPTIQDIREARERLKPHVRHTPLLRAEKIEKAAGCQLYLKPETLQITGAFKIRGALNKALSLSREEIANGIIATSSGNHAQGLSYAAKMLGVKVILVLPVTTPKIKIENTKALGAEVILFDGDNAARWKKVYEIAEGNKYAVIHGFEDPVVMAGQGTIGCEILEDLDDVDTVIVPLGGGGLISGIATAIKETKPSVRVIGAEPALTPKYFHSRVNKERTSLPLKNTIADGLRISVPGQNPYPIIEKYVDEIVLVEDEHIIAGMRALAKDAKLIAEPAASIGVGALLAGIIDVKLDEKVCAVLSGGNWDLRDLAAIYNVAG

SEQ ID NO: 31311 - DNA, 1005 bp, Sinorhizobium meliloti 1021
  CDS (1)..(1005): transl_table=11
gtgagcgtttctctccccgtgacgatcgacgacatcgaggtggcggcacggcgcatttccggccgtgtacttacgacgccgctggcaatgtcgggctcgttgagcgagctctgcggcgtgccggtcggcttaaagctcgagcaccaccagacgaccggtagcttcaagctgcgcggcgcgaccaatgcagtgctttcgctttctgccggcgaccgggcgctcggcgtaatcgcggcctcgaccggcaatcatggccgggcacttgcccatgcggcaaaggcggaaggctcggtcgctacgatctgcatgtcgcacctggtgcccgtgaacaaggtctccgaaatcagacgcctcggcgccaatgtgcggattgtcggcaattcccaggacgaggcgcaggaagaagtcgaaaggctcgttgcggaaaatggtctcgtgatggtgccgcccttcgaccatcgggcgatcgtcgccgggcaggggacgctcggactcgaggtcgtggcgcagatgccggacgttgccatggtgcttgtaccggtgtcgggtggtggactggcagccggagtggcggcagcggtcaaggcgcgcagaccggcgacgcgtgtcataggcctgacgatggagcgcggtgcggcgatgaaggcgagcttcgccgccggcggacccgcgctcgtcgatgaacaaccgagccttgcggactcgctcggcggcggcatcggcctcgacaatcgcgtcacattccgcatgtgccgggagctcctcgacgacataatcctcctgacggaagccgagatcgccgccggcatgcgccacgcctatgccgaggagcgcgagatcgtcgaaggggcgggggccgtcggcatttcggcgcttctcgccggcaagatcaaggacatcgacggccccatcgcggttattatctcggggcgcaacgtcgacatggacctgcacctgcgcgtgatgaacggcgaaacggacccattccgcgaggaggcggcatga

SEQ ID NO: 31312 - protein, 334 aa, Sinorhizobium meliloti 1021
MSVSLPVTIDDIEVAARRISGRVLTTPLAMSGSLSELCGVPVGLKLEHHQTTGSFKLRGATNAVLSLSAGDRALGVIAASTGNHGRALAHAAKAEGSVATICMSHLVPVNKVSEIRRLGANVRIVGNSQDEAQEEVERLVAENGLVMVPPFDHRAIVAGQGTLGLEVVAQMPDVAMVLVPVSGGGLAAGVAAAVKARRPATRVIGLTMERGAAMKASFAAGGPALVDEQPSLADSLGGGIGLDNRVTFRMCRELLDDIILLTEAEIAAGMRHAYAEEREIVEGAGAVGISALLAGKIKDIDGPIAVIISGRNVDMDLHLRVMNGETDPFREEAA

SEQ ID NO: 31313 - DNA, 1527 bp, Synechocystis sp. PCC 6803
  CDS (1)..(1527): transl_table=11
atgaccaccgattacctcgaaagaattcttaaagcccgggtttacgatgtggcgatcgaaactccgttggatttggcggccaatttatcgaagcggctgggtaaccgggtttactttaagcgggaagacctacagccggtcttttcctttaagttacggggggcctataacaaaatggcccagttatcaccggaattattggcaaaaggagtaattgcagcttcggcgggtaaccatgcccagggagtggccctaggagcttccaagttgggtaccagggcgattattgttatgcccgaaaccactcctcaggtgaaagtggaggcggtcaaagctcggggcggtgtggtggtgctctatggcgaaacctatgacgatgcctatggccatgcccgacagttggagcaggaaaaagggctaacttttatccatccttttaatgatcccgacgtgattgctggccaaggcaccattggcatggaaattctacgtcagtatcaacagcccattgatgccatttttgtggcgatcggtggcggtgggctgattgcgggggtagcggcctacgttaaacgcctctatccagaaattaaaattatcggcgtggaaccaacggatgccgatgctatgcgccaatctttggcggcgggaaaacgggtcaagctaaaccaagtgggactgtttgcggatggtgtggcggtgcgggaagtgggggatttaacttttcccctctgtcagcaatatgtggatgatattttgctggtggatacggacgacacctgtgcggccatcaaagattgctttgaagatacccgctcaattttggagccggcgggagcgttggccattgcgggactgaaacaatatgtccaaaagcaaggctgtcgagaccaaaccctagtggcgatcgcctgtggggcgaatatgaactttgaccgattgagatttgtggcggaacgggccgagtatggggaacagcgagaggccatttttgcagtgaccattcccgaacaaaggggcagtttaagaaaattttgtgaagggttagggaaacataacattaccgaatttagttaccgcattgcggaggggcccgatgctcatatttttgtcggcattcaggtgcaaaaccgcagtgatgcgtcccaactggccgccagctttaaccgccaaggttttaaaaccctcgatttaaccgatgacgaactgacgaagctccatttgcgccatatggtggggggccgtcccccccaggtgacccaattggaaaatcaacgggaattactctaccgatttgaatttcctgagcggccaggggcattgatgaaatttttgggctgtatggatccagcctggaatattagtttgttccattaccgtaaccacggggccgactacggcagaattgtcgtcggcatgcaggttcccttggcagaaatggaacagtggcaacagtttttagccaatttaggctatcgctattgggacgagagtgataatccggtttatcgtctctttcttcgctaa

SEQ ID NO: 31314 - protein, 508 aa, Synechocystis sp. PCC 6803
MTTDYLERILKARVYDVAIETPLDLAANLSKRLGNRVYFKREDLQPVFSFKLRGAYNKMAQLSPELLAKGVIAASAGNHAQGVALGASKLGTRAIIVMPETTPQVKVEAVKARGGVVVLYGETYDDAYGHARQLEQEKGLTFIHPFNDPDVIAGQGTIGMEILRQYQQPIDAIFVAIGGGGLIAGVAAYVKRLYPEIKIIGVEPTDADAMRQSLAAGKRVKLNQVGLFADGVAVREVGDLTFPLCQQYVDDILLVDTDDTCAAIKDCFEDTRSILEPAGALAIAGLKQYVQKQGCRDQTLVAIACGANMNFDRLRFVAERAEYGEQREAIFAVTIPEQRGSLRKFCEGLGKHNITEFSYRIAEGPDAHIFVGIQVQNRSDASQLAASFNRQGFKTLDLTDDELTKLHLRHMVGGRPPQVTQLENQRELLYRFEFPERPGALMKFLGCMDPAWNISLFHYRNHGADYGRIVVGMQVPLAEMEQWQQFLANLGYRYWDESDNPVYRLFLR

SEQ ID NO: 31315 - DNA, 1269 bp, Listeria monocytogenes EGD-e
  CDS (1)..(1269): transl_table=11
atggaattagttgacttattagtaacagaagaagatgtcgaaaaggcctatgaagtcttaaagtcggtcgtcaaacatacgccactagaatatgatttttatctttcggaaaaatatcattgcaatgtctatctgaaacgcgaagatttgcaaagagtgcgttcttttaaattacgtggtgctttttatgctatttctagattatcagcggaacaattggaaaaaggagtggtgtgcgcaagtgctggaaatcatgcgcaaggagttgcatatacgtgcaaacgaatgacagttccagctacgatttttatgccaacgactaccccgcaacaaaaagtatcacaagtaaaattttttggtggtagtaatgtcgaagtggttttagttggcgatacgtttgatgcttctgcaactgccgcgaaagaatttgctgcagcacatggccaaacttttatcccaccgtttgatgatcctgatattattgcaggccaaggctcgcttgctgtggagatggtcaaagatttaaataaagcacacgagcaagcagattatgtttttgctggaattgggggtggtggcttgattagcggtgttgcaacgtatctcaaagcgaagagcccgattacaaaaatcatcggggtagaacctgatggcgcgccttcaatgacagcagctttaaaacaaaatcaagtcgtaacactagataaaatcgataaatttgtcgatggtgctgcggtaaaagaagttggtagcttaacgttccaacatgccaaagtgttagtcgatgaagtgacaactgtttctgaaggtgctgtttgttctacgattttggatatgtatacgaagcaagcgattgttgcagaacctgctggagcactttccgttgctgcacttgaaacctaccgcgaggaaattaaagacaagacggttgtttgtattgtaagtggcggaaacaatgatattaaccggatgcaagaaattgaagaacgttccctcctacatgaaggattaaagcattattttatcgtcaatttctcgcagcgtcctggggctttgaaagaatttgttaacgatgtgctcggtccacatgacgatatcaccaaattcgaatatacgaaaaaagtgaatcgaggtaatggacctgtaattatcggtgttttgttgcaagataaaaatgattatgaaggattgcttgaccgggttgctgcttttgacccgagctatattccgattaatgataatcaaaccctatacactttgcttgtataa

SEQ ID NO: 31316 - protein, 422 aa, Listeria monocytogenes EGD-e
MELVDLLVTEEDVEKAYEVLKSVVKHTPLEYDFYLSEKYHCNVYLKREDLQRVRSFKLRGAFYAISRLSAEQLEKGVVCASAGNHAQGVAYTCKRMTVPATIFMPTTTPQQKVSQVKFFGGSNVEVVLVGDTFDASATAAKEFAAAHGQTFIPPFDDPDIIAGQGSLAVEMVKDLNKAHEQADYVFAGIGGGGLISGVATYLKAKSPITKIIGVEPDGAPSMTAALKQNQVVTLDKIDKFVDGAAVKEVGSLTFQHAKVLVDEVTTVSEGAVCSTILDMYTKQAIVAEPAGALSVAALETYREEIKDKTVVCIVSGGNNDINRMQEIEERSLLHEGLKHYFIVNFSQRPGALKEFVNDVLGPHDDITKFEYTKKVNRGNGPVIIGVLLQDKNDYEGLLDRVAAFDPSYIPINDNQTLYTLLV

SEQ ID NO: 31317 - DNA, 1269 bp, Listeria innocua Clip11262
  CDS (1)..(1269): transl_table=11
atggagttagttgatttattagtgacagaagaagatgtcgaaaaagcctatgatgtattaaaaccagttgtcaagcataccccgcttgaatacgatttttacctatcagaaaaatatcattgcaatgtatatttgaaacgtgaagatttacagcgggtgcgttcttttaaattacgtggtgctttttatgccatttctcgactgtcagcagaacagttagaaaaaggagttgcctgtgcaagcgctggaaatcatgcccaaggagtcgcctatacttgtaaacgtatgacggttccggcaacgattttcatgccaactactaccccacaacaaaaagtatcgcaagtgaaatttttcggtggaagtaatgtggaggttgttttagttggtgacacgtttgatgcatctgctactgccgcaaaagaattcgcagcagaacatggtcagacatttatcccgccgtttgatgatccagatattatcgcaggccaaggatcgctcgcggttgaaatggtaaaagatttaaataaagcacatgagcaagcggattatgtttttgcaggtattggtggcggcggcttaattagcggtgtggcatcttatctaaaagcgaaaagtccaatcacaaaaattatcggtgtagaaccagctggcgcgccttcgatgacagaagcattaaaacaaaatcaagttgtgactctagataaaatcgataaatttgttgacggggctgcagtgaaagaagttggaagtttaacatttcagcatgcaaaagtcttagttgatgaagtgacaaccgtttctgaaggagcagtttgttcaacaattttagatatgtatacgaagcaagcgattgtcgccgaaccagctggtgctctttccgttgctgctctcgaaacttatcgtgaggaaatcaaagataaaacagtagtctgtatcgttagtggcggaaataacgatattaatcgaatgcaagaaattgaagagcgttccctacttcatgaaggattaaaacattatttcatcgtcaacttctctcaacgccctggtgctctaaaagagtttgtaaatgatgttcttggaccgcatgatgatattactaaattcgaatatacgaaaaaagtaaatcgaggcaatggacctgttatcatcggtgtacttttacaagataagaatgattatgaaggcttgcttgaccgggttgctgcttttgatccgagttatataccgattaatgataaccaaacactttacacattacttgtttaa

SEQ ID NO: 31318 - protein, 422 aa, Listeria innocua Clip11262
MELVDLLVTEEDVEKAYDVLKPVVKHTPLEYDFYLSEKYHCNVYLKREDLQRVRSFKLRGAFYAISRLSAEQLEKGVACASAGNHAQGVAYTCKRMTVPATIFMPTTTPQQKVSQVKFFGGSNVEVVLVGDTFDASATAAKEFAAEHGQTFIPPFDDPDIIAGQGSLAVEMVKDLNKAHEQADYVFAGIGGGGLISGVASYLKAKSPITKIIGVEPAGAPSMTEALKQNQVVTLDKIDKFVDGAAVKEVGSLTFQHAKVLVDEVTTVSEGAVCSTILDMYTKQAIVAEPAGALSVAALETYREEIKDKTVVCIVSGGNNDINRMQEIEERSLLHEGLKHYFIVNFSQRPGALKEFVNDVLGPHDDITKFEYTKKVNRGNGPVIIGVLLQDKNDYEGLLDRVAAFDPSYIPINDNQTLYTLLV

SEQ ID NO: 31319 - DNA, 1056 bp, Listeria innocua Clip11262
  CDS (1)..(1056): transl_table=11
atgtataaaggtttactagaaaaatataaagaatatctaccagtaactgaaaaaacgccaatgatctcacttgcggaaggaaacacaccacttatcccattaccaaatttatcaaaagaacttggagtaactttatatggaaaatatgaagggttaaatccaactggttcttttaaagaccgcggaatggttatggctgtggctaaagcgaaagaagaaggtgcggaagcggttatttgtgcatcgactgggaatacttcagcagcggcggcggcatatgcaacacgtgccggattaaaagcatatattgttatcccagaaggtaaagttgctctaggaaaattagcgcaagcagtcatgtatggcgctgatattatctcgattcaaggtaattttgatgaagctttaaaatctgttcgtgaacttgctgaaacagaagcagtaacgcttgtaaactcagtaaatccttatcgtttagaaggccaaaaaacggctgcattcgaaatctgtgagcaattaggttctgctccagatgttcttgcaattccagtcggtaacgccggaaatatttctgcatactggaaaggttttaaagagtggaatgaggcaaacgcttctggacttccacggatgcatggatttgaagcagaaggagcggctgcaattgtccaagggaaaccgattgataacccggaaacaattgcaacagcgattcgtatcggaaatccagctagttgggagcttgcagaagcagctcgcgacgaatctggcggatacatccattctgtaacagatgatgaaattgttaatgcttataaaaaaatcgcagcgcaagatggagtcttcatcgagccaggttctgctgcatcattagctggagttattcaacatgtggcgaatggaacaattaaacaaggggaaaaagtcgtttgtgtctttactggaaatggcttaaaagacccagatacagcaatgagtgtacatgaaattccgatttcccatgtagatgatattgaagcaatgcgtacacatttacgttcaggagtgaaagcttaa

SEQ ID NO: 31320 - protein, 351 aa, Listeria innocua Clip11262
MYKGLLEKYKEYLPVTEKTPMISLAEGNTPLIPLPNLSKELGVTLYGKYEGLNPTGSFKDRGMVMAVAKAKEEGAEAVICASTGNTSAAAAAYATRAGLKAYIVIPEGKVALGKLAQAVMYGADIISIQGNFDEALKSVRELAETEAVTLVNSVNPYRLEGQKTAAFEICEQLGSAPDVLAIPVGNAGNISAYWKGFKEWNEANASGLPRMHGFEAEGAAAIVQGKPIDNPETIATAIRIGNPASWELAEAARDESGGYIHSVTDDEIVNAYKKIAAQDGVFIEPGSAASLAGVIQHVANGTIKQGEKVVCVFTGNGLKDPDTAMSVHEIPISHVDDIEAMRTHLRSGVKA

SEQ ID NO: 31321 - DNA, 954 bp, Caenorhabditis elegans
  CDS (1)..(954)
atgactacaaaaataacaatggaagaaatgagagcagcttatcaaagaactgctccatttcttcataaaacacttgttataacaagtgaaaatattgatgaaaaagttggaaatggaacacatgttctattcaaatgtgaacatttacaaaaaactggaagtttcaaagccagaggagcactgaattctgctattttggcaaaagagaaaaatgcaaaaggaatgattgcccattcgtctggaaatcacgggcaagctctagcgtgggctgctcaaaaaatcggacttccttgtacaattgtcgttccaaaaaatgctccaatttctaaaattgaaggaatgagagaatacaatgcgaatattgttttctgtgagccaactgttactagtcgagaatctgtatgtgctgatttgactgaaaaacttgagtattattgtgtagaaccttataattgtgtttcaatgatcaacggacattcatcagttgcatttgaaatcctggaacaggttggcaatgagattgattccatttttttatctgttggaggtggtggtttagcttcatctgttgcttttctgataggcaacttgaggccagacatcgaagtataccttgtgcaaccagcacagaaagaactttcgaactttctggaaaatggaattaagtgtccggttgacacattggatacaattgctgatggagttcgtgtagcaagagttggaccgctttgtgaaccaatactcaaacagtattgtgcacaaaaagttatcagtgtgaaggaagacgagatcaaagaaggattgaaactcatatggacaagaatgaagcaacgaattgaaccaactgcagcacttgcatttgcaggagttctctaccacaaaccggctcacatcaaacgtccactagtcatcctatgcggaggaaatgttgatactaattatgtgatcaattaa

SEQ ID NO: 31322 - protein, 317 aa, Caenorhabditis elegans
MTTKITMEEMRAAYQRTAPFLHKTLVITSENIDEKVGNGTHVLFKCEHLQKTGSFKARGALNSAILAKEKNAKGMIAHSSGNHGQALAWAAQKIGLPCTIVVPKNAPISKIEGMREYNANIVFCEPTVTSRESVCADLTEKLEYYCVEPYNCVSMINGHSSVAFEILEQVGNEIDSIFLSVGGGGLASSVAFLIGNLRPDIEVYLVQPAQKELSNFLENGIKCPVDTLDTIADGVRVARVGPLCEPILKQYCAQKVISVKEDEIKEGLKLIWTRMKQRIEPTAALAFAGVLYHKPAHIKRPLVILCGGNVDTNYVIN

SEQ ID NO: 31323 - DNA, 1347 bp, Caenorhabditis elegans
  CDS (1)..(1347)
atgcttcaaagcacgttgcttcgaaagtcgattttctattctctagctcaccgccgccacgtggcatccgtgcctctgaaggatgtcttttgtgacccggaaaacccgaaaatcctgcaattcggcgatatttcgatggctcatcatcggattcagaatggaatcgttcgtaccgattgccggaaatccagatgtttgtcgaaattgttcgatatgaacatctatctgaagatggaggtcaatcaggacactggaagcttcaaggagcgcggagcccgatatgctctacagaatttgccggaggagaagaagaaagccggggtttacgcggcttctgctggaaatcatgcgctggcactttctcttcatgggaaacagttgggtgtagaggtgaacgtggtgatgcccaagattgctccattgatgaaaatcaatcgatgccaggacctgggagccaacattctggttcagggcgaagacatcgccgagagccgagaaatcgctcttcggatggctcacgatagcaacggaacctatatcaacggctacgatcattatgacattctcgccggcgccggcaccactggaatcgagattctggagcaaatccagatgcctgacgcgattttggtgccggttggtggtggtgggctggttgcaggtgtcgccacagctgtcaaggctttgtctccaactaccgaagtgatcggtgttgttagtgagacttgtcaggctattgtgaaatctctccaagcaggacaccctgtgtacacgccgactcgtccaacactagctgacggattagcagtacccaatgcaggagtgaatgcttttgcgtcgatgatcggaaaagtggatcgagtgattagtgtgcctgaaaacgacatcgctgtggcaattctccgcctaatcgagaatgagaaggtggtctgcgaaggcgccggagcaatcggaatcggagcaattctatcgggaaagctgaatcatttgaagggaaaaacagtcgtatcaattctctctggtggaaatatcgatagtacatcgctgggtagatgcattgagagaggtctcgcgtatgatcatcgtgtaattcgtctgtcggttatcattcctgataagcctggtggtctgtcgaaattgactggcctggtgggcgaactgagtggaaatgttcgggatttgtatttggaacgtgcattcatgagaaacgacatgtcgagtcaacgtgtcaagatggtgattgaggtgcgcggagaggagcacgaaatgcagttgaagcagaagttccaggaagtatacgacccgtcaaactgccaattcaagaacaatcgcctgccaagactttga

SEQ ID NO: 31324 - protein, 448 aa, Caenorhabditis elegans
MLQSTLLRKSIFYSLAHRRHVASVPLKDVFCDPENPKILQFGDISMAHHRIQNGIVRTDCRKSRCLSKLFDMNIYLKMEVNQDTGSFKERGARYALQNLPEEKKKAGVYAASAGNHALALSLHGKQLGVEVNVVMPKIAPLMKINRCQDLGANILVQGEDIAESREIALRMAHDSNGTYINGYDHYDILAGAGTTGIEILEQIQMPDAILVPVGGGGLVAGVATAVKALSPTTEVIGVVSETCQAIVKSLQAGHPVYTPTRPTLADGLAVPNAGVNAFASMIGKVDRVISVPENDIAVAILRLIENEKVVCEGAGAIGIGAILSGKLNHLKGKTVVSILSGGNIDSTSLGRCIERGLAYDHRVIRLSVIIPDKPGGLSKLTGLVGELSGNVRDLYLERAFMRNDMSSQRVKMVIEVRGEEHEMQLKQKFQEVYDPSNCQFKNNRLPRL

SEQ ID NO: 31325 - DNA, 1539 bp, Caenorhabditis elegans
  CDS (1)..(1539)
atggttgctccatctcgaaagaagtcgattattcatcatcatgatcactctcatgaatcaacacctcaaaaaactcaccatcatcgagtgaagcaggctgaacgtaaacggacagcaagcatcagtaaagaagatggaatggaatataacaaaagagttcgaaagcttcataaggcattcttaacccatggagccgagtccccacatgttgatgataaacagacttctggaagtaacagtgatactgaagctccacttttcgatccggattgtgatccagagaacccaaagaaattgaaattttctgatatttcaagtgctgcatttaacattaaaaatggagttcaaacaacaccatgtgtgcgatctcttcaactgtcatccaagtgtgaaatggacctttatttcaaaaaagaatatctgcaagtgacaggatcattcaaagaacgaggagcaagatacgctctttcaaaaatggctgagcaattcaaaaaagcaggagtgatcgctgcgagcgcaggaaatcatgctctagctctcagttatcatggacaacaaatggggattccagtgacagtggtcatgcctgttattgctccacttatgaaaattcaattctgcagaagcttgggagcaacagttattctcaagggagagagtattgcagtggccaaggactttgcacttcgtcacgctaaagagaatcacttaaagtacattaatggttatgatgcaattgatattcttgctggacaaggaacaattggacttgaaattcttgatcaagttccagatgttgatacaattcttgtaccagttggaggtggtggattaattgctggaatcgcaacagctgttaagacattgaagccggatgttcatatttatgtaagctcatttctcataattgcaaattttaaagtaaccggaattgaatcagaaacctgcccatcgttcactgaagcatatgaagctggccatataataacttcccaggccaaagcgtcacttgctgatggtctcgccgttcccacagtcggcggaaattctttggagacagcaaaaggcttggttgataaggttatcacagtgaaagaagaaagcattgcgctgagtattttaagacttttggaagttgaaaaggctgttgttgaaggaggaggagctgttggattagcagctattttggaaggaaaagtaccagaattgaaaggaaagaaagttgtttcaattctttccggtggaaatattgatacaacagtacttggaagatcaattgaaagaggattagctgtagatggaagacttgttcgtttagaagttgtcgtatcagatagaccaggaggtattgctgaactaacaactacaattgctcatcttggagcatcaatcaaagatattttccacgaaagagcatggatctcaacggatgtattccacgttaaagttaaggttgtggcagaaactcgtggaaaagagcacgtggaggagattgagactgcattgaagaaaatttatgataatgttatacttcattga

SEQ ID NO: 31326 - protein, 512 aa, Caenorhabditis elegans
MVAPSRKKSIIHHHDHSHESTPQKTHHHRVKQAERKRTASISKEDGMEYNKRVRKLHKAFLTHGAESPHVDDKQTSGSNSDTEAPLFDPDCDPENPKKLKFSDISSAAFNIKNGVQTTPCVRSLQLSSKCEMDLYFKKEYLQVTGSFKERGARYALSKMAEQFKKAGVIAASAGNHALALSYHGQQMGIPVTVVMPVIAPLMKIQFCRSLGATVILKGESIAVAKDFALRHAKENHLKYINGYDAIDILAGQGTIGLEILDQVPDVDTILVPVGGGGLIAGIATAVKTLKPDVHIYVSSFLIIANFKVTGIESETCPSFTEAYEAGHIITSQAKASLADGLAVPTVGGNSLETAKGLVDKVITVKEESIALSILRLLEVEKAVVEGGGAVGLAAILEGKVPELKGKKVVSILSGGNIDTTVLGRSIERGLAVDGRLVRLEVVVSDRPGGIAELTTTIAHLGASIKDIFHERAWISTDVFHVKVKVVAETRGKEHVEEIETALKKIYDNVILH

SEQ ID NO: 31327 - DNA, 1005 bp, Ralstonia solanacearum GMI1000
  CDS (1)..(1005): transl_table=11
atgccgtcgatcgccaatgccgcttcgctcaatcgtgccgctgaactgcgccgtctgcgcgcggctgccgccgttgtcaatgccgtgatcccgccgacgccgcagtactgctggccgctgttgtcgcaggcgctgggggctgccgtgtgggtcaagcacgagaaccatacggaagtgggcgccttcaaggtgcgcggcgggctgaactatctgcacgccttgcgtcgtcgcgatccggaactgcgcggcgtgatcgcggcgacacgcggcaaccatgggcagtcgatcgccctggcggcgcgcaagcaaggcatgtcggccaccatcgtggtgccccacggcaacagcgtggaaaagaacgccgccatgcgcgcgctcggcgccgaactggtcgaagccggcgaagacttccaggcgagccgcgaagccgcggcaaggcaggccgccgagcgcggcctgcacctggtgccggccttccacgaagacctggtggccggggtggccagctattggctggagtttttcgaggaggccgcgccgctggacgtggtctacgtgccgatcggcatgggctcgggcatctgcgcggcggcggcggcgcgcgatgcgttccggctgtcgacgcgcatcatcggcgtggtgtcggcgcatgcgcgatgctatgactactcgttcaattgcggcgcgccgatttccgcgccggtatcgacgcaactggccgacggcctggcatgccggacgccggatgcgacggcgctggaggtgatccgcgcgggcgtcgacgaaatcgtcacggtgacggacgacgaagtcgccgaggccatccgcctgtacttctccaccacgcacaacattgcggagggtgccgccgccgcggccctggcggcggcctggcagcagcgcgaccagttggccggcctgcgcgtcggcctgccgctgaccggcggcaacatcgaccgcgccacgctggcgcgggtgctggccggtcagccgatcggcgcttaa

SEQ ID NO: 31328 - protein, 334 aa, Ralstonia solanacearum GMI1000
MPSIANAASLNRAAELRRLRAAAAVVNAVIPPTPQYCWPLLSQALGAAVWVKHENHTEVGAFKVRGGLNYLHALRRRDPELRGVIAATRGNHGQSIALAARKQGMSATIVVPHGNSVEKNAAMRALGAELVEAGEDFQASREAAARQAAERGLHLVPAFHEDLVAGVASYWLEFFEEAAPLDVVYVPIGMGSGICAAAAARDAFRLSTRIIGVVSAHARCYDYSFNCGAPISAPVSTQLADGLACRTPDATALEVIRAGVDEIVTVTDDEVAEAIRLYFSTTHNIAEGAAAAALAAAWQQRDQLAGLRVGLPLTGGNIDRATLARVLAGQPIGA

SEQ ID NO: 31329 - DNA, 972 bp, Ralstonia solanacearum GMI1000
  CDS (1)..(972): transl_table=11
atgaccacgctgcccatcacctacgacgatgtcgtcgccgcccacgcccgcctgcagggccaggtccaccggacgcccgtcctcacgtcgaccacggcgaatgcgctgaccggcgccgagctgttcttcaagtgcgagaacttccagcgcatgggcgccttcaagttccgcggcgcgtacaacgcgctgtcgcagttcacacccgagcagcgcaaggccggcgtcatcaccttctcgtcgggcaatcatgcgcaggcgatcgcgctgtcggcgcggctgctgggcatgcgcgcggtgatcgtgatgcccaaggacgcgccgacgatcaaggtcgaggccacgcgcggctacggcggcgaggtggtcttctacgaccgctataccgaagaccgcgaagccatcggccgccggctggccgagcagcacggcctgacactgatcccgccctacgatcatccgcacgtgatggccgggcagggcacggccgccaaggaactgatcgaagagaccggaccgctcgacctgctgctcgtctgcctgggcggcggcggtctgctgtcgggctgcgccacggcggcgcgcgcgctgagcccggcctgccggatcatcggcgtggagcccgaggccggcaacgacggccagcagagcctgcgcaagggcgagatcgtccacatcgacacgcccgccaccatcgccgacggggcgcagacgcagcacctgggccactacacttttgcggtgatccgtgcgctggtcgacgacatcgcgacggtgagcgatgccgatctggtcgacaccatgcgcttcttcgccggccgcatgaagatcgtggtggagccgaccggctgcctggccgcggcggccgccctgcggcagcgggtggaggtgcgcggcaagcgcgtcggcgtgatcatttcgggcggcaatgtggacctgcagcactttgcccggctcgtgcaggcggacgcatga

SEQ ID NO: 31330 - protein, 323 aa, Ralstonia solanacearum GMI1000
MTTLPITYDDVVAAHARLQGQVHRTPVLTSTTANALTGAELFFKCENFQRMGAFKFRGAYNALSQFTPEQRKAGVITFSSGNHAQAIALSARLLGMRAVIVMPKDAPTIKVEATRGYGGEVVFYDRYTEDREAIGRRLAEQHGLTLIPPYDHPHVMAGQGTAAKELIEETGPLDLLLVCLGGGGLLSGCATAARALSPACRIIGVEPEAGNDGQQSLRKGEIVHIDTPATIADGAQTQHLGHYTFAVIRALVDDIATVSDADLVDTMRFFAGRMKIVVEPTGCLAAAAALRQRVEVRGKRVGVIISGGNVDLQHFARLVQADA

SEQ ID NO: 31331 - DNA, 975 bp, Agrobacterium tumefaciens str. C58
  CDS (1)..(975): transl_table=11
atgacagatatttcgatgatcgaggcggcgcgtgagcgcatcggcaaccatgcggtgcgaacaccgctgctcacctcgccttttctggacgagatcgccgggcgaaagctgttcgttaaggcggaatgcctgcaaaggacgggatccttcaagtttcgcggcggctggtcggcggtatccggcctgccggcggatgtgcgcgccaagggtgtgatcgctttttcctccggcaaccatgcgcagggcgtggcgctcgcggcccgcctgcatggcattcccgccgtcatcatcatgccttcggatgcgccgaagatcaaaatcgacaatacccgcgcctatggcgccgaggtggtgctttacgaccgggcgaatgaagaccgtgacgccattggcaaccggttgtcgagcgagcgcggtttgaccctgatcaggccttacgatgaaccgctggtgattgcggggcaggggaccgctgggctggaaatcgctgagcaaggcgccgaactcggtatcggtgctgccgaggttctggtgccttgcggtggcggcggcctcacctccggcatctctcttgcactcgatgcgaaagcgcgaaattataaggtcaggacggcagaaccggagcgtttcgatgacgtggcgcgctcccttgcggcgggcaagatcgagcggaatgcgacgacatcgggttcgatctgtgatgcaatcgtcacgccgcagcctggcaatatcacctttcccatcatggcagggctttgcgggaaaggtatcgccgtcagcgaggaggaagcgctgcgggccatggttctcgccttcaaccggctgaaggtcgttatcgagccgggtggtgctgttgcgcttgccgcagcgctttttcatggcaaggaactggaaagcgaaaccgtgattgcggttgcctccggcggcaatgtcgatcccgggatcatggccgacgctctgtcacgcttcggttga

SEQ ID NO: 31332 - protein, 324 aa, Agrobacterium tumefaciens str. C58
MTDISMIEAARERIGNHAVRTPLLTSPFLDEIAGRKLFVKAECLQRTGSFKFRGGWSAVSGLPADVRAKGVIAFSSGNHAQGVALAARLHGIPAVIIMPSDAPKIKIDNTRAYGAEVVLYDRANEDRDAIGNRLSSERGLTLIRPYDEPLVIAGQGTAGLEIAEQGAELGIGAAEVLVPCGGGGLTSGISLALDAKARNYKVRTAEPERFDDVARSLAAGKIERNATTSGSICDAIVTPQPGNITFPIMAGLCGKGIAVSEEEALRAMVLAFNRLKVVIEPGGAVALAAALFHGKELESETVIAVASGGNVDPGIMADALSRFG

SEQ ID NO: 31333 - DNA, 1011 bp, Agrobacterium tumefaciens str. C58
  CDS (1)..(1011): transl_table=11
atgaagagcgaaaacctgtccatatccgccgataaaaaccagcttccggtctcgctggccgcgatagagcgggcggcaacgcggctttcgggacaggtggagcgcacgccgctggttcgctcggagtttctctccgaacgctgcggtcatcctgttcatctcaaacttgaaacccttcagcctatcggcgccttcaaactgcgcggcgcgatgaacgcgatcctctcgcttgacgatgcggtgcgacggcgtggcctagtcaccgcctcgacgggcaaccatggtcgggccgttgcttacgccgccgccaaactcggcattcccgccacgatctgcatgtcggcgctggtgccggcaaacaaggttgaggcgatccgcatgcttggcgcggaaatccggattgtcggcagatcacaggatgatgcgcaggaggaagtggagcgcctgacaaaaaaccgaggcctgaccgcgatcccacctttcgatcatgctgacgtcgtggccggccagggcactatcggcctcgaggtcgttgaagacatgcctgaactggcgacaattctcgttcctctatcgggcggtggccttgcgggcggtatcgccgttgcggtgaaggcgctgaagccaagggcgcgggttatcggcatttccatggaacgaggtgcggccatgcatgcgtcagtgaaagccggccgccccgtctcggtttgcgaggaagaaacgctggcggattcgcttggcggcgggattggactggcaaaccgcgtgacctttgcactttgcaagacacttctcgatgagatcgtgctggtctccgaagatgaaatcgcgaccggcatctgccatgcatcccgcgaggaagacctgagagtggaaggcgcgggcgccgttggcttcgcagcaatcctcgccggcaagatcgcggtgagcggccctgccgccatcatcgtatcgggcgggaatatcgatccggcggtccacaagacgatcatcgacgggggagtcgcatga

SEQ ID NO: 31334 - protein, 336 aa, Agrobacterium tumefaciens str. C58
MKSENLSISADKNQLPVSLAAIERAATRLSGQVERTPLVRSEFLSERCGHPVHLKLETLQPIGAFKLRGAMNAILSLDDAVRRRGLVTASTGNHGRAVAYAAAKLGIPATICMSALVPANKVEAIRMLGAEIRIVGRSQDDAQEEVERLTKNRGLTAIPPFDHADVVAGQGTIGLEVVEDMPELATILVPLSGGGLAGGIAVAVKALKPRARVIGISMERGAAMHASVKAGRPVSVCEEETLADSLGGGIGLANRVTFALCKTLLDEIVLVSEDEIATGICHASREEDLRVEGAGAVGFAAILAGKIAVSGPAAIIVSGGNIDPAVHKTIIDGGVA

SEQ ID NO: 31335 - DNA, 1212 bp, Pyrobaculum aerophilum str. IM2
  CDS (1)..(1212): transl_table=11
atgatcctcctggaggaggctgcgtcggtaataagagaaaaacagcgggaatcaaaaatccataggacgccgactttgaggtcagagtctctgactagaataacaggcggggaggtgttcctcaagttggaatcgcttcaaaagacaggcagtttcaagatcaggggggcatattttgccatgtataaatacataaaggagggttatagggagtttataaccgcctcgtcgggtaatcacgcgcagggagttgcctatgcggcacaattacacggagtaaaggccactgttgtaatgcctgaaactacgccttggctcaaggttaaaaagacccaggattacggcgccaacgttatattatacggcgagagttattacgaggcggagaaaaaagccatggaattagtacgcggaggagttaagttcctccacgcgtataacgactggtacgtcatctcgggacaagccactttaggccttgagattgtagaggatgtcggtgacgtagacgtagtagttgtgccaataggcggcggggggcttatctccggcgttgcatatgccgtgaagaagagaaggcctggggcaaaggtaataggggttcaagccagcggagcgccggcggtgtacttgtctttaaaagaggggcggcccattgtgattgagaaagtagacactattgccgacggtatcgctattaaaagccccggcgacattacgttgaaattaatacaagagtacgtagacgacgtggtgttagtagacgacaatgaaattgtagatgccatttacctcctccttgaaaggacaagagtagtggctgagggcgctggggctgttgcagtggccgcgttaatgtcggggaaaattaacgtaagtggtaaaaaagtagtggcggttgtctccggcggtaatatagacgcgcctatttttatgcgcgttctcatgaaggcaatggcgagacagaggcgggtgattaaattagtcggcgaagtgcctgacaagcctggaactcttgcgaaggcctcttctttcctggcctcacacaatgtgaatatcctagaggttttccacgagcgctacgacccggaacaacggcctaattatgtaagactcatatttgtagtggaaattccaggcacgttagacgtatcaaagctcttagacgaactggaaaaaaacggcttctttttcagagtcgcctcgcagtaa

SEQ ID NO: 31336 - protein, 403 aa, Pyrobaculum aerophilum str. IM2
MILLEEAASVIREKQRESKIHRTPTLRSESLTRITGGEVFLKLESLQKTGSFKIRGAYFAMYKYIKEGYREFITASSGNHAQGVAYAAQLHGVKATVVMPETTPWLKVKKTQDYGANVILYGESYYEAEKKAMELVRGGVKFLHAYNDWYVISGQATLGLEIVEDVGDVDVVVVPIGGGGLISGVAYAVKKRRPGAKVIGVQASGAPAVYLSLKEGRPIVIEKVDTIADGIAIKSPGDITLKLIQEYVDDVVLVDDNEIVDAIYLLLERTRVVAEGAGAVAVAALMSGKINVSGKKVVAVVSGGNIDAPIFMRVLMKAMARQRRVIKLVGEVPDKPGTLAKASSFLASHNVNILEVFHERYDPEQRPNYVRLIFVVEIPGTLDVSKLLDELEKNGFFFRVASQ

SEQ ID NO: 31337 - DNA, 1047 bp, Pyrobaculum aerophilum str. IM2
  CDS (1)..(1047): transl_table=11
ttgcttgaagtggaagttcgtaataaagtctgggccccaaagggcaacgggatctggcgttattcaacaatgttgcctcttaaaagcgggatatccctgggagaggggaggacccccctggtgaaatccaatctggcggagaatctgtatgtaaaatttgaaggggctaacccaactggaagttttaaagaccggggaatggccctcggcgtgactgtggccaaggagagcggcgccaataaagtcgtcgtggcgtctactggcaacacggcggcctctgcggcggcttacgccgctagggctgggcttaggtgttatgtagttttgcccaagggcaatgtggccagggggaagttaatacaagcggcgttacacggcgctgagcttgttatgataaacggcctatttgataaggcgcttgactacgtggttaactacgggacaaaatacgcatatcctctaaacagctttaacccgtggaggctggaggggcagaagaccgtggcctttgagatatacgaagagctggggtgtccggactacgtaatagtgccagtgggaaacgcggggaatatctcggctatatggaaggggtttagggaactcgccgagctggggctttgtaataaactgccgaaaatggtgggcgtccaggcggagggcgcggcgccgcttgtcgaggcctgggcccgcggcgtggaggagccgctttttgtagacgagcctaacacagtggcgacggcaattaaaatcggcaggcctataaactggcccaaggcgctgagggccgtgaaggagtcaggaggctttttcgtaaaagtgtctgacggggagatattaaaggcgcagaggctcttggcaactcgcgacggcataggggcggagcccgcgggcgccgcgtcaatagccgcggcgattaaattaaatatagggggagtagccgtggccgtggtaaccggccatgcgctgaaagaccccgacgttatagaaataacagcgaaggaggtgagaaatgcagacgagctgatagagcttttggaaaaatga

SEQ ID NO: 31338 - protein, 348 aa, Pyrobaculum aerophilum str. IM2
MLEVEVRNKVWAPKGNGIWRYSTMLPLKSGISLGEGRTPLVKSNLAENLYVKFEGANPTGSFKDRGMALGVTVAKESGANKVVVASTGNTAASAAAYAARAGLRCYVVLPKGNVARGKLIQAALHGAELVMINGLFDKALDYVVNYGTKYAYPLNSFNPWRLEGQKTVAFEIYEELGCPDYVIVPVGNAGNISAIWKGFRELAELGLCNKLPKMVGVQAEGAAPLVEAWARGVEEPLFVDEPNTVATAIKIGRPINWPKALRAVKESGGFFVKVSDGEILKAQRLLATRDGIGAEPAGAASIAAAIKLNIGGVAVAVVTGHALKDPDVIEITAKEVRNADELIELLEK

SEQ ID NO: 31339 - DNA, 1209 bp, Clostridium perfringens str. 13
  CDS (1)..(1209): transl_table=11
gtgattattttgtatttagaaaaaattattaaagcaaaaaaaaatatagaagatgtagttataaaaacacctttaatatatagcgaggtcttttcaaggaaatctggaaaccaagtgtatatgaaatgtgaaaatttacaattaacaggtgcttacaaaataagaggtgctttaaataaaataagatctttatcagatgaagaaaaatcaaaaggtgttgtttgttcttctgccggaaatcatgctcaaggcgtagcttttgcagcatcacaagctaatgttaaatcaactatagtaatgccaaagactactcctctactaaaaatccaatcaacaaaggatttaggagggaatgttgttttatcaggttatgtttatgatgatgcttttaatgaggctaaaagaattgaacaagaacaaggagccttatttatacatccatttaatgatattgatgtaatttgtggacaaggtacagtagccttagaaatatttgaagatttaaatgatgtagatattattctctgccctataggtggcggtggcttaataagtggagttaccctagctgctaaggctttaaaccctaatgttaaagtaattggagtacaggctgaaggtgcaaatgcaatggttaaaagttttaaggcaggagaaataattgctttagacgctgttgatactattgctgatggaattgcagtaaaaagacctggtgatttaacatttaaatttataaaagaatatgttgatgatataataactgtatcagatcatgaaattgttgaagcattctttacattaagtgaaaaacataaacttttagcagaagcttcaggagcagtctcattagcagcttctgctaaattaaattgtaaagataaaaatatagtatcagtaataagtggtggtaatatagatatggttactataacttcattaataaacagcgcattagtagctaaaggaagactttttggatttagtttagaagttcctcataaaccaggacaaatattgaagattgctaaagttcttgctgatactaatgctaatatagtaaaacttgaacatgatcattttaaagcaagggatgctcttaaaaatatggttatagaagtaactttagagacaaatggacactctcacatagaggaaataaaaaaagctttaacagatcaaaattatgtaataaaacaaatttattaa

SEQ ID NO: 31340 - protein, 402 aa, Clostridium perfringens str. 13
MIILYLEKIIKAKKNIEDVVIKTPLIYSEVFSRKSGNQVYMKCENLQLTGAYKIRGALNKIRSLSDEEKSKGVVCSSAGNHAQGVAFAASQANVKSTIVMPKTTPLLKIQSTKDLGGNVVLSGYVYDDAFNEAKRIEQEQGALFIHPFNDIDVICGQGTVALEIFEDLNDVDIILCPIGGGGLISGVTLAAKALNPNVKVIGVQAEGANAMVKSFKAGEIIALDAVDTIADGIAVKRPGDLTFKFIKEYVDDIITVSDHEIVEAFFTLSEKHKLLAEASGAVSLAASAKLNCKDKNIVSVISGGNIDMVTITSLINSALVAKGRLFGFSLEVPHKPGQILKIAKVLADTNANIVKLEHDHFKARDALKNMVIEVTLETNGHSHIEEIKKALTDQNYVIKQIY

SEQ ID NO: 31341 - DNA, 1185 bp, Pyrococcus furiosus DSM 3638
  CDS (1)..(1185): transl_table=11
atggtgctgaaatgtgtagtctgtgggagagagtatcctgaagacgaagttaggtataggtgtgagtgtggaggtctattagaggttgttatcgatctagataaagttgatacttccatttttaacggtaaggagataaagctgtggaaatatgaaagctggctacccgtaaagaagagagttagtctggaagaaggtggaactcccctatataggttattaaatcttgaaagtgatcttggagtaaaagagctctatgcaaaaaacgagggtgcgaatccaacaggttcatttaaagaccgcggaatgacggttggagtctcgaaggctcttgagctaggaatggataaagtcatatgtgcatctacgggaaatacttcagcatcacttgctgcttatgctgcaaaagcaggaataaaagcatatgtcctaatcccaagtgggaagatagcgttaggaaagcttgctcaagcaataatctatggggctagggttgtaccaatcaaggggaactttgacgatgctctaagagtagtcgtggagacaagcaaagaacttgggatatacatgttaaattcaataaacccattcaggctcgaaggacaaaagacaatagcgtatgagatatatgaccaacttggaaaagttccagacaacgttattctcccagttggaaatgcaggaaacatttctgcaatatggaaggggtttaaggagatgtatgaggctggcgtaatagatgaacttcccaggatgataggaattcaagcagaaggagcatccccattagcgaaggcttggaaagagaaaagaaaattccaacccgaagagagtccagaaaccattgcatcggccataagaataggaaaccccgcaaattggataaaggcatggagggctgttgaagaatctgggggactatttgagagcgtaagtgatgaggaaatactaagagctcagaaacttctagcgtctagggaaggactatttgttgaacctgcttctgcagcatctttagctggcttaattaagctccttgaaagtggtgaaataagcaggaatgagagttacgttttaatcacaactggacatgggctaaaagatccaaatatcgtcataaagaacttccaagttccagaacctatagacccaactttagaagcttttaaggaggtgattgaatga

SEQ ID NO: 31342 - protein, 394 aa, Pyrococcus furiosus DSM 3638
MVLKCVVCGREYPEDEVRYRCECGGLLEVVIDLDKVDTSIFNGKEIKLWKYESWLPVKKRVSLEEGGTPLYRLLNLESDLGVKELYAKNEGANPTGSFKDRGMTVGVSKALELGMDKVICASTGNTSASLAAYAAKAGIKAYVLIPSGKIALGKLAQAIIYGARVVPIKGNFDDALRVVVETSKELGIYMLNSINPFRLEGQKTIAYEIYDQLGKVPDNVILPVGNAGNISAIWKGFKEMYEAGVIDELPRMIGIQAEGASPLAKAWKEKRKFQPEESPETIASAIRIGNPANWIKAWRAVEESGGLFESVSDEEILRAQKLLASREGLFVEPASAASLAGLIKLLESGEISRNESYVLITTGHGLKDPNIVIKNFQVPEPIDPTLEAFKEVIE

SEQ ID NO: 31343 - DNA, 1152 bp, Pyrococcus furiosus DSM 3638
  CDS (1)..(1152): transl_table=11
atgcttaggtgcacttcatgtggaagaatgtattcatttgacagcccatatcaaaggtgcgaatgtggagagcctttggaacttgagcttttcaatgggatgtataaaaagaaaggaaagagggtatgggaaaggttttctgagttctttcctctcgaactagatccagagttaagcttgggagaaggagatactccattaacaagagcaaagaagctttcgaaagaacttggaattgagctatatttaaaaaacgagactataaatcccacgtggagttttaaagataggggaacctacctgggaattcatagggcgatacaacttgactttagaaggattgggacggtatcaacgggaaatatggcggcaagtgttgccgcatatggagctcattctgagctcgaagtttacattttggtttcctcaacaataccagaggaaaagattaaggccttagctccctatggagcaaagattgtaaaggttcatggggactatggggaactctattatagggccctagaaatagggcagaaaaagggaatatatttcataaactcggatgatccctttagagttgaagggtataagagcataagcttcgagataagtgaggagataactccagactacgtaatagtccctacgtcatctggaggcctatttagaggtattgtgaaggggtttctggaagccaagaatagtggactaatagaaaagctccctagattttttgtggtacaggctgagggctgttctccaatatgtaaagcattcaacgctggaaaagaaaagatagagagatttgaaaatccccatacaatcgcccatgcaatagaaaatccatatcctccaagtggaaatgcagtcctaagattgctgaagaaattgaatggcatttgtaccacggttacagatgaagagattctagaggcccagaaaatcctgggaagagaaggaatttttgttcaactcgcatctgcaacaggaatagccgcagtaaaaaagctaaggcgaaaaggaattatcaaagaaggagcaattgtagttagcattcttacgggctctggattaaagacattgaggtacattaagcaaccaaaagtcgaggaatgctctttacaaagattagaagagtgcattggataa

SEQ ID NO: 31344 - protein, 383 aa, Pyrococcus furiosus DSM 3638
MLRCTSCGRMYSFDSPYQRCECGEPLELELFNGMYKKKGKRVWERFSEFFPLELDPELSLGEGDTPLTRAKKLSKELGIELYLKNETINPTWSFKDRGTYLGIHRAIQLDFRRIGTVSTGNMAASVAAYGAHSELEVYILVSSTIPEEKIKALAPYGAKIVKVHGDYGELYYRALEIGQKKGIYFINSDDPFRVEGYKSISFEISEEITPDYVIVPTSSGGLFRGIVKGFLEAKNSGLIEKLPRFFVVQAEGCSPICKAFNAGKEKIERFENPHTIAHAIENPYPPSGNAVLRLLKKLNGICTTVTDEEILEAQKILGREGIFVQLASATGIAAVKKLRRKGIIKEGAIVVSILTGSGLKTLRYIKQPKVEECSLQRLEECIG

SEQ ID NO: 31345 - DNA, 1338 bp, Pyrococcus furiosus DSM 3638
  CDS (1)..(1338): transl_table=11
atgaaatgtccgaaatgcgggagagagtggactacttttattccccccttttgtacttgtggggctgaacttgaaattagctatgactactctaaagtagatgttagaaagtggaagaacagactttcttctgtatggaaatatcgagagcttcttccccctgtaaagagaatgattacactgcgagagggtggaactccgttaataaaggcaagaatttcagaaaaaattgggatagatgtgtatattaaggatgaaactagaaatcccacaggttcatttagggatagactagctacagttgccatttcttatggtttaccttatgcatccaacggatttattgtagctagtgatggaaatgctgcagtttcagttgcagcttatgctgcaagagctgaaaaggaagcgtttgtagtaatcccaaggaaagttgacagggggaagttaatacagatgatggcctttggggccaaaatcattagatttggggaaagtgttgacgaggcaatagagtatgcaagggaaatagcaaagctcaatggcctttataacgtcacgccagaagataatattattggacttgaaggtcaaaaaacaatagcctttgaactttgggaagagctaaatcccacccacgtagtagttccaactggtagtggaagttatatttattcaatttacaagggatttaaggagttaatggaaatcggggttcttgaggaaattcctaatttgatagccgttcaaactgataaatgcaatcctatagcatctgaagttctgggaacaaagaagaaatgcacagaaacaaaagctctcggcttgtacgttaaaaatccagttatgaaaaacaaggcagttaaagctataaaagaaagcaaaggtactgcagtaattgtaaatgaggaagaaatcatgagaggagaaaaattacttgcaagtgagggcatttatgcagaattatcctcagccgtagtcatgccggctttgctaaagcttaaagaaaatgggtttatagaaaaaggagacaaagttgtactagtagttacaggttctggtttaaaaactggagaaggtggaaaagagaaattttcaattggaccaactaaaattgagatacttaggctgttgaaagaaagagaaatgtatgcatatgagatctggagcttacttgggaaacctctaaagtaccaagcagtccatcagcacattaaggagttacttgaattgggattagttgaacaggcatatagaaagggaaagagggtatattacaagataactgaaaaaggattgagaattctacaaaacttcgaagacctagagaacatttaa

SEQ ID NO: 31346 - protein, 445 aa, Pyrococcus furiosus DSM 3638
MKCPKCGREWTTFIPPFCTCGAELEISYDYSKVDVRKWKNRLSSVWKYRELLPPVKRMITLREGGTPLIKARISEKIGIDVYIKDETRNPTGSFRDRLATVAISYGLPYASNGFIVASDGNAAVSVAAYAARAEKEAFVVIPRKVDRGKLIQMMAFGAKIIRFGESVDEAIEYAREIAKLNGLYNVTPEDNIIGLEGQKTIAFELWEELNPTHVVVPTGSGSYIYSIYKGFKELMEIGVLEEIPNLIAVQTDKCNPIASEVLGTKKKCTETKALGLYVKNPVMKNKAVKAIKESKGTAVIVNEEEIMRGEKLLASEGIYAELSSAVVMPALLKLKENGFIEKGDKVVLVVTGSGLKTGEGGKEKFSIGPTKIEILRLLKEREMYAYEIWSLLGKPLKYQAVHQHIKELLELGLVEQAYRKGKRVYYKITEKGLRILQNFEDLENI

SEQ ID NO: 31347 - DNA, 1803 bp, Schizosaccharomyces pombe
  CDS (1)..(1803)
atgactggaacgagtttttacacttcggtactcagattgggacgattggctcaacagggcctaaaattccaatctgtaaaacatattcgtccatcatgtttttcatcttttggattacaagctaaacgttggaactctactcaacaaaatgatagttctattgattgtttagaacctaagctgcaaggaattattgaagacaatatttctccctcgacggcacaaaaagaaatatcagacatcaagtttaatattccaaaggaaatgcttcttccagatggaactcctgattatttacgtttgactctcacgtctaacgtgtatgaagttatcaaggagactcctcttacaaagggtgttgtcatttctgaaagtaccggtgttccagtctacttaaaacgtgaagatctcactcctgtgttttcatttaaaattcgaggggctcataataaaatggcttctcttgataagcagtcattgaaaaatggagtcattgcttgttccgctggcaatcacgcccagggtgttgcttactccgctaggactcttggtgtaaaagctaccattgttatgcctcagaatactcctgaaatcaaatggaggaacgttaagagattgggcgctaatgttctcttacatggagctaattttgacattgctaaagcagaatgtgcacgtttggctaaagagcaaaatctcgaagttattcatccctttgacgatccttatgtaattgctggacaaggaaccattggacttgaaattcttcatcaaatagatcttcgcaagctggatgctatttactgcgctgttggcggtggtggtttaattgctggaatagctacttacgttaagcgtattgctccccatgttaaggtcattggtgtcgagacatttgacgctgatgctttaaaaaagtctttgaaggacaaaaagcgggtaacccttaaggaagttggcttattcgctgatggaactgctgtgaaacttgttggagaggaaaccttccgtcttgtctccaagaatattgacgatgtagttcttgttgacaaagatgagatttgtgcagccattaaggatgtttttttggatacccgttcagtggtcgaaccatcaggagctatggctgttgctggtatgaagcgttatgtcgctaaacacaagcctaaaaatcccaatgctgctcaggtttgcatcttaagtggtgccaatatggactttgatcgccttagatttattgctgagcgtgctgatcttggtttgaacaaggaagtattcttgagtgtcactattcctgagcgccctggttcatttgaagccctacacaacattattactccacgtagtattaccgaattttcttatcgttacgataatgatgactatgctaacatttacacatcgtttgtggtaaaggaccgtgcaactgaattgcctttgattcttcaacaaatctctgagcaaaatatggttgcagaagatatcagcgataatgaacttgctaaaactcatgcccgttatcttattggaggaaaatcatctgtttcaaaagagcgtttgtaccgattggatttccctgaacgccctggagctttatgtaagtttttgaggagtataaaggaagtttgcagcatttcccttttccattatcgtaattgtggtggagatatagctagtgtgcttgctggccttagagtttttgatggccaagtggaaaaacttcattcagttttggaagagattggatacaactgggtggacgaaacaaataatcccgtttacttgcgctatcttcgtaaatag

SEQ ID NO: 31348 - protein, 600 aa, Schizosaccharomyces pombe
MTGTSFYTSVLRLGRLAQQGLKFQSVKHIRPSCFSSFGLQAKRWNSTQQNDSSIDCLEPKLQGIIEDNISPSTAQKEISDIKFNIPKEMLLPDGTPDYLRLTLTSNVYEVIKETPLTKGVVISESTGVPVYLKREDLTPVFSFKIRGAHNKMASLDKQSLKNGVIACSAGNHAQGVAYSARTLGVKATIVMPQNTPEIKWRNVKRLGANVLLHGANFDIAKAECARLAKEQNLEVIHPFDDPYVIAGQGTIGLEILHQIDLRKLDAIYCAVGGGGLIAGIATYVKRIAPHVKVIGVETFDADALKKSLKDKKRVTLKEVGLFADGTAVKLVGEETFRLVSKNIDDVVLVDKDEICAAIKDVFLDTRSVVEPSGAMAVAGMKRYVAKHKPKNPNAAQVCILSGANMDFDRLRFIAERADLGLNKEVFLSVTIPERPGSFEALHNIITPRSITEFSYRYDNDDYANIYTSFVVKDRATELPLILQQISEQNMVAEDISDNELAKTHARYLIGGKSSVSKERLYRLDFPERPGALCKFLRSIKEVCSISLFHYRNCGGDIASVLAGLRVFDGQVEKLHSVLEEIGYNWVDETNNPVYLRYLRK

SEQ ID NO: 31349 - DNA, 933 bp, Corynebacterium glutamicum ATCC 13032
  CDS (1)..(933): transl_table=11
atgctcaccctcaacgatgtcatcaccgcccaacaacgaaccgcccctcatgttcgacgaacgccacttttcgaagcagaccccatcgacggcacacaaatctggatcaaagcagagttcctccaaaagtgcggcgtgttcaaaacgcgtggagcattcaaccgccagctcgcagcttcggaaaacggactactcgacccaacggttggcatcgtcgcggcatcaggcggaaacgcaggactcgcaaatgcttttgccgcagcatccttaagcgttcccgccacggtattggtgcccgaaactgccccacaagtaaaagttgatcgcctcaagcaatacggtgcaaccgtgcaacaaatcggatctgaatatgcggaagcatttgaggcagctcaaacctttgagtcggaaactggtgctctgttttgccacgcctacgaccagcccgacatcgcagctggagcaggcgtcattgggctagaaattgtcgaagatcttcccgacgttgacaccatcgtggttgctgtcggtggcggtggactctatgcaggaatcgcagccgtcgtagcagcccacgacatcaaagtggtggccgttgaaccctccaaaattccaaccctgcacaactcactcattgccggccaaccagtcgatgtgaacgtttctggtatcgcggcagattctttgggggctcgccaaattggacgagaagcctttgacatcgcaactgcccatcccccaataggcgtcctagtggacgatgaagcaatcatcgcagctcgacgccacctctgggacaactaccgcatccctgccgagcatggcgctgccgcagcactcgcctctcttaccagtggagcatacaaacctgcagcagatgaaaaagtggcagtcattgtgtgcggagcgaacactgacctcacaacactgtga

SEQ ID NO: 31350 - protein, 310 aa, Corynebacterium glutamicum ATCC 13032
MLTLNDVITAQQRTAPHVRRTPLFEADPIDGTQIWIKAEFLQKCGVFKTRGAFNRQLAASENGLLDPTVGIVAASGGNAGLANAFAAASLSVPATVLVPETAPQVKVDRLKQYGATVQQIGSEYAEAFEAAQTFESETGALFCHAYDQPDIAAGAGVIGLEIVEDLPDVDTIVVAVGGGGLYAGIAAVVAAHDIKVVAVEPSKIPTLHNSLIAGQPVDVNVSGIAADSLGARQIGREAFDIATAHPPIGVLVDDEAIIAARRHLWDNYRIPAEHGAAAALASLTSGAYKPAADEKVAVIVCGANTDLTTL

SEQ ID NO: 31351 - DNA, 1215 bp, Fusobacterium nucleatum subsp. nucleatum ATCC 25586
  CDS (1)..(1215): transl_table=11
atggctaagttagaagcttttataaaagcaaaagaaaaattatcaaaagtacttttagaaacacagttaatttacagtcctatattctcaaaagaatctggaaacaaagtattcatcaagcctgagaacttacaaaaaacaggttcatttaagataagaggagcatacaataaaatttctaatctaacagatgctgaaaagaaaagaggtgtaattgcctcatctgctggaaatcacgctcaaggtgttgcttatggtgctaaggaatctggtataaaggcagttattgtaatgcctaaatctactcctcttataaaagttgaatctacaaaacaatatggagcagaagttattttacatggtgatgtttatgatgatgcctttaaaaaagcaaaagaattagaagaaaaagaaggttatgtgtttgtccatccttttaatgatgaagatgttttagatgggcaaggaacaatagccctagaaattttagaagaacttcctgaaactgatattatacttgttcctattggtggtggtggtttaatttcaggtatagcttgtgctgcaaaaatattaaaacctgaaataaaaattattggtgttgaaccagaaggagctgcttctgcttatgaagctataaaggaaaataaagttgttgaacttaaagaagctaatacaatagctgatggaaccgctgtaaagaaaattggagacctaaactttgaatatattaaaaaatatgttgatgaaattataacagtatctgattatgaattgatggaagcatttttattattagtagaaaaacataaaattattgcagaaaattctggtatattatcaatagctgctacaaaaaaacttaaggaaaaaaataaaaaagttgtatctgtcataagtggtggtaatatagatgtcttaatgatttcatctatgattaataaaggacttatcagaagagatagaatctttaattttacagttagcattcctgataaaccaggtgaattagcaaaagttgtagatttaatcgctgaacagggggctaatgtgataaaacttgaacataatcaatttaaaaatctatcaagatttaaggacattgaattacaaattactgttgaaactaatggaagtgaacatgtccaaaatttaactcaagcttttgaagaaaaaggttatgaaatagtaagaatcaaatctaaaataaattaa

SEQ ID NO: 31352 - protein, 404 aa, Fusobacterium nucleatum subsp. nucleatum ATCC 25586
MAKLEAFIKAKEKLSKVLLETQLIYSPIFSKESGNKVFIKPENLQKTGSFKIRGAYNKISNLTDAEKKRGVIASSAGNHAQGVAYGAKESGIKAVIVMPKSTPLIKVESTKQYGAEVILHGDVYDDAFKKAKELEEKEGYVFVHPFNDEDVLDGQGTIALEILEELPETDIILVPIGGGGLISGIACAAKILKPEIKIIGVEPEGAASAYEAIKENKVVELKEANTIADGTAVKKIGDLNFEYIKKYVDEIITVSDYELMEAFLLLVEKHKIIAENSGILSIAATKKLKEKNKKVVSVISGGNIDVLMISSMINKGLIRRDRIFNFTVSIPDKPGELAKVVDLIAEQGANVIKLEHNQFKNLSRFKDIELQITVETNGSEHVQNLTQAFEEKGYEIVRIKSKIN

SEQ ID NO: 31353 - DNA, 1212 bp, Methanopyrus kandleri AV19
  CDS (1)..(1212): transl_table=11
ttgcattacgtcctggagtgtgttgaatgcggttcggagttcgatgatgactcactggtacggtgccccgagtgcggaggactcctggaggtggcactgcgctacgacgaaatcgaggtgagtcggtcgacgttcgagggtcgtcgcctcggcgtatgggccttccgggagctcctaccagtgaacacggacgatcccgtcacgatgtccgagggcggtacgggcttacacccgtgtccgagactgggcgaggagctcggtgttagggagctgttcgtgaagaacgagggcgagaaccccacgggctccttcaaggatcggggaatgaccgtgggagttaccaaggccgtggagctcggtgcggaggtcgtcgcatgtgcctcgacgggcaacacatcggcctcgttggccgcctacgccgcccgcgcgggccttacgtgtgccgtcctccttccggccggtaaggtggccctaggcaaactcgctcaagccctcttccacggtgcccgcgtgattccagtgaacggcaacttcgacgacgccttggatgtcgtgaagaagctggccgatgagggcatcgtgtacattctaaactccgtgaacccgttccgcctctccggtcagcgtaccatcgcgtacgagatctgcttgcagttggactgggaggtccccgacgcggtcgtcgtgccggtcggtaacgcgggtaacatcagcgcgatctggcaggggttcctcgatctctacaggctgggaatcatcgacgagctcccgaggatgtacggagtacaggcggagggtgctcgaccgatcgtcgaggcgattcggcggggcaaggaggacatcgaaccggatcccgagcccgaaaccgtcgccaccgcgatccgcatcggtaacccagtgaacgccatcaaggctctccgtgccatccggtgttcgggcggctgggccgtagaggtctccgacgaggaaatactctcggcgcagcgtgagctcgcaacgcgggaggggatcttcgtggagccggcgagtgccgcctcgatagcgggactcaggaagttcgtggaggagggtgagatcgacgccgacgagcgggtggtctgcgtgaccaccggacacggtttgaaggatccggagacggtcatggaagtgtgtgagctgcctgaacccgtggaaccggatcccgagaccatacagcgtttaatcgccgagtga

SEQ ID NO: 31354 - protein, 403 aa, Methanopyrus kandleri AV19
MHYVLECVECGSEFDDDSLVRCPECGGLLEVALRYDEIEVSRSTFEGRRLGVWAFRELLPVNTDDPVTMSEGGTGLHPCPRLGEELGVRELFVKNEGENPTGSFKDRGMTVGVTKAVELGAEVVACASTGNTSASLAAYAARAGLTCAVLLPAGKVALGKLAQALFHGARVIPVNGNFDDALDVVKKLADEGIVYILNSVNPFRLSGQRTIAYEICLQLDWEVPDAVVVPVGNAGNISAIWQGFLDLYRLGIIDELPRMYGVQAEGARPIVEAIRRGKEDIEPDPEPETVATAIRIGNPVNAIKALRAIRCSGGWAVEVSDEEILSAQRELATREGIFVEPASAASIAGLRKFVEEGEIDADERVVCVTTGHGLKDPETVMEVCELPEPVEPDPETIQRLIAE

SEQ ID NO: 31355 - DNA, 1056 bp, Thermoanaerobacter tengcongensis MB4
  CDS (1)..(1056): transl_table=11
atggcgtacgaaggaattataaaagcttatagagagtttttgcctcctataagagatgaaaatattgtcacgttaaaagagggcaacacacctttaattgaagcttttaacctccaaagaaaatatttgccgggtataagggtgtatctaaaatacgaagggctaaatcccacaggttcttttaaggacagggggatgacggtagcggtatctcaagcaaagcaagaagggtctaatgccgtcgtatgcgcctcaacaggcaacacttctgcttctgcagcagcctatgcagcaaaagcaggccttaaaagtgtggtattaattcctggcggtaaaattgctctggggaaactcgcacaggcaattgcttatggggcagaggttattgcggtagatggcaattttgatgacgctttaaggcttgtgagagaaatttcgcagaaattcccgattactttggtaaattctataaacccctatcgcctggaaggccaaaaaacggcagcttttgaaatatgtgatgctttgggagaagtaccagactatgtctctcttcctgtgggcaatgcaggaaatataactgcttactggatgggatttaaagaatactaccggaaggggaagataaaaaagcttcccaaaatgcttggctttcaggcggcaggagcggctcctattgtggaaggaagagtaatagaaaatcccgagacgattgccacggctataagaattggcaaccctgccagctggcagaaggcagtggctgcaagagatgagtcgggggggataattgacaaagttacggatgaggaaatactggaggcttattcaattttggcaaaaacagaggggatttttgcagagccagcctctgcagcctccatagcgggtgtgataaagaagtacaaagaaggattttttaaagaaggagattctgtggtgtgtatccttacggggaatggtttaaaagaccctgatactgctgttaaactagggggagaggtaaagagaatacagccaaatctaaaggaattggaggaagttttgtatggatag

SEQ ID NO: 31356 - protein, 351 aa, Thermoanaerobacter tengcongensis MB4
MAYEGIIKAYREFLPPIRDENIVTLKEGNTPLIEAFNLQRKYLPGIRVYLKYEGLNPTGSFKDRGMTVAVSQAKQEGSNAVVCASTGNTSASAAAYAAKAGLKSVVLIPGGKIALGKLAQAIAYGAEVIAVDGNFDDALRLVREISQKFPITLVNSINPYRLEGQKTAAFEICDALGEVPDYVSLPVGNAGNITAYWMGFKEYYRKGKIKKLPKMLGFQAAGAAPIVEGRVIENPETIATAIRIGNPASWQKAVAARDESGGIIDKVTDEEILEAYSILAKTEGIFAEPASAASIAGVIKKYKEGFFKEGDSVVCILTGNGLKDPDTAVKLGGEVKRIQPNLKELEEVLYG

SEQ ID NO: 31357 - DNA, 1230 bp, Streptomyces coelicolor A3(2)
  CDS (1)..(1230)
atgagctacagcacagcgtcctgcgtcgctcccgtcaccctcgacgacgtgcgcggagcccagaagatgctctcgggcgtggcgcgggtgacggccatggagggcagcaggcacctctcccagctggtcggctcgccggtgcacctcaagtgcgagaacctccagcggacgggctcgttcaagctgcgcggcgcctacgtgcggatcgccgggctgctccccgagcagcgggccgcgggcgtggtcgcggcgagcgcgggcaaccacgcgcagggcgtcgcgctggcctcgtcgctgctcggtgtgcgctcgacggtgttcatgccgcagggggcgccgctgcccaagatcagcgcgacccgggactacggcgccgaggtgcggctgcacggccaggtggtggacgagacgctggccgccgcgcaggagtacgcggagcggaccggcgcggtcttcatccaccccttcgaccaccccgacgtcatcgcgggccagggcacggtcgggctggagatcctggagcagtgccccgaggtgcggaccgtcgtcgtcggcatcggcgggggcggactggcggccgggatcgcggtcgcggtgaaggcgctgcggccggacgtgcggatcgtcggcgtgcaggcggagggcgcggccgcctacccgccctcgctggccgccggacgcccggtcgccgtgcagaacccggcgacgatggccgacgggatcaaggtggggcggcccggcgacgtgccgttcgggatcgtcggcgaactggtggacgaggtccgcacggtctccgaggacgcgctgtcgaccgcgctgctgctgtgtctggagcgggccaagctggtcgtggagccggccggagcgagcccggtggcggcgctgctgagcgagccggacgccttcgagggaccggtcgtcgcggtcctgtccggcggcaacgtggacccggtgctgatgcagggtgtgctgcggcacggcatggccgcgcagggccgctacctggcggtccggctgcggctgacggaccggcccggcgccctggccacgctgctcggggtgttgtcagtggtcgacgctaacgtcctcgatgtgagccacgtccgaacccatccgcggctcgggctcacggaggcggaggtcgagctgcacctggagacgaagggcccggagcactgcaccgaggtcggccgcgtgctgcgggaagcgggatacacggtcatcgcctga

SEQ ID NO: 31358 - protein, 409 aa, Streptomyces coelicolor A3(2)
MSYSTASCVAPVTLDDVRGAQKMLSGVARVTAMEGSRHLSQLVGSPVHLKCENLQRTGSFKLRGAYVRIAGLLPEQRAAGVVAASAGNHAQGVALASSLLGVRSTVFMPQGAPLPKISATRDYGAEVRLHGQVVDETLAAAQEYAERTGAVFIHPFDHPDVIAGQGTVGLEILEQCPEVRTVVVGIGGGGLAAGIAVAVKALRPDVRIVGVQAEGAAAYPPSLAAGRPVAVQNPATMADGIKVGRPGDVPFGIVGELVDEVRTVSEDALSTALLLCLERAKLVVEPAGASPVAALLSEPDAFEGPVVAVLSGGNVDPVLMQGVLRHGMAAQGRYLAVRLRLTDRPGALATLLGVLSVVDANVLDVSHVRTHPRLGLTEAEVELHLETKGPEHCTEVGRVLREAGYTVIA

SEQ ID NO: 31359 - DNA, 1218 bp, Methanosarcina mazei Go1
  CDS (1)..(1218): transl_table=11
atgtatcatctaaaatgtatcgagtgcggtgcagagtattcaaaagatgaagtaatctatacatgcagcaaatgcgatgggctgcttgatgttatttatgattattcctcaattaaactcgacatggaaaaattaaagaccgaatgtccttcggtctggaaatatgcagaacttctccccatagaaagagaacctgtgaccatacatgaaggcgggaccccactttacagatgcgatcgccttgccgaaaagatagggattaaagaactctatgtaaaacatgaaggaatgaacccgactggctcatttaaagatagagggatgactgttggggttacaaaagcacttgaactcggaatgagtaccgtcgcctgtgcatcaaccgggaacacgtcggcagcccttgcaatctatggggcaaaagcaggaatacctgtggttgtgcttcttccggctggaaaagttgcccttggaaaggtagcccaggcacttatgcacggggcaaaagtcctcagcatccgcggaaactttgatgatgcactcgctcttgtgcgcactctctgctcccaggaaaagatctacctcttaaactcgatcaacccttacaggctggaaggccagaagaccatcggcttcgagattgcagaccagctcggcttcaaagttcctgacaggattgtcctgcccgtaggaaatgcaggcaatatcactgctatctacaagggtttcagggagttcaagctccttggcatcacggactccctcccgaagatgacgggaattcaggcagcaggctcctgccccatagtaaaagccattaaaaacggggctccggaaatcactcccgaagagaacccggagacggttgcaacggcaatcaggataggaaaccctgtgaacgcaacaaaagccctgaacgctataagggaatccggcggtactgcggagtccgtaactgatgaagaaatccttgcagcccagaaagaccttgcaaggcttgagggtataggagtcgaacctgcaagtgcagcctcggtagctggtcttaagaaactcgttgacatgggagtcataggcagggacgaaacagtagtctgcattaccacaggccacctccttaaagacccccagaccgttattgacatctgtgaggaacctactgtcgttgatgcaaacatcgagtccatccgggaagcgattttcgggaagggaaaataa

SEQ ID NO: 31360 - protein, 405 aa, Methanosarcina mazei Go1
MYHLKCIECGAEYSKDEVIYTCSKCDGLLDVIYDYSSIKLDMEKLKTECPSVWKYAELLPIEREPVTIHEGGTPLYRCDRLAEKIGIKELYVKHEGMNPTGSFKDRGMTVGVTKALELGMSTVACASTGNTSAALAIYGAKAGIPVVVLLPAGKVALGKVAQALMHGAKVLSIRGNFDDALALVRTLCSQEKIYLLNSINPYRLEGQKTIGFEIADQLGFKVPDRIVLPVGNAGNITAIYKGFREFKLLGITDSLPKMTGIQAAGSCPIVKAIKNGAPEITPEENPETVATAIRIGNPVNATKALNAIRESGGTAESVTDEEILAAQKDLARLEGIGVEPASAASVAGLKKLVDMGVIGRDETVVCITTGHLLKDPQTVIDICEEPTVVDANIESIREAIFGKGK

SEQ ID NO: 31361 - DNA, 960 bp, Xanthomonas campestris pv. campestris str. ATCC 33913
  CDS (1)..(960): transl_table=11
atgatcgaaacgcttcttcctgcctattccgacgtcctgcaggcggctgcacgcattgccccgcacaccgcaccgaccccgttgctgcgctcgcacacgctggacacgctcagcggtgcgcagctgatgttcaaggccgagcacctgcagcgcagcggtgcgttcaaattccgcggcgcctgcaatgcggtctgggcgttgccggccgagaccgccgcacatggcgtggtgacgcactcttccggcaaccatggcgcggcgctggcactggccgcgcgcacccgcggcatcggctgccatgtggtggtgcccgaaggcgcggtggctgccaagctggccaatatttcccggcatggcgccaccttgtggcgctgcgcgccgaccatcgctgcgcgcgagcagctatgcgccgaggtccaggccagcagcggtgcgaccctggttcacccgtataccgatccggcggtgattgccggccagggcaccgcaacgctggagctgttgcacgacagcggcggcctggatgtgctggtggcgcccgtgggcggcggcgggctggcggccggggcggccctggcgctgcaggcttcgcccggttgcgcgctggtgctggccgagccggcgggtgcagccgacaccgcgcggtcgctggcggcagggcagcggctggtggacttcgttcccgacaccgtgtgcgacgggctgcgcggcaccctgggggcgcccaacttcgcgctgctgcaggccgccggagcgcaggtcatcaccgttgacgatgccgccgtggtgcaggccatgcgcctgctctggcaggtcttgaaacaggtggtggaaccgtcgtcggccatcgcgctggcggccgtgctggccgacccggcgcgctttgccgggaagcgggtgggcgtcatcttgtctggcggcaacgtcgacctggacgccttgccgtgggccgccgcgtga

SEQ ID NO: 31362 - protein, 319 aa, Xanthomonas campestris pv. campestris str. ATCC 33913
MIETLLPAYSDVLQAAARIAPHTAPTPLLRSHTLDTLSGAQLMFKAEHLQRSGAFKFRGACNAVWALPAETAAHGVVTHSSGNHGAALALAARTRGIGCHVVVPEGAVAAKLANISRHGATLWRCAPTIAAREQLCAEVQASSGATLVHPYTDPAVIAGQGTATLELLHDSGGLDVLVAPVGGGGLAAGAALALQASPGCALVLAEPAGAADTARSLAAGQRLVDFVPDTVCDGLRGTLGAPNFALLQAAGAQVITVDDAAVVQAMRLLWQVLKQVVEPSSAIALAAVLADPARFAGKRVGVILSGGNVDLDALPWAAA

SEQ ID NO: 31363 - DNA, 960 bp, Xanthomonas axonopodis pv. citri str. 306
  CDS (1)..(960): transl_table=11
atgatcgagacggtcccccttgcccattccgacgtcctgcaagccgctgcgcggatcgcgccgcactgcgcgccgacaccgttgctgacatcgcacagcctagatgcgctcagcagtgcgcagttgttcttcaaggccgagcatctgcagcgcagtggcgcattcaagttccggggtgcctgcaatgccgtatggtcgctgccggacgcgctggctgcgcgcggtgtggtcacgcattcctccggcaatcacggcgcggcgctggcgcttgccgcacgcacgcgcggcatcggctgccacgtggtggtgcccgagggcgcggtggcggccaagctcgccaatatctcccggaacggcgccacgttgtggcgttgcgcgccgaccatcgcggcgcgggaacagatgtgcgctgaggtgcaggccggcagcggcgccacgctggtgcacccgtataccgatcgtgcagtgatcgccgggcagggcaccgccacgctggagttgctgcaccagagcggcgtgctggatgtgctggtggcgcctgtcggcggtggtgggctggcggccggtgccgcactggcgctgcaggcttcgccggactgcgagctggtgctggccgagcctgccggcgcagccgacaccgcgcgttcgctggcggccgggcagcggctggtcgatttcgtgccggacaccatttgcgacggcctgcgcggcaccttgggcgcgcccaacttcgccgtgctgcagcgcgccggtgcgcaggtgatcacggtggacgatgccgcggtggtgcaggccatgcggctggtctggcagttgctcaagcaagtggtcgagccgtcttcggcgatcgccctggctgcggtcctggcccagccggcacggtttgccgggcggcgagtggggctgatcctgtccggcggcaatgtcgatctggacgccttgccttgggtcgcggcgtga

SEQ ID NO: 31364 - protein, 319 aa, Xanthomonas axonopodis pv. citri str. 306
MIETVPLAHSDVLQAAARIAPHCAPTPLLTSHSLDALSSAQLFFKAEHLQRSGAFKFRGACNAVWSLPDALAARGVVTHSSGNHGAALALAARTRGIGCHVVVPEGAVAAKLANISRNGATLWRCAPTIAAREQMCAEVQAGSGATLVHPYTDRAVIAGQGTATLELLHQSGVLDVLVAPVGGGGLAAGAALALQASPDCELVLAEPAGAADTARSLAAGQRLVDFVPDTICDGLRGTLGAPNFAVLQRAGAQVITVDDAAVVQAMRLVWQLLKQVVEPSSAIALAAVLAQPARFAGRRVGLILSGGNVDLDALPWVAA

SEQ ID NO: 31365 - DNA, 1119 bp, Xanthomonas axonopodis pv. citri str. 306
  CDS (1)..(1119): transl_table=11
atgcctgattccggccgcccttccgcacaggagccagaggtaggcgacgtggccgtgagcgtggccgacgtgctggccgcacaggcacgcctgcgcaagtacctgtcgcccacgccgctgcactacgccgaacgcttcggtgtgtggttgaagctggagaatttgcagcgcaccggctcctacaaggtgcgcggcgcattgaatgcgttgctggccgggctggaacgcggcgatgagcgcccggtgatctgcgcctcggccggcaaccacgcgcaaggtgtggcgtggtcggcgtaccggctgggtgtgcaggccatcacggtaatgccctatggcgcgccgcagaccaagattgccggtgtcgcgcattggggtgccacggtgcgccaacatggcaacagctacgacgaagcgttcgcgtttgcgcgcgagctggccgaccagaacggctatcgcttcctgtccgccttcgacgacccggacgtgatcgccggccagggcacggtgggcatcgagctggcggcgcatgcgccggacgtggtgatcgtgccgatcggcggcggtggcctggcctccggcgtggcgctggcattgaagtcgcaaggcgtgcgcgtggtcggggcgcaggtggaaggcgtggattcgatggcgcgcgccgtccgcggcgatctgcgcgaaatcgctccggtcccaacgctggccgatggcgtgaaggtcaagattccaggcctgctcacgcgccgcctgtgctcgagcctgctcgatgatgtcgtgatcgtgcgcgaggccgaattgcgcgaaacattggtgcgcctggcactggacgaacacgtcattgccgagggcgctggcgccctcgccctggccgccggtcgccgcgtttccggcaaacgcaaatgtgcggtggtctctggcggtaatatcgacgcaaccgtgctggccacactcttgtccgaggtgcggccgcgtccgccacgcaagccgcgccgccgcaataccgagcgactccgcaacgaacgcagcgccaatccgccacccgccacacacgttctttcccgcccatccgcagtcgcttcaacgcctgtcaccgccatcgccgtagaggagtcttcctggtga

SEQ ID NO: 31366 - protein, 372 aa, Xanthomonas axonopodis pv. citri str. 306
MPDSGRPSAQEPEVGDVAVSVADVLAAQARLRKYLSPTPLHYAERFGVWLKLENLQRTGSYKVRGALNALLAGLERGDERPVICASAGNHAQGVAWSAYRLGVQAITVMPYGAPQTKIAGVAHWGATVRQHGNSYDEAFAFARELADQNGYRFLSAFDDPDVIAGQGTVGIELAAHAPDVVIVPIGGGGLASGVALALKSQGVRVVGAQVEGVDSMARAVRGDLREIAPVPTLADGVKVKIPGLLTRRLCSSLLDDVVIVREAELRETLVRLALDEHVIAEGAGALALAAGRRVSGKRKCAVVSGGNIDATVLATLLSEVRPRPPRKPRRRNTERLRNERSANPPPATHVLSRPSAVASTPVTAIAVEESSW

SEQ ID NO: 31367 - DNA, 1041 bp, Staphylococcus aureus subsp. aureus MW2
  CDS (1)..(1041): transl_table=11
atgacaaccaacacagttacattacaaacagcacatattgtaagtttaggagatatcgaagaagctaaagcaagcattaaaccatttattcgtcgaacacctctaattaaatcaatgtatttaagccaaagtataactaaagggaatgtatttctaaaattagaaaatatgcaattcacaggatcttttaaatttagaggcgctagcaataaaattaatcacttaacagatgaacaaaaagaaaaaggcattatcgcagcatctgctgggaaccatgcacaaggtgttgctttaacagctaaattattaggcattgatgcaactatcgtaatgcctgaaacagcaccacaagcgaaacaacaagcaacaaaaggctatggggcaaaggttattttaaaaggtaaaaactttaacgaaactagactttatatggaagaattagcgaaagaaaatggcatgacaatcgttcatccatatgacgataagtttgtaatggcaggccaaggaacaattggtttagaaattttagatgatatttggaatgtgaatacagtcatcgtaccagttggcggtggaggattaattgcaggtattgccaccgcattaaaatcatttaacccttcaattcatattatcggtgttcaatctgagaatgttcatggtatggctgagtctttctataagagagatttaactgaacatcgagtggatagcacgatagcagatggttgtgatgtaaaagttcctggtgaacaaacatatgaagtagttaaacatttagtagatgaatttattcttgttactgaagaagaaattgaacatgctatgaaagatttaatgcagcgtgccaaaattattactgaaggtgcaggcgcattaccaacagctgcaattttaagtggaaaaataaacaataaatggcttgaagataaaaatgttgttgctttagtttcaggcgggaatgttgacttaactagagtttcaggtgtcattgaacatggactgaatattgcagatacaagcaagggtgtggtaggttaa

SEQ ID NO: 31368 - protein, 346 aa, Staphylococcus aureus subsp. aureus MW2
MTTNTVTLQTAHIVSLGDIEEAKASIKPFIRRTPLIKSMYLSQSITKGNVFLKLENMQFTGSFKFRGASNKINHLTDEQKEKGIIAASAGNHAQGVALTAKLLGIDATIVMPETAPQAKQQATKGYGAKVILKGKNFNETRLYMEELAKENGMTIVHPYDDKFVMAGQGTIGLEILDDIWNVNTVIVPVGGGGLIAGIATALKSFNPSIHIIGVQSENVHGMAESFYKRDLTEHRVDSTIADGCDVKVPGEQTYEVVKHLVDEFILVTEEEIEHAMKDLMQRAKIITEGAGALPTAAILSGKINNKWLEDKNVVALVSGGNVDLTRVSGVIEHGLNIADTSKGVVG

SEQ ID NO: 31369 - DNA, 1410 bp, Drosophila melanogaster
  CDS (1)..(1410)
atgtcccaggcagtgaaaacggaaacgcccaaggaaccaaatgttgtggctgccaaagccaatggcggcaccgctgtcaatggaaagttggaagcccagaagagaccccggcatgtttctggtggtgtggaggaaatcatcgatcccttttgcaatccggagaaaccgcaacgcatatccttccatgacgtcacatccgctgcctttctcatccgcggtggcgtggaacgcactccttgtccgaaatccacatcatcggatctatatggcatggagttatatctgaaaaaggatttcctacaatatacaggcagcttcaaggagcgtggcgcacgctatgccttgctatcattgaccgaggaacagaagcgaaccggagtgatcagtgcctccttgggtaatcacgcccaggccctgtgctatcatggctggaaactcaatataccagtgaccgtggtgatgcccaaggcggcgcccatcatgaagatccaaaagtgccggaactacaaggcacgcgtcatcgtcgacggaaatgacatgggcgaagccaagtccctggccatgcgaatgtcccgcgaggagggactcctgtacgtgaatggctacgatcatccgcacattatggccggccagggaactattggtttggagatactcgaacaggtgccggaaccggatgcagtggtggtgccagtgggcggcggtggactgattgccggtattgccacagccgttaaagctttgtcccccaaaaccaagattattggtgtggagtcggagaagtgcgccagcttcacccgggccatggaaaatgatggacctattcacacgcccatcaagaacacattggctgatggcttggccgttcctaaagttggctataatgcctatgccaccgcaatgccgctaatagatcgcatggtggtggtcaaggaggagtggatcgcagtggctatcctaagattggtggaggaggagaagtgcgtcgtcgagggagcgggtggtgcgggtctggcggccattctggccggacacttggatgagctcaagggaaagaaagttgtggtgcttctgtgtggaggaaacatagacaccaccgtttttggacgttgtttggagcgaggtttggctgccgttggacgcctggttaagtttaatgtggaggttagcgatcgtcctggcggaatcaacgatctttgcgccctgcttgtccgagtaggcgtgtccattaaggacatcatgcacgagcgagcctggctgagggatgtttataccgtggaagtgaaggtcgtgtgcgaaaccgtggactggacccatagtttgcagctaaaaaacgagctgaagaagttctactcgaaagttcagttctccgatgttccgctggccctgtcaaatgataccgattcgtag

SEQ ID NO: 31370 - protein, 469 aa, Drosophila melanogaster
MSQAVKTETPKEPNVVAAKANGGTAVNGKLEAQKRPRHVSGGVEEIIDPFCNPEKPQRISFHDVTSAAFLIRGGVERTPCPKSTSSDLYGMELYLKKDFLQYTGSFKERGARYALLSLTEEQKRTGVISASLGNHAQALCYHGWKLNIPVTVVMPKAAPIMKIQKCRNYKARVIVDGNDMGEAKSLAMRMSREEGLLYVNGYDHPHIMAGQGTIGLEILEQVPEPDAVVVPVGGGGLIAGIATAVKALSPKTKIIGVESEKCASFTRAMENDGPIHTPIKNTLADGLAVPKVGYNAYATAMPLIDRMVVVKEEWIAVAILRLVEEEKCVVEGAGGAGLAAILAGHLDELKGKKVVVLLCGGNIDTTVFGRCLERGLAAVGRLVKFNVEVSDRPGGINDLCALLVRVGVSIKDIMHERAWLRDVYTVEVKVVCETVDWTHSLQLKNELKKFYSKVQFSDVPLALSNDTDS

SEQ ID NO: 31371 - DNA, 1263 bp, Bacillus anthracis str. A2012
  CDS (1)..(1263): transl_table=11
atggtgcaaaaggtaaaggagagagtgaaaattgaagatatcttaatggcccatacttgtatgaaagatatcgttattaaaacaccgttacaacgtgatacagttttatctgagaaatatgattgtgacgtttatgtaaaacgcgaagacttacaattaattcgctctttcaaaattcgtggtgcgtacaatttaattcgaagtttatcgaaagaacaattacaaaacggtgttgtttgtgcaagcgctggtaatcatgcacaaggggtagcttatacgtgtaatttattgaagattccgtcaaaaattttcatgccaacaacaacacctaagcaaaaagtatcacaagttcaatttttcggtggtgatttcgcagagattgtattggttggtgatacattcgatagctcttttcaagaagcgcagcgttattgtgaagaaaatagaatgacatttgttcatccgtttgatgatccgtacgtagttgctggtcaagggacagtggcagttgaaattatgcatgatatggagaaaccggttgattatatctwtacagcaatcggcggtggtggattagcatcaggtgttggtacatatgtgwmaggtgttagtcctgctacacaggtcattggggtagagccaatgggagctgcatctatgaaagaggcttttcttcaaaatgataatgtggcattggagaaaatagatagttttgttgatggggcagcggttaaaaaggtaggaaagttaacatttgaaacttgtaaagatgtaattgatgacattgttttagtaccagagggaaaggtttgtacgacgattttagaactgtataagaaaaatgcgattgtagctgaaccagctggtgcactctctattgcagcgcttgatttatacagagatgaaattaaaggtaaaacagttgtatgcacattaagtggtggaaacaatgatattgatagaatgcaagaaatgaaagaacgatctcttatttacgaagggttaaagcattatttcatcattgaattcccgcaacgttcaggtgcgttaagagaatttcttgataaaggattagggccagaagatgatattactcgctttgagtatattaagaaacataataaggaaaatggtccagcattagtcggagtagagttaaaacataaagaagattacgagcagttaattatccgttttaaagaaaataatattcaatttatggagcttaataaaaatcctgttttgtttgatttgcttatttaa

SEQ ID NO: 31372 - protein, 420 aa, Bacillus anthracis str. A2012
  misc_feature (184)..(184): Xaa can be any naturally occuring amino acid
  misc_feature (201)..(201): Xaa can be any naturally occuring amino acid
MVQKVKERVKIEDILMAHTCMKDIVIKTPLQRDTVLSEKYDCDVYVKREDLQLIRSFKIRGAYNLIRSLSKEQLQNGVVCASAGNHAQGVAYTCNLLKIPSKIFMPTTTPKQKVSQVQFFGGDFAEIVLVGDTFDSSFQEAQRYCEENRMTFVHPFDDPYVVAGQGTVAVEIMHDMEKPVDYIXTAIGGGGLASGVGTYVXGVSPATQVIGVEPMGAASMKEAFLQNDNVALEKIDSFVDGAAVKKVGKLTFETCKDVIDDIVLVPEGKVCTTILELYKKNAIVAEPAGALSIAALDLYRDEIKGKTVVCTLSGGNNDIDRMQEMKERSLIYEGLKHYFIIEFPQRSGALREFLDKGLGPEDDITRFEYIKKHNKENGPALVGVELKHKEDYEQLIIRFKENNIQFMELNKNPVLFDLLI

SEQ ID NO: 31373 - DNA, 1545 bp, Yersinia pestis KIM
  CDS (1)..(1545): transl_table=11
atggcagtttcgcaacccttatctgctgccccctgcggggcagaatatctgcgggcgatattacgtgcgccggtgtatgaggtggcgcaagtcaccccgttacaagtgatggagaaaatctcctcgcgcgtgggtaataccgttttagtgaagcgtgaagatcggcagccggtacacagctttaagttgcgcggtgcttacgcgatgatctccagcctgacggaagagcagaaagcctgtggcgtcgtcacggcttctgcgggtaaccatgctcaaggcgtggcgctttctgcccataaaatggggattaaagcgctgatcgtcatgcccgttgctactgcagatattaaagttgatgcggtacgtgcttttggcggcgaggtgctgctgtttggcgctaattttgatgaagccaaaaccaaagctatcgcgcttgctcaagagcagggctacacctttgtgccaccgtttgaccatccggcggtgattgccgggcaggggacgctggcgatggagttactgcaacaagatgcccatcttgatcgggtttttgtcccagtgggcggcggtgggctggtggccggtgtggcggtgcttatcaagcaattgatgccacagattaaagtgattggtgttgaagccgaggattctgcctgtttgcgggccgcgctggatgcggggcagccggtcgatttggcgcgtgtcgggctgtttgccgagggcgtggcagttaagcgtatcggtgacgagcctttccgcctgtgtcaggaatatctggacgatgtgatcaccgttgacagtgatgctatctgtgccgcagtcaaagatctgtttgaggatgttcgcgccattgctgagccttctggtgcgttggcattggcgggcctgaaaaaatatgtgcagcagcataatattcagggcgagcgtctggcacatgtgctttctggtgcaaacgtgaacttccatggtttgcgttatgtgtcagagcgttgcgagttaggtgagcagcgtgaagccctgctggcggtgactattccagagcaaaagggcagtttcctgcgtttctgtgaattactgggtggccgttcggtaacggaatttaactaccgttacgccgatgctgaaaacgcctgcatttttgttggggtacgtttgactcgtggttatgctgagcgggttgaaattcttgctgaattgcaggacaaaggttatcaggtggtcgatttatctgatgacgaaatggcgaaactgcatgtgcgttatatggttggtgggcggccctcgaaaccactgcgtgagcgcctgttcagctttgaattccccgagtcaccaggcgctttgctgaaattcctgcatacgttgggcactcactggaatatttctctgttccactaccgcagccatggcacagattttggccgggtattggcggcatttgagttgtcggctaccgaaccgcaatttgaagagcgcttagcggctctgggctactattgccacgatgaaacggataacccggcgtttaagttctttttagcgggttaa

SEQ ID NO: 31374 - protein, 514 aa, Yersinia pestis KIM
MAVSQPLSAAPCGAEYLRAILRAPVYEVAQVTPLQVMEKISSRVGNTVLVKREDRQPVHSFKLRGAYAMISSLTEEQKACGVVTASAGNHAQGVALSAHKMGIKALIVMPVATADIKVDAVRAFGGEVLLFGANFDEAKTKAIALAQEQGYTFVPPFDHPAVIAGQGTLAMELLQQDAHLDRVFVPVGGGGLVAGVAVLIKQLMPQIKVIGVEAEDSACLRAALDAGQPVDLARVGLFAEGVAVKRIGDEPFRLCQEYLDDVITVDSDAICAAVKDLFEDVRAIAEPSGALALAGLKKYVQQHNIQGERLAHVLSGANVNFHGLRYVSERCELGEQREALLAVTIPEQKGSFLRFCELLGGRSVTEFNYRYADAENACIFVGVRLTRGYAERVEILAELQDKGYQVVDLSDDEMAKLHVRYMVGGRPSKPLRERLFSFEFPESPGALLKFLHTLGTHWNISLFHYRSHGTDFGRVLAAFELSATEPQFEERLAALGYYCHDETDNPAFKFFLAG

SEQ ID NO: 31375 - DNA, 1062 bp, Oceanobacillus iheyensis HTE831
  CDS (1)..(1062): transl_table=11
atgacctggcaaggtttattaaaggaatatgcggatttattaccagtcacagaccagacaccatcattaagtctaatggaaggaaacactcctttattgtcttttccaactttatcaaaggaattaggaatagagttatatggaaaatttgaaggattaaacccgaccggctcatttaaagatagaggcatggttatggcagttgcaaaagcaatcgaagaaggcagcaaatccattatttgtgcttctacaggaaatacttcagctgcagctgctgcctatgctgctagggctggtatacgtgcaattattgtcatccctaaaggaaaagttgctttaggaaaattagctcaagccgtcatgtacggtgcagagattgttgagattgatggtaattttgatgaggcactgcaaatggttcgtaaaatcagtgagaaatcagccgttacattagttaactctgttaatccttatcgtattgacggacaaaaaactgccgcatttgaagtttgcgatcaattaggttcagctcctgatattcttgctattccagtagggaatgcaggaaatattagtgcatattggaaaggatttaaagaatataacgaaaaacaccaatcgggactacccaaaatgatgggatttgaagcagaaggtgctgctgctattgttaaaaataaagttattgagcaaccagaaacagtagctactgctatccgtatcggtaacccagcaagttgggaacttgccctaaaagcaaaagaagaatcaaatggaagtattgggtatgtaacagatgaagagattgtaaatgcgttcaagcttttaccacaaaaagaaggtatttttgcagagccaggatcagcagcatctatcgctggtgttatccaacaggttaaaagtggaactattccaaaaggtagtaaggttgttgctgtattgacagggaatggattgaaagatccacaaacggcaatcgatcaactatccattgatcctgtaagcttaccaaacaacgaaaaagcagtcatggactatcttgaagagttgattacatcatga

SEQ ID NO: 31376 - protein, 353 aa, Oceanobacillus iheyensis HTE831
MTWQGLLKEYADLLPVTDQTPSLSLMEGNTPLLSFPTLSKELGIELYGKFEGLNPTGSFKDRGMVMAVAKAIEEGSKSIICASTGNTSAAAAAYAARAGIRAIIVIPKGKVALGKLAQAVMYGAEIVEIDGNFDEALQMVRKISEKSAVTLVNSVNPYRIDGQKTAAFEVCDQLGSAPDILAIPVGNAGNISAYWKGFKEYNEKHQSGLPKMMGFEAEGAAAIVKNKVIEQPETVATAIRIGNPASWELALKAKEESNGSIGYVTDEEIVNAFKLLPQKEGIFAEPGSAASIAGVIQQVKSGTIPKGSKVVAVLTGNGLKDPQTAIDQLSIDPVSLPNNEKAVMDYLEELITS

SEQ ID NO: 31377 - DNA, 1017 bp, Oceanobacillus iheyensis HTE831
  CDS (1)..(1017): transl_table=11
gtgagttgtcttggggatcgcttaactggtgaaaaagtataccaagctatgaagaaattaacaccgattgttcatcgtacaccattagtaacatcacatacaacggatgatattgttggaaaacatgtttactgtaaaatggaaaatcaacaaaaaactggggcatttaaatttcgaggagcaagttataaattaatgcaactgtcaaaagaagaattacaacacggcgtaattacagcttcagctggtaatcatgcacaaggtgtagctcatgccgctgcaaaattaggagttaaggcaacgatttttatgtctgaaggaacgcctctagcgaaaattaatgcgacaagaaattatggggcaaccgtaaatcttgttggagaaagttttcaagaagcttatgaggcttcacttcaacatcaaaaagtaactggtgctacgtatatccacccatttgatgattatgatattatggctggtcaagggacaattgcaatggaattactccgccaagaagaccgtattgataccattattgtcccaattggtggaggtggattaattagtggcattgcagttgctgctaaacatgtaaatagaaacattaaaataatcggcgtacaggctgaaggtgctgcagcaatgcatcaaagttatcattcgagcaaagtacattctttatcaaatgtttcaacaattgcagaaggaatagcggtaaaacaaccaggagatttgaccttgccacttattcgatcctatgttgatgatattgttacggttaatgatgaacaaattgcttcagcaatcatttacatgttggaaagaaataagacgttaatggaaggtgctggtgccgctgcattagctgcactatttgcacataatgacacgatctcatccaggcattgtggtgttatagttagtggaggtaacttggacatcagtaatatgcaaaaaatacaacatctatccagtaatattaataaaaatccagaaagagcatatgtggcgctataa

SEQ ID NO: 31378 - protein, 338 aa, Oceanobacillus iheyensis HTE831
MSCLGDRLTGEKVYQAMKKLTPIVHRTPLVTSHTTDDIVGKHVYCKMENQQKTGAFKFRGASYKLMQLSKEELQHGVITASAGNHAQGVAHAAAKLGVKATIFMSEGTPLAKINATRNYGATVNLVGESFQEAYEASLQHQKVTGATYIHPFDDYDIMAGQGTIAMELLRQEDRIDTIIVPIGGGGLISGIAVAAKHVNRNIKIIGVQAEGAAAMHQSYHSSKVHSLSNVSTIAEGIAVKQPGDLTLPLIRSYVDDIVTVNDEQIASAIIYMLERNKTLMEGAGAAALAALFAHNDTISSRHCGVIVSGGNLDISNMQKIQHLSSNINKNPERAYVAL

SEQ ID NO: 31379 - DNA, 1227 bp, Brucella suis 1330
  CDS (1)..(1227): transl_table=11
atgacccccttcgtcaaatccgtggcccaggcagaaaaggcaatgcgcgcgctcttttgcgaaacgccattgcaacgcaacgattatctgtcgcggaaatatggtgcgcagatttggctgaaacgcgaagacctgacgccggtgcgctcctacaagctgcgcggtgccttcaattttatttccaaagccgttgaaacaacagataaaaatgccgttttcgtctgtgcttccgccggcaatcatgcgcagggctttgcattcgtctgccggcatttcgggcgcaagggcgtggttttcatgccagtcaccacgccgcagcagaaaatcgacaagacgcgcacctttggcggagaattcatcgaaatcaaacttgtcggcgatattttcgatgtctgttatgccgcctcgcaggaattcgcagccgccaacaagggcgtgatggtgccacccttcgaccatcccggcattgttgaagggcaggcgacagtcgcgctggaaatcgagcggcaattgccggacgacagcaagtcggacctcgtgctcctgccggttggcggtggcgggctttcaagcggcgtaacgcaatatatcgccgatcttggctggaaaaccgctttccgctttgtggagccgcagggcgcggcaagcctcaaggccagcctggaggcgggcaagcgggtcaagctttcgcatatcgataattttgtcgatggtgctgccgttgcagaaatccgcaaagaaaatttcaaacttctcaaaggcttcgatccgaaaactgtcataacggttccggaaaacaggctctgcgcgaccattgttgaaatgctgaatattgaaggtgttgtgctggaaccggccggtgcgctcggcatcgatgcgctcaaggatttcaagaaaagcgacatcaagggcaaacgcattgttatcgtcgtttctggcggcaatttcgatttcgagcggctgccggatgtgcgggaaagggcgcttcgttttgaagggctgaagaaatatttcattttccgctttcctcagcgccccggcgcattgcgctccttccttgaccttctggggccggatgacgatattgcgcgctttgaatatctcaagaaatcggcgcgaaatttcggctcggtgctaatcggtatcgaaaccagggacgcggcaaatttcaagcttctggagaagaagtttgccgaatccggctgggcatcaggatatcagcgataa

SEQ ID NO: 31380 - protein, 408 aa, Brucella suis 1330
MTPFVKSVAQAEKAMRALFCETPLQRNDYLSRKYGAQIWLKREDLTPVRSYKLRGAFNFISKAVETTDKNAVFVCASAGNHAQGFAFVCRHFGRKGVVFMPVTTPQQKIDKTRTFGGEFIEIKLVGDIFDVCYAASQEFAAANKGVMVPPFDHPGIVEGQATVALEIERQLPDDSKSDLVLLPVGGGGLSSGVTQYIADLGWKTAFRFVEPQGAASLKASLEAGKRVKLSHIDNFVDGAAVAEIRKENFKLLKGFDPKTVITVPENRLCATIVEMLNIEGVVLEPAGALGIDALKDFKKSDIKGKRIVIVVSGGNFDFERLPDVRERALRFEGLKKYFIFRFPQRPGALRSFLDLLGPDDDIARFEYLKKSARNFGSVLIGIETRDAANFKLLEKKFAESGWASGYQR

SEQ ID NO: 31381 - DNA, 1638 bp, Shewanella oneidensis MR-1
  CDS (1)..(1638): transl_table=11
atgttatctctcgcatcgtcgcaaacggaacaagcggagtctcagccagctcaggcttctcccgcttcagttgagaaaagtcagctagctcaacactatctgcaaaagatcctactatcgtcggtttatgatgttgcgaaagtgacaccactctcgagcctcaataaactctcggcgcgtttaggctgccaagtgtttttaaagcgtgaggatatgcaacccgtacattcctttaaactgcgtggcgcctataaccgcatcgcccagttgagccaagccgaatgccagcgtggcgtggtgtgcgcctcggcgggcaaccatgcccaaggtgtagccatgtcggcggcgagccgtggtgtggatgcggtgattgtgatgcccgaaaccacgccggatattaaagtcgatgcggtgcgccgcttgggtggcaacgtggtattgcacggccaagctttcgatcaagccaatggttttgcgatgacgatggcccagcaggaaggtcgggtgtatatcgcccccttcgatgatgaagccgtgatcgctggccaaggcactattgcccaagaaatgctgcaacagcagcgcgatcttgaagtgatttttgtgcccgtgggcggcggcggtttaattgcgggtattgctgcctactacaaggcggtgatgccacaggtgaaaattgtcggcgttgagcctgaagatgcggcctgcttaaaggcggcgatggaagcgggcgagcctgtgaccttatcccaagtgggcctgtttgccgacggggtcgcggttaagcgtattggtactgagccatttcgtgtcgccaaactgtgtgtagatgccgtggtgacggtcacgtccgacgaaatctgtgcagcggtgaaagatatttttgaagatacccgcgctattgccgaacccgcaggtgctttatctttagctgggcttaaaaaatatgtcagcactaatgctacaggtgagagtggtcgcggcgaaaaggtcgcggcgattttaagtggcgcgaatgtgaacttccacagtttgcgctatgtgtccgagcgctgcgagctgggtgagcaaaaagaagcggtgctggcggttaaagtgcccgagcgtccgggcagcttcctgcgtttttgtgagctgctcgaaaagcgggtgatgaccgaatttaattatcgctttagcagccgagatatggcggtggtatttgcgggtatccgtttgaccaaaggccatggtgaattagagcagatcatcaataccttagaagacaatggctttgaggtgcaggacttatccggtgatgaaactgcgaaattgcatgtgcgttatatggtcggtggtcatccgccagagccgttagaggagcgcctatttagctttgagtttcccgagcatccgggtgcactgctgaagtttttaaccaccttgcagagtaagtggaatatcagtctatttcattatcgcaaccacggcgcagcctttggccgagtgctggcggggtttgaagtgcccgcgagtgatgccttgccatttcagcagtttttaactgagctgggatttgtctatcaagaagagacccaaagccctgcttatcaactgtttttgaatgccggaaaaggaaaaaacaacctgcctgtgtag

SEQ ID NO: 31382 - protein, 545 aa, Shewanella oneidensis MR-1
MLSLASSQTEQAESQPAQASPASVEKSQLAQHYLQKILLSSVYDVAKVTPLSSLNKLSARLGCQVFLKREDMQPVHSFKLRGAYNRIAQLSQAECQRGVVCASAGNHAQGVAMSAASRGVDAVIVMPETTPDIKVDAVRRLGGNVVLHGQAFDQANGFAMTMAQQEGRVYIAPFDDEAVIAGQGTIAQEMLQQQRDLEVIFVPVGGGGLIAGIAAYYKAVMPQVKIVGVEPEDAACLKAAMEAGEPVTLSQVGLFADGVAVKRIGTEPFRVAKLCVDAVVTVTSDEICAAVKDIFEDTRAIAEPAGALSLAGLKKYVSTNATGESGRGEKVAAILSGANVNFHSLRYVSERCELGEQKEAVLAVKVPERPGSFLRFCELLEKRVMTEFNYRFSSRDMAVVFAGIRLTKGHGELEQIINTLEDNGFEVQDLSGDETAKLHVRYMVGGHPPEPLEERLFSFEFPEHPGALLKFLTTLQSKWNISLFHYRNHGAAFGRVLAGFEVPASDALPFQQFLTELGFVYQEETQSPAYQLFLNAGKGKNNLPV

SEQ ID NO: 31383 - DNA, 1251 bp, Streptococcus mutans UA159
  CDS (1)..(1251): transl_table=11
atgatttcagctaaagatgtggttgctgctaacaaagtcttaaaagatgttgttgttcaaacaccacttgattttgatcgctatttgtcagaaaaatatggagcgacaatttatttaaaacgtgaaaatatgcaaaaggtgcgttcttttaaaattcgtggcgcttattatgctatttcacaattatcagatgaagaaaaggctagaggagttgtttgtgcttctgccggaaatcatgctcaaggagttgcttatacctgtaatgaaatgaaaattcctgcaactattttcatgcctgtaacgactcctcatcaaaagattgggcaagttcaattttttggaggctcctttgtaactatcaaattggtaggtgatacttttgatgcttctgctcaggcagcccaagattatacgaaagctgaaggaatgacctttatcgatccctttgataatgacatggtacaagcgggtcaaggaacaattgcttatgaaatttatgatcaggctcaagaagatggtttgagctttgatgctattttagtacctgttggtggtggcggtcttatttcaggtgtatcagcctatgttaaagatgtggctcctgaaattgaggttattggcgttgaggcaatgggagcgcgcagcatgcgggcagcttttgataaaggacatcctgttaaattagagcatattgataaatttgcagatggcatagctgttcaaaaggttgggcgttctacctatgatgttgctagaaaatatgtggatcgcttgattggtgtagatgaaggtctcatttctgaaaccttgattgatatgtattctaaacaaggtattattgcagaaccagcaggagcagcttctattgcagctctggaagaaatgaaagatgatattaaaggcaaaactattgtctgtattatttctggtggaaataatgacattaaccgtatgcaagaaatggaagaacgtgcacttatttatgatggtgtgaagcattattttgttgtgaattttccacaacgcccaggagctctgcgggaatttgttaatgatattttaggaccaaatgatgatatcacccgttttgaatatattaaacgtgccaataaaggaacaggtccagtcctaatcggcattactttagcggataaaaatgattatcaggatctaattgatcgtttgggtgcttttgacccaggttatatcaatcttcatggcaatgaaagtctgtataatatgctcgtctga

SEQ ID NO: 31384 - protein, 416 aa, Streptococcus mutans UA159
MISAKDVVAANKVLKDVVVQTPLDFDRYLSEKYGATIYLKRENMQKVRSFKIRGAYYAISQLSDEEKARGVVCASAGNHAQGVAYTCNEMKIPATIFMPVTTPHQKIGQVQFFGGSFVTIKLVGDTFDASAQAAQDYTKAEGMTFIDPFDNDMVQAGQGTIAYEIYDQAQEDGLSFDAILVPVGGGGLISGVSAYVKDVAPEIEVIGVEAMGARSMRAAFDKGHPVKLEHIDKFADGIAVQKVGRSTYDVARKYVDRLIGVDEGLISETLIDMYSKQGIIAEPAGAASIAALEEMKDDIKGKTIVCIISGGNNDINRMQEMEERALIYDGVKHYFVVNFPQRPGALREFVNDILGPNDDITRFEYIKRANKGTGPVLIGITLADKNDYQDLIDRLGAFDPGYINLHGNESLYNMLV

SEQ ID NO: 31385 - DNA, 951 bp, Drosophila melanogaster
  CDS (1)..(951)
atgcccaaggcggcgcccatcatgaagatccaaaagtgccggaactacaaggcacgcgtcatcgtcgacggaaatgacatgggcgaagccaagtccctggccatgcgaatgtcccgcgaggagggactcctgtacgtgaatggctacgatcatccgcacattatggccggccagggaactattggtttggagatactcgaacaggtgccggaaccggatgcagtggtggtgccagtgggcggcggtggactgattgccggtattgccacagccgttaaagctttgtcccccaaaaccaagattattggtgtggagtcggagaagtgcgccagcttcacccgggccatggaaaatgatggacctattcacacgcccatcaagaacacattggctgatggcttggccgttcctaaagttggctataatgcctatgccaccgcaatgccgctaatagatcgcatggtggtggtcaaggaggagtggatcgcagtggctatcctaagattggtggaggaggagaagtgcgtcgtcgagggagcgggtggtgcgggtctggcggccattctggccggacacttggatgagctcaagggaaagaaagttgtggtgcttctgtgtggaggaaacatagacaccaccgtttttggacgttgtttggagcgaggtttggctgccgttggacgcctggttaagtttaatgtggaggttagcgatcgtcctggcggaatcaacgatctttgcgccctgcttgtccgagtaggcgtgtccattaaggacatcatgcacgagcgagcctggctgagggatgtttataccgtggaagtgaaggtcgtgtgcgaaaccgtggactggacccatagtttgcagctaaaaaacgagctgaagaagttctactcgaaagttcagttctccgatgttccgctggccctgtcaaatgataccgattcgtag

SEQ ID NO: 31386 - protein, 316 aa, Drosophila melanogaster
MPKAAPIMKIQKCRNYKARVIVDGNDMGEAKSLAMRMSREEGLLYVNGYDHPHIMAGQGTIGLEILEQVPEPDAVVVPVGGGGLIAGIATAVKALSPKTKIIGVESEKCASFTRAMENDGPIHTPIKNTLADGLAVPKVGYNAYATAMPLIDRMVVVKEEWIAVAILRLVEEEKCVVEGAGGAGLAAILAGHLDELKGKKVVVLLCGGNIDTTVFGRCLERGLAAVGRLVKFNVEVSDRPGGINDLCALLVRVGVSIKDIMHERAWLRDVYTVEVKVVCETVDWTHSLQLKNELKKFYSKVQFSDVPLALSNDTDS

SEQ ID NO: 31387 - DNA, 1311 bp, Corynebacterium efficiens YS-314
  CDS (1)..(1311): transl_table=11
atgagcgcaacacacgtgtctgagaagagcccaggagtgatcgacagcgggatggagccgattcgtgccgccgacattcagatggcgcaggcacgaatttcctccgtgatcgcgcccacccccctggagtactgcccgcgtctgtcggaggagaccggcgtggaggtctacctcaaacgtgaggacctccaggatgttcgttcctacaagatccgcggtgccctcaactccggttcccagctgagccgggagcagcgtgatgctggcattgtggcggcctccgcgggaaaccacgcgcagggtgtggcgtttgtgtgcaagtcactgggtgttcaagggcgcatctacgtgcccgtgcagaccccgaagcagaagcgcgaccgcatcctggtgcacggtggggaatatgtcaccctcgtagtgaccggcaacaacttcgatgaggcctccgctgccgcccatgaggatgccgaacgcaccggggccaccctgatcgaaccgttcgatgcccgggacaccatcatcggccagggcactgtcgcagccgagatcctctcccagctgaccacactgggtaaatccccggaccatgtcatggttcccgtcggcgggggcggactgctcgccggggtggtcagttacatggcagatatggcaccgcgcaccgccatcgtcggggtggaacccgcgggggcagcctccatgcaggcggccctgaaggccggggggccggtgaccctggagaacgcggatcccttcgttgatggtgccgccgtcaagcgcgtcggggacctcaactaccaggtggtggagaagaacctgggccgcgtccacatgatggatgtcagcgagggtgcggtgtgcaccgagatgcttgagctgtaccagaacgagggcatcatcaccgagcctgccggcgcactgtcggtggcgggtctgcgggacatgaaattcgccaaggggtccgtcgtagtgtgcatcatctccggtggtaacaatgatgtgctgcgctataacgagatcgtggagcggtccctggtccaccgtggcctcaagcactacttcctggtgaacttcccgcagaaaccgggacagctgcgcagcttcctggaggacatcctcggccccgaggatgacatcaccctcttcgagtacctcaagcgcaacaaccgtgagaccggcaccgccctggtgggtctccagctgggtgaggccagcggcctggattccctcctggcacgcatggatgcctccgcgatcgactgtcgccgcctcgaaccgggcacccccgagtacgacttcctgacctag

SEQ ID NO: 31388 - protein, 436 aa, Corynebacterium efficiens YS-314
MSATHVSEKSPGVIDSGMEPIRAADIQMAQARISSVIAPTPLEYCPRLSEETGVEVYLKREDLQDVRSYKIRGALNSGSQLSREQRDAGIVAASAGNHAQGVAFVCKSLGVQGRIYVPVQTPKQKRDRILVHGGEYVTLVVTGNNFDEASAAAHEDAERTGATLIEPFDARDTIIGQGTVAAEILSQLTTLGKSPDHVMVPVGGGGLLAGVVSYMADMAPRTAIVGVEPAGAASMQAALKAGGPVTLENADPFVDGAAVKRVGDLNYQVVEKNLGRVHMMDVSEGAVCTEMLELYQNEGIITEPAGALSVAGLRDMKFAKGSVVVCIISGGNNDVLRYNEIVERSLVHRGLKHYFLVNFPQKPGQLRSFLEDILGPEDDITLFEYLKRNNRETGTALVGLQLGEASGLDSLLARMDASAIDCRRLEPGTPEYDFLT

SEQ ID NO: 31389 - DNA, 918 bp, Pseudomonas putida KT2440
  CDS (1)..(918): transl_table=11
atgaccttgcacattcatacccccctgatcgagtcgcgcccgctgtcgttggcggccggtcgtaatatctggctcaagctcgacgccctgcaaccctgcggttcgttcaaactgcgcggtgtaggccacgcctgcgaggtacaccacgcgcgtggcgcccggcactttgtgtcctcgtcaggtggcaatgccggtttggcagtcgcctatgccggacgcaagctgggggtgccggtgaccgtggtgatacccgaaaccaccaccgaacgggccaagcagttgctgcacctggaagacgccaaggtggtggtgcaaggcagttcctggcaagaggccaacgccctggcacagacactggtaggcccgaacgatgccttcatccacccattcgacgacccactgctgtgggccgggcatgccagcctggtggatgaagtggccgaggccggcctgaagccggacgcggtggtgttgtcagtcggcgggggcggcttgctcagtggcgtggtggaggggctcaagcgcaatggctggggcgatgtgcctgtgctggcggtagaaaccgagggcgcggcgtcgctgcatgcggccatgcaggctgggcattcggtggagctggagcgcatcgcctcggtggcgacgtcgctgggggccaagcgtgtggctgatcaggcgctgatgtgcgtgcagcagcatccggtgcacagccatctggtcagcgatcgcgcagcgctggaggcctgtgagcggttcttgctggaccaccgtgtgctggtcgagcccgcgtgcggggcggcgttggcagtggcctatgatgccaaggctctgggcgccttgcgcaatgtcctggtggtggtctgtggtggcgctaccgcaacactggagcagatccaggcctggctgcagcaggcagactga

SEQ ID NO: 31390 - protein, 305 aa, Pseudomonas putida KT2440
MTLHIHTPLIESRPLSLAAGRNIWLKLDALQPCGSFKLRGVGHACEVHHARGARHFVSSSGGNAGLAVAYAGRKLGVPVTVVIPETTTERAKQLLHLEDAKVVVQGSSWQEANALAQTLVGPNDAFIHPFDDPLLWAGHASLVDEVAEAGLKPDAVVLSVGGGGLLSGVVEGLKRNGWGDVPVLAVETEGAASLHAAMQAGHSVELERIASVATSLGAKRVADQALMCVQQHPVHSHLVSDRAALEACERFLLDHRVLVEPACGAALAVAYDAKALGALRNVLVVVCGGATATLEQIQAWLQQAD

SEQ ID NO: 31391 - DNA, 1053 bp, Pseudomonas putida KT2440
  CDS (1)..(1053): transl_table=11
ttgctgtttgtggaatattattctatggtggacaaattatccacgcgcctgcaaggacccgtcatgccagccaccccgtccgttgatgcccagttccttgatacattgcaccaaaacattcaggacgcccacgcggcgctccgcccggccgtcagcattaccccgctcttgcacagccctcgtttgtcggcactgaccggctgtgaagtgctgctcaaatgcgaacacctgcagcacaccggttcgttcaagtttcgcggtgccagcaacaagatgcgcctgttgccggccgaggcacgcaagcagggggtgatagccgcctcatccggtaaccatgggcaggccctggccctggccggcaagatggctggcgtgccagtgaaggtctacaccaccacgggcgcatcggcatacaaaacagaggcaatgcgcgcgctgggcgccgaagtggtctgcctgcccaccgacccgctgagtgcagagctggaagcagccaggcaagccaaggcccagggcgtacctttcgtgtcaccttacaacgacctgcaagtcattgccggccagggcaccataggcatggagttgctcgagcaggcgccagacctggacgcggtgttcgtcgccgtgggcggtggcgggatgatttccggcatcggcgccgccctgcgcgtactcaagccgggcactgagatcatcggctgctggccggcgaatgacccaaccctgcagcaatcactcaaggccggtgaaatcatcgaattggatgcctgcgaaacgctgtcggatggcacggccggcggcgtcgagccaggctccatcaccttcccgctttgccaggcgctgctcaccgataccgtgttggtcagcgaggatgaaatccgctgcgccatgcgcgacatcgccagcagtgagcgctggatcatcgaaggcgctgctgcggttgcggtcgccggcatgcagaggctcgccgaacgctatcagggcaagcgtgtcgccgtgatcctgtgtggccgtaacatcctgctggaaaagttcctcgaggccgttcaatga

SEQ ID NO: 31392 - protein, 350 aa, Pseudomonas putida KT2440
MLFVEYYSMVDKLSTRLQGPVMPATPSVDAQFLDTLHQNIQDAHAALRPAVSITPLLHSPRLSALTGCEVLLKCEHLQHTGSFKFRGASNKMRLLPAEARKQGVIAASSGNHGQALALAGKMAGVPVKVYTTTGASAYKTEAMRALGAEVVCLPTDPLSAELEAARQAKAQGVPFVSPYNDLQVIAGQGTIGMELLEQAPDLDAVFVAVGGGGMISGIGAALRVLKPGTEIIGCWPANDPTLQQSLKAGEIIELDACETLSDGTAGGVEPGSITFPLCQALLTDTVLVSEDEIRCAMRDIASSERWIIEGAAAVAVAGMQRLAERYQGKRVAVILCGRNILLEKFLEAVQ

SEQ ID NO: 31393 - DNA, 1593 bp, Pseudomonas putida KT2440
  CDS (1)..(1593): transl_table=11
ttgggcaacgtaaaaatagccaaggagtcatcgatgaccagcttcagtgtccctcgtactaccgtcaccccccagcaactgctgtcggagcaggtgcgtcgcattcttgcggcgccggtgtacgacctggccattgaaacgcccctgcaagcggccccggccttgtctgccgccctgggcaaccaggtgttgctcaagcgcgaagacctgcagcctacgttttcgttcaagatccggggtgcctacacccgcctgtcgcgactgaccgatgtgcagcgtgagcgcggggtgatcaccgcttcggcgggcaaccatgcccagggcgtggccttggccgcatcgcatctgggtatgaaggcaaccatcgtcatgcccaccaccacgccatcgttgaaagtggaaggcgtgcgttcgcgcggcgggcatgtggtgctgcatggcgagagcttcccgcatgcgctgacccacgcactgaagctggccgacagcgaaggcgcgaccttcgtgccaccgttcgatgacccggatgtgatcgccgggcagggtaccgtggccatggaaatcctccgtcagcgccctggggcgttggacgcgatctttgtgcccgtgggcggtggcggcttgatcgccgggatcgccgcctatgtgaagtacctgcgccctgacgtgaaggtgatcggtgtcgagccggcagattccaactgcctgcaggctgccatggccgtcggcgagcgcgtgatcctgccgcaggtgggcacctttgccgacggcgtggcggtggcgcagatcggcgcccattgcttcgagctgtgccgccacttcgtcgacgaggtggtgacggtgagcagtgacgagctgtgcgcggcgatcaaggatatctacgacgacacccgttcgatcaccgagccgtccggggccttggccgtggccggtatcaagaagtacgtggcgcgtgaaggtgtgcaggggcagaccctggtggccatcgactccggggccaacgtcaatttcgaccgcttgcgccatgtggccgagcgggccgagctgggtgagcagcgcgaggcgatcatcgccgtgacgattccggagcagccgggcagcttccgggccttttgccacgcactgggcaagcggcagatcaccgaattcaactaccgcttctaccccgggaaggaggcgcgcctgttcgtgggcgtgcagacccacccggtgcacgacccacgtgagcagttgctggccagcttgcgggagcaggggtacagcgtgctggacctgaccgacaacgagctggccaagctgcatgtgcgccataccgtcggcggacatgccgcgtcaggggctgatgagcgggtactgcgcttcgagttccccgaacggccaggggcgttgctggggtttctggagcggttgggcaagcgttggaacatcagcctgttccattaccgcaaccatggtgcggcggaggcgcgggtgttcgctgccttggaagtgccagcggacgagttggcgggcttgccgtcgacgctggacgagatggggtaccggtactgggacgagactgacaacccggcgtacaagctgttcctgggctga

SEQ ID NO: 31394 - protein, 530 aa, Pseudomonas putida KT2440
MGNVKIAKESSMTSFSVPRTTVTPQQLLSEQVRRILAAPVYDLAIETPLQAAPALSAALGNQVLLKREDLQPTFSFKIRGAYTRLSRLTDVQRERGVITASAGNHAQGVALAASHLGMKATIVMPTTTPSLKVEGVRSRGGHVVLHGESFPHALTHALKLADSEGATFVPPFDDPDVIAGQGTVAMEILRQRPGALDAIFVPVGGGGLIAGIAAYVKYLRPDVKVIGVEPADSNCLQAAMAVGERVILPQVGTFADGVAVAQIGAHCFELCRHFVDEVVTVSSDELCAAIKDIYDDTRSITEPSGALAVAGIKKYVAREGVQGQTLVAIDSGANVNFDRLRHVAERAELGEQREAIIAVTIPEQPGSFRAFCHALGKRQITEFNYRFYPGKEARLFVGVQTHPVHDPREQLLASLREQGYSVLDLTDNELAKLHVRHTVGGHAASGADERVLRFEFPERPGALLGFLERLGKRWNISLFHYRNHGAAEARVFAALEVPADELAGLPSTLDEMGYRYWDETDNPAYKLFLG

SEQ ID NO: 31395 - DNA, 1275 bp, Staphylococcus epidermidis ATCC 12228
  CDS (1)..(1275): transl_table=11
atgacagtgacagtaagaactaaagtttcgacaaaagatatagatgaagcatatttacgtctaaaaaatatagtaaaagaaactcccttacaattcgaccattacttatctcaaaaatataattgtaatgtttatttaaaaagagaagatttacagtgggtacgatcctttaaattaagaggagcttataatgctatttcagtattatccaatgaagaaaaaaataaaggtattacttgcgcaagtgctggaaatcatgctcaaggtgttgcttatactgccaaaaaactcaatttaaaagctgttattttcatgccagtaactacaccacgacaaaaaatcaatcaagtcaaattcttcggggatagtaacgtagaaatagtattaattggcgatacatttgatcactgcttagcacaagctttaaactatacgaagcaacataaaatgaattttattgacccatttaataatgtatatactattgcaggacaaggcactttagctaaggaaatattaaatcaagctgaaaaagaggataaaacatttgattatgtatttgctgctataggtggtggcggtcttatttcaggagtgagcacatattttaaagcacattccccccatactaaaattattggtgttgaaccaaccggtgccagtagtatgtatcaatcagtcgttatcaaccatagtatagttactttagaaaatattgataagtttgttgatggagcttcagtagcaagagttggtgatattacctttgatattgcgaaagataaagtggatgattatgttcaagttgacgaaggagctgtttgctccacaattctggatatgtactctaaacaagcgattgttgctgaaccagctggtgctttaagtgtaagtgccttagaacaatataaaaagcagattgaaaataaaactattgtatgcatagtaagtggaggcaacaatgatattaatcgaatgaaagaaattgaggagcgttcccttctatttgaagaaatgaaacattactttattttaaatttcccacaaagacctggtgctttaagagaatttgtcaatgatgtcctcggacctcaagacgatattacaaaatttgaatatttaaagaaaacatcacaaaacactggaactgttattataggtatacagctgaaacatcatgatgatctcattcagttaaaagatcgcgtatgtcaatttgatccttctaatatttatatcaatgaaaataaaatgttatattcattacttatttaa

SEQ ID NO: 31396 - protein, 424 aa, Staphylococcus epidermidis ATCC 12228
MTVTVRTKVSTKDIDEAYLRLKNIVKETPLQFDHYLSQKYNCNVYLKREDLQWVRSFKLRGAYNAISVLSNEEKNKGITCASAGNHAQGVAYTAKKLNLKAVIFMPVTTPRQKINQVKFFGDSNVEIVLIGDTFDHCLAQALNYTKQHKMNFIDPFNNVYTIAGQGTLAKEILNQAEKEDKTFDYVFAAIGGGGLISGVSTYFKAHSPHTKIIGVEPTGASSMYQSVVINHSIVTLENIDKFVDGASVARVGDITFDIAKDKVDDYVQVDEGAVCSTILDMYSKQAIVAEPAGALSVSALEQYKKQIENKTIVCIVSGGNNDINRMKEIEERSLLFEEMKHYFILNFPQRPGALREFVNDVLGPQDDITKFEYLKKTSQNTGTVIIGIQLKHHDDLIQLKDRVCQFDPSNIYINENKMLYSLLI

SEQ ID NO: 31397 - DNA, 1245 bp, Bradyrhizobium japonicum USDA 110
  CDS (1)..(1245)
atggctgacttgtcccaaaccacgtcctccgatctcagcggccttccggtcgcgcctggtgacattcaggcagccgccgagaccatccgcggtgccgtcgtcgagacgccctgcagctacagccgcacgctgagcaacatctgcggctgtgacatctggctcaaattcgagaacctccagttcacctcctcgttcaaggagcgcggcgcgctcaaccgcctcaccgcgctgacgccggaggagcgtatgcgcggcgtcatcgccatgtcggcgggcaaccacgcgcagggcgtcgcctatcacgccaggcggctcggcattcccgccaccatcgtgatgccggtcggcacgcccatggtgaagatcgagaacacgaagcaccacggcgcggaggtggtggtgacgggcgcgacgctggaggaggcggccgcgtttgcgcgcagccacggtgaagctcacggcatgatcttcgtccacccttacgacgatccgcttgtgatcgcggggcagggcaccgtcgggctggagatgttgaaggcggtgccggagctcgacacgctggttgtcccgatcggcggtggcggcctgatcagcgggatcggcattgccgcgaaatcgatcaagccatcgctgcggattcttggcgtcgaggcctggctctatccctcgatgtacaacgccatccatgacggcaatctgccggcgcgcggcgatacgctcgccgagggcatcgcggtgaagtcgcccggcaagatcacgactgaaatcgtccggcgcctcgtcgacgacatcgcgctggtcaacgaggccgagctcgagcgcgcggtcgcgaccctgatctcgatcgagaagacggtcgtcgagggcgccggcgccgccggccttgccgcgctgatgtccgacccgtcccgctttgccggccagaaggtcggcctggtgctgagcggcggcaatatcgacacgcggttgatcgcctccgtcctgacccgcgaactggcgcgcgagggacggttgacccagttgtccctcgacattcctgaccggcccgggcagctggcggcggtggctgcgctgctggccgaggctggcgccaacatcatcgaggtctcgcatcagcggaccttctccgacctgccggccaaggcgacgctactgcaactcgtgatcgagacccgcgacagcgcccatctcgacgaggtcatggcgaggctcagtgcttccggcttgagcgcgcgctgcacctga

SEQ ID NO: 31398 - protein, 414 aa, Bradyrhizobium japonicum USDA 110
MADLSQTTSSDLSGLPVAPGDIQAAAETIRGAVVETPCSYSRTLSNICGCDIWLKFENLQFTSSFKERGALNRLTALTPEERMRGVIAMSAGNHAQGVAYHARRLGIPATIVMPVGTPMVKIENTKHHGAEVVVTGATLEEAAAFARSHGEAHGMIFVHPYDDPLVIAGQGTVGLEMLKAVPELDTLVVPIGGGGLISGIGIAAKSIKPSLRILGVEAWLYPSMYNAIHDGNLPARGDTLAEGIAVKSPGKITTEIVRRLVDDIALVNEAELERAVATLISIEKTVVEGAGAAGLAALMSDPSRFAGQKVGLVLSGGNIDTRLIASVLTRELAREGRLTQLSLDIPDRPGQLAAVAALLAEAGANIIEVSHQRTFSDLPAKATLLQLVIETRDSAHLDEVMARLSASGLSARCT

SEQ ID NO: 31399 - DNA, 1005 bp, Bradyrhizobium japonicum USDA 110
  CDS (1)..(1005)
atgggcgcgataaggttgagtatgaccgaacagccccttccgatcggccccgccgatatcgatgccgcagcacgcgtgatcgcgcccttcgccatccgcaccccgctgttgtcctttcccgtgctcaacgagcgcgtcggcgcaaaagtgttcctgaagccggagatgctccagcgcaccggctccttcaagttccgtggcgccttcaacaaggtcgcctcgatcccgcaggacaagcgcgccggcggcgtcgtggccttctcctccggcaaccatgcccagggcgtggcggccgcggccaagatcctcgacatgcaggcgaccatcgtgatgcccgcggacgcgccgctgtccaagcgcgagcgcaccaagtcctacggcgccgaggtcgtgctgtacgaccgcgatcgcgacgaccgcgaggcgatctcgcgcggcatcgccgagaagcgcggcgcgacgctggtcaggccgtatgacgatcccttcgtgatcgctggccaaggcaccgccggccgggagatcgcggacgacatggcaacgctgggccttagccccgacatcgtggtggcacccgcctccggcggcggcctgatcgccggcgtcgcgaccgcgatcaaggcgcgatatccgctggcgcaggtcgtggttgccgagccggaggcgttcgacgatcacggcatttcgctgactgcaggccatcgcgagccgcatgggccggcaggccgcaccatctgcgacgcgctgatggcgctgatccccggcgagatgacatttgcgatcaacagcaagctgctcgcgcgcggcgtcaccgcatccgacaaggaagtcggtgcggcggtggcgttcgcctatcgcgagctgaagctggtggtggagccgggaggggccgtcggccttgccgcgctgctcgcggggcgtctcgacgtcgccggcaagaacgtcgtcatcgtcctctccggcggcaatgtcgatgccgatctgttcgccgagctcgtggcctga

SEQ ID NO: 31400 - protein, 334 aa, Bradyrhizobium japonicum USDA 110
MGAIRLSMTEQPLPIGPADIDAAARVIAPFAIRTPLLSFPVLNERVGAKVFLKPEMLQRTGSFKFRGAFNKVASIPQDKRAGGVVAFSSGNHAQGVAAAAKILDMQATIVMPADAPLSKRERTKSYGAEVVLYDRDRDDREAISRGIAEKRGATLVRPYDDPFVIAGQGTAGREIADDMATLGLSPDIVVAPASGGGLIAGVATAIKARYPLAQVVVAEPEAFDDHGISLTAGHREPHGPAGRTICDALMALIPGEMTFAINSKLLARGVTASDKEVGAAVAFAYRELKLVVEPGGAVGLAALLAGRLDVAGKNVVIVLSGGNVDADLFAELVA

SEQ ID NO: 31401 - DNA, 1053 bp, Xylella fastidiosa Temecula1
  CDS (1)..(1053): transl_table=11
atggatatacctgatgtagggcacacagttgtcaagcaacccaatgcaagtaacgtcaataccgtgagtgtggccgatgtgttggctgcacaagcccgcttacgtcgttatctaatgcctactccaattcactatgccgagcgtttcggagtgatgctgaagttagaaaatctgcaacgcaccggatcctataaagtgcgcggcgcactgaacgcaatgttagttgcgctggaacgcggcgataaccgccctgtcatttgcgcatcagccggtaaccacgcccaaggcgtagcttggtcagcttaccggcttggtatacaagcaatcactgtcatgcctcacggtgctccggccacaaaggttgcaggtgtttcacattggggggcaacggtacgccaacacggccaaagctatgacgaggcctatacgttcgcatgtgagttggctgagcaaaacgattaccgctttctatcagcattcgatgatccggatgtgattgccggtcagggaactgttggcatagagatcaccgcgcatgaaccggatgtagtcattgtgccgatcggcggcggcggccttgcttcaggcattgctttggtgctgcgctcgcagggagtacgtgtcattggcgctcaggtcgagggcgtggatgcgatggcgcgtgcaatccgtggcgacacacgcgagatcgctccagtttcgaccttagctgacggggtgaaagtcaagattcctggtttcattacccgccatctgtgtgccaacttgttagacgatgtagtaatcgtgcgtgaggctgaactgcgcgaaacattggtgcgtttagtattggaagaacacctgatcgccgaaggggcaggcgcactggcattggccgctggccgccgcgttgcaggtaagcgcaagtgtgcagtggtctccggaggtaatattgacgctgcagtactggccaaactgttgtccgaagtaagaccacggccaccccgcaaaccacgtaggcgtagtgcagatcgccccaacaattgcggcaatttaccgctcccttttaactga

SEQ ID NO: 31402 - protein, 350 aa, Xylella fastidiosa Temecula1
MDIPDVGHTVVKQPNASNVNTVSVADVLAAQARLRRYLMPTPIHYAERFGVMLKLENLQRTGSYKVRGALNAMLVALERGDNRPVICASAGNHAQGVAWSAYRLGIQAITVMPHGAPATKVAGVSHWGATVRQHGQSYDEAYTFACELAEQNDYRFLSAFDDPDVIAGQGTVGIEITAHEPDVVIVPIGGGGLASGIALVLRSQGVRVIGAQVEGVDAMARAIRGDTREIAPVSTLADGVKVKIPGFITRHLCANLLDDVVIVREAELRETLVRLVLEEHLIAEGAGALALAAGRRVAGKRKCAVVSGGNIDAAVLAKLLSEVRPRPPRKPRRRSADRPNNCGNLPLPFN

SEQ ID NO: 31403 - DNA, 1218 bp, Clostridium tetani E88
  CDS (1)..(1218): transl_table=11
atgactatgggattaaaacttggagatgtaaagcaagcgcaaaataatattaaaaaggttgtaagaagaacacccttggtatactcatcaacttttacaaaattaactggatataatatttatattaagtgtgaaaacaagcaaaagacaggtgcttttaaattaagaggagcttataataaaatagtaagtcttaacgaagaagaaaagaaaaaaggggttatagcatcgtcagcgggtaatcacgcacaaggtgttgcctatgcagcatctgcttttggtataaattctacaatagttatgcccgttacagcaccattagctaaagttaatgctacaaaaggttatggtgccaaggtaattcaatgtggagaagtctatgatgaatgttatataaaagcacttcaaacgcaaaaagaaaatgggtatacattcatacatccttttgatgatgaacaggttatagcaggacagggtactataggattagaaatattagaagatatggaagatgtagatgctatagtagtaccagtgggtggaggaggcttaatatcaggaatagcactagctgcaaaatctattaaaccaaatgttaagataataggagtgcaaccatctattatagcttcctctaaagtatccttagagaagggaaaggttaccacattacctggagttaagtccttagcagatggtatatctgttagtactccaggagaaataacatttaaatatatgaatgaatatgtagatgatatagtaaccgtttcagaagatgaaattgcatatagtgtattttgtttattagaaagagggaaacttttagcagaaggtgctggagcggcagctatggcagctatattaagtgataagattaatataaagggtaagaatatagtatctctcataagtggagggaatattgatatagcaacggtttctaaaataatagacagagaacttataagacttagaagaagactaagatttatagtagaaattaaagatagaataggacagttaagtagcataataacagaaattgtatccacgggagccaatgtagtaaaattaaggcaagatactaattggaataaaaaaggattggactatgtaaatgttatgtttgaaatcgaagttcagacagtagaacaatcacaagaacttatagatgctttaacaaagaaaggatacaaactagaaataatatcatag

SEQ ID NO: 31404 - protein, 405 aa, Clostridium tetani E88
MTMGLKLGDVKQAQNNIKKVVRRTPLVYSSTFTKLTGYNIYIKCENKQKTGAFKLRGAYNKIVSLNEEEKKKGVIASSAGNHAQGVAYAASAFGINSTIVMPVTAPLAKVNATKGYGAKVIQCGEVYDECYIKALQTQKENGYTFIHPFDDEQVIAGQGTIGLEILEDMEDVDAIVVPVGGGGLISGIALAAKSIKPNVKIIGVQPSIIASSKVSLEKGKVTTLPGVKSLADGISVSTPGEITFKYMNEYVDDIVTVSEDEIAYSVFCLLERGKLLAEGAGAAAMAAILSDKINIKGKNIVSLISGGNIDIATVSKIIDRELIRLRRRLRFIVEIKDRIGQLSSIITEIVSTGANVVKLRQDTNWNKKGLDYVNVMFEIEVQTVEQSQELIDALTKKGYKLEIIS

SEQ ID NO: 31405 - DNA, 1284 bp, Tropheryma whipplei str. Twist
  CDS (1)..(1284): transl_table=11
gtgcgccacggtatcgttcttgaggattttcgcgcggccgcgaaagtaatgcacagcaagttcgttgtgcatactccggtcatacagtctgttatgctgtcagaccttgtcgggtctcccgtttattttaagtgtgaaaacctgcaaataacaggatcctacaagataagaggggtgttcaattatcttcacaacctcaaaaaaagatcgactgctgtcgttgccgcaagcgctgggaatcatgcacagagcgtggcctatgctgcaaaacaaataggtatcaaggcagttatttttatgccaagcagtgttagtctgccaaagtacaacgcaaccaaaaaatacggtgcggaaattattctagatcagggtgatattcaaaccctcatactcaaggcaagacggtatgcaaaaaaacataagttcgtttttatcccgccatttgatcaccgcgatattgttgtcggccagggcacaattgccctcgaactgttagagcaggttcctgatctaagaacggtagttgtgccaactggcggcggaggactcgtggctggtattgcctctgccgttaccctggcgcagaatcccagcggaacgatcttcacaaaaagtggcttagaacagccggccaagtctggcatacgggtggttggcgttcaagcaaaaacatcggcgtcttttatagaatcgatggttgcaggaaagccagtgaaggtaaatataacctcacatttcgcagatgggatagcggttccaaaacccggaaagataacattcgaactcgcgagatgtttcgttgacaggtttgtcgaagttggtgatcacgaaattgcaggcgccatactcaccctgcttgaagactcaaaaataatagttgaacctgccgctgccagtgctgccgcagctgttctaagtaaaaaaatcacaaatctgaaagggtcaacagtgattgttttgagtggcggtaatatcgacccaatgactttgagccagataattctccgggggctatcactcaggtctcggaggctaaccttacgggcacaactcaaagatgtgcccgggcagctggctgaattttcaagagttgttgcaaaagccgaggctaatgttgttgctgtcaatcattcacgtggtaactacacggatgacaatggtcgcatctccttcggtgatgtctttatggacatcgaccttgaaacccgtggccacgagcattctcagagtattgtccgtgcccttcgagattccgggtttgtagttgaagttctgggattgtaa

SEQ ID NO: 31406 - protein, 427 aa, Tropheryma whipplei str. Twist
MRHGIVLEDFRAAAKVMHSKFVVHTPVIQSVMLSDLVGSPVYFKCENLQITGSYKIRGVFNYLHNLKKRSTAVVAASAGNHAQSVAYAAKQIGIKAVIFMPSSVSLPKYNATKKYGAEIILDQGDIQTLILKARRYAKKHKFVFIPPFDHRDIVVGQGTIALELLEQVPDLRTVVVPTGGGGLVAGIASAVTLAQNPSGTIFTKSGLEQPAKSGIRVVGVQAKTSASFIESMVAGKPVKVNITSHFADGIAVPKPGKITFELARCFVDRFVEVGDHEIAGAILTLLEDSKIIVEPAAASAAAAVLSKKITNLKGSTVIVLSGGNIDPMTLSQIILRGLSLRSRRLTLRAQLKDVPGQLAEFSRVVAKAEANVVAVNHSRGNYTDDNGRISFGDVFMDIDLETRGHEHSQSIVRALRDSGFVVEVLGL

SEQ ID NO: 31407 - DNA, 1284 bp, Tropheryma whipplei TW08/27
  CDS (1)..(1284): transl_table=11
gtgcgccacggtatcgttcttgaggattttcgcgcggccgcgaaagtaatgcacagcaagttcgttgtgcatactccggtcatacagtctgttatgctgtcagaccttgtcgggtctcccgtttattttaagtgtgaaaacctgcaaataacaggatcctacaagataagaggggtgttcaattatcttcacaacctcaaaaaaagatcgactgctgtcgttgccgcaagcgctgggaatcatgcacagagcgtggcctatgctgcaaaacaaataggtatcaaggcagttatttttatgccaagcagtgttagtctgccaaagtacaacgcaaccaaaaaatacggtgcggaaattattctagatcagggtgatattcaaaccctcatattcaaggcaagacggtatgcaaaaaaacataagttcgtttttatcccgccatttgatcaccgcgatattgttgtcggccagggcacaattgccctcgaactgttagagcaggttcctgatctaagaacggtagttgtgccaactggcggcggaggactcgtggctggtattgcctctgccgttaccctggcgcagaatcccagcggaacgatcttcacaaaaagtggcttagaacagccggccaagtctggcatacgggtggttggcgttcaagcaaaaacatcggcgtcttttatagaatcgatggttgcaggaaagccagtgaaggtaaatataacctcacatttcgcagatgggatagcggttccaaaacccggaaagataacattcgaactcgcgagatgtttcgttgacaggtttgtcgaagttggtgatcacgaaattgcaggcgccatactcaccctgcttgaagactcaaaaataatagttgaacctgccgctgccagtgctgccgcagctgttctaagtaaaaaaatcacaaatctgaaagggtcaacagtgattgttttgagtggcggtaatatcgacccaatgactttgagccagataattctccgggggctatcactcaggtctcggaggctaaccttacgggcacaactcaaagatgtgcccgggcagctggctgaattttcaagagttgttgcaaaagccgaggctaatgttgttgctgtcaatcattcacgtggtaactacacggatgacaatggtcgcatctccttcggtgatgtctttatggacatcgaccttgaaacccgtggccacgagcattctcagagtattgtccgtgcccttcgagattccgggtttgtagttgaagttctgggattgtaa

SEQ ID NO: 31408 - protein, 427 aa, Tropheryma whipplei TW08/27
MRHGIVLEDFRAAAKVMHSKFVVHTPVIQSVMLSDLVGSPVYFKCENLQITGSYKIRGVFNYLHNLKKRSTAVVAASAGNHAQSVAYAAKQIGIKAVIFMPSSVSLPKYNATKKYGAEIILDQGDIQTLIFKARRYAKKHKFVFIPPFDHRDIVVGQGTIALELLEQVPDLRTVVVPTGGGGLVAGIASAVTLAQNPSGTIFTKSGLEQPAKSGIRVVGVQAKTSASFIESMVAGKPVKVNITSHFADGIAVPKPGKITFELARCFVDRFVEVGDHEIAGAILTLLEDSKIIVEPAAASAAAAVLSKKITNLKGSTVIVLSGGNIDPMTLSQIILRGLSLRSRRLTLRAQLKDVPGQLAEFSRVVAKAEANVVAVNHSRGNYTDDNGRISFGDVFMDIDLETRGHEHSQSIVRALRDSGFVVEVLGL

SEQ ID NO: 31409 - DNA, 1524 bp, Pseudomonas syringae pv. tomato str. DC3000
  CDS (1)..(1524): transl_table=11
atgaccgatctgctcaatcactacgcccgcaaaatcctcacctcgcgcgtctacgacgtagcggtcgaaaccccgctgcatggcgcccgccagctgtccgagcggctgggcaatcaggtgctgctcaagcgcgaagatttgcagccggtgttctccttcaagattcgcggcgcgtacaacaagctcgcccaattgaccgcagaagaggccgcacgcggcgtggtcacggcctcggcgggcaatcacgcccagggcctggcgctggcggcgaaagagctgggcattctggccaccatcgtcatgccgcgcaccaccccggaaatcaaggtcgaaggggtgcgttcccgcggtgccacggtggtgttgcacggcgattccttccctgaagcgctggcctattcgctgaaactggtcgagcaacaaggcttcgtctacatccatccgtatgacgaccccgacaccattgccgggcaaggcactgtggcgatggaaatcctccgtcagcagccggggaagctggacgcgatctttgtgccggtcggtggcggcggcttgattgcagggattgcagcgtacgtgaaatacctgcggcctgagatcaaggtcatcggcgtcgagcccgacgactccaactgcctgcaagcggcgatggcggcgggcgagcgcgtggtgttgagccaggtcgggctgtttgccgatggcgtggcggtggcgcagatcggttatcacacctttgaagtgtgccgtcattacgtcgatgaagtgatcaccgtcagcaccgacgaaatctgcgcggcgatcaaggacatctacgacgacacccgctcgatcaccgagcctgcgggtgcgctgggtgttgcaggcatcaagaagtacgtcgagcagcgcggcgtgaccggccagacgctggtggccatcgactccggcgccaacgtcaactttgaccgcctgcgccacgtggccgagcgtgccgaactgggcgaaggccgcgaggcgatcattgccgtgaccattcccgagcagccgggcagcttcaaggcgttctgcgaagccatcggcaagcgccagatcactgaattcaactaccgctaccacaccgaccgtgaagcccatatcttcgtcggcgtgcagactcacccggagaacgacccacgcagcgcgctggtcgccagtctcaccgggcagggttttccggtgctggacctgaccgacaacgaactggccaaactgcacatccgccacatggttggcgggcatgccgagcgggtcaacgatgaggtggtgttgcgtttcgagttcccggagaggccgggcgcgctgttcaacttcctcaaccggctgggcgggcgctggaccatctcgatgttccactaccgcaaccacggggcagcggatggccgggtggtggcgggtctggtggtgcccgaggaagagcggcacctggtaggcgcggcgctggacgagattggttatcggtattgggacgagagcgagaacccggcgtatcggctgtttttgggctga

SEQ ID NO: 31410 - protein, 507 aa, Pseudomonas syringae pv. tomato str. DC3000
MTDLLNHYARKILTSRVYDVAVETPLHGARQLSERLGNQVLLKREDLQPVFSFKIRGAYNKLAQLTAEEAARGVVTASAGNHAQGLALAAKELGILATIVMPRTTPEIKVEGVRSRGATVVLHGDSFPEALAYSLKLVEQQGFVYIHPYDDPDTIAGQGTVAMEILRQQPGKLDAIFVPVGGGGLIAGIAAYVKYLRPEIKVIGVEPDDSNCLQAAMAAGERVVLSQVGLFADGVAVAQIGYHTFEVCRHYVDEVITVSTDEICAAIKDIYDDTRSITEPAGALGVAGIKKYVEQRGVTGQTLVAIDSGANVNFDRLRHVAERAELGEGREAIIAVTIPEQPGSFKAFCEAIGKRQITEFNYRYHTDREAHIFVGVQTHPENDPRSALVASLTGQGFPVLDLTDNELAKLHIRHMVGGHAERVNDEVVLRFEFPERPGALFNFLNRLGGRWTISMFHYRNHGAADGRVVAGLVVPEEERHLVGAALDEIGYRYWDESENPAYRLFLG

SEQ ID NO: 31411 - DNA, 1548 bp, Vibrio parahaemolyticus RIMD 2210633
  CDS (1)..(1548): transl_table=11
atgatggaatctcaacccgaaaaaaaagcgaatcaatctggcgcagactatctgcgccaaatccttcgcgcacctgtttatgaagtcgcaacagtaacgccgctgcaagaaatgcctcgtttatcggcacgtatcgggaataacgtgcagatcaagcgtgaagaccgccaacccgtacactcgttcaaactgcgcggtgcctacaatatggtggcaagcctaactgaagcacagaaagccgcgggggtgattgcagcatcggcaggcaaccacgctcaaggcatggcactgtctggcagcaagctaggtatcaaaaccacgattgttatgccaaaaaccacaccagacatcaaagtcgatgcggtacgcagtttcggtggcaatgtggtgttgcacggcaacaactttgatgaagccaaagccgaggccgaacgcttgtcagaacaacacggttatacgttcgtgcctcctttcgaccacccgttggtgatcgcaggtcaaggcaccatcggcatggaaatgctgcagcaaaatggtcatctcgactacatcttcgtgccagttggaggcggtggcttggccgctggtgtagcggttctggtcaagcaactgatgccagaaatcaaagtcatcgccgtcgaacctgaagactcgtcttgtctgaaagcggcgcttgatgctggtgaacctgtcgtactagaccaagtcagcatgtttgctgatggtgtggcggtaaaacgcatcggtgaagaaacgttccgcttgtgtcagaaatacattgatggtcatgtggcggtttcaagcgatgaaatctgcgctgccgtaaaagacatttttgaggatactcgagcgattgctgaaccatccggggcgcttgcgcttgctggcttgaagaagtttgttgagcaaaaccaactggaaaataagaaccttgccacggtgctgtctggcgcgaataccaactttcatggtttacgctatgtttcagagcgttgtgaattaggtgagaagcgtgaaggtctattagccgtgacgattccagaacgccaaggcgctttctttgaattctgtaatctgattggcggccgcgctgtcaccgagtttaactaccgttacaacgatgatgaactggcgaatatctttgttggtgtacgcctgcaaggcggtcaggaagagctggataacatcattcgcgatctacgcgaaggtggctacccagtcgtggatttgtccgacgatgaaatggccaaactgcacattcgttacatgatcggtggcaagccctcgaaacaactgaaagagcgtctctatagctttgaatttcctgagtatccaggcgcactattgaagttcttaagcacgcttggcacccattggaacatcagcctattcaactaccgcaaccacggcgccgactacggacgtgttctgtgtggtttcgagttagatgaaagcgatttagcccaattttcagcgcatttacgagaacttggctaccaatgtaaggatgaaaccgataatccatcctacaagtttttcttgtcttaa

SEQ ID NO: 31412 - protein, 515 aa, Vibrio parahaemolyticus RIMD 2210633
MMESQPEKKANQSGADYLRQILRAPVYEVATVTPLQEMPRLSARIGNNVQIKREDRQPVHSFKLRGAYNMVASLTEAQKAAGVIAASAGNHAQGMALSGSKLGIKTTIVMPKTTPDIKVDAVRSFGGNVVLHGNNFDEAKAEAERLSEQHGYTFVPPFDHPLVIAGQGTIGMEMLQQNGHLDYIFVPVGGGGLAAGVAVLVKQLMPEIKVIAVEPEDSSCLKAALDAGEPVVLDQVSMFADGVAVKRIGEETFRLCQKYIDGHVAVSSDEICAAVKDIFEDTRAIAEPSGALALAGLKKFVEQNQLENKNLATVLSGANTNFHGLRYVSERCELGEKREGLLAVTIPERQGAFFEFCNLIGGRAVTEFNYRYNDDELANIFVGVRLQGGQEELDNIIRDLREGGYPVVDLSDDEMAKLHIRYMIGGKPSKQLKERLYSFEFPEYPGALLKFLSTLGTHWNISLFNYRNHGADYGRVLCGFELDESDLAQFSAHLRELGYQCKDETDNPSYKFFLS

SEQ ID NO: 31413 - DNA, 1545 bp, Salmonella enterica subsp. enterica serovar Typhi Ty2
  CDS (1)..(1545): transl_table=11
atggcggaatctcaacctctgtcagtcgcgccggaaggggcggagtatctgcgcgcggtgctacgcgcgccagtatacgaagcggcgcaggtgacgccgctgcaaaaaatggaaaagctctcgtcacgtctggacaacgttattctcgtcaaacgcgaagaccggcagccggtacatagctttaagctgcgcggcgcttacgcgatgatggccggattgaccgaagaacaaaaagcccacggcgtgattaccgcgtcggcggggaaccatgcacagggcgtggcgttctcctccgcgcggcttggcgtgaagtctctgatcgtcatgccaaaagcaacggcggatattaaagtcgatgcggtacgcggttttggcggcgaagtgctgttgcacggcgctaattttgatgaagcgaaagcgaaagctattgagctggcgcagcagcagggttttacctgggtgccgccgtttgatcacccaatggtgatcgccgggcagggcacgctggcgctggaactgcttcagcaggattcgcatctcgatcgtgtctttgtgccggttggcggcggcggcctggcggcgggcgtagcggtactgatcaaacaattgatgccgcaaatcaaagtgattgccgtcgaagcggaggattccgcctgcctgaaagcggcgttggaagccggtcatccagtggatctcccgcgcgttgggttatttgctgaaggcgtggcggtaaaacgcatcggcgacgaaaccttccgcctgtgccaggaatatctcgacgacattattacagtcgatagcgacgcgatctgcgcggcgatgaaagacctgtttgaagatgtgcgtgcggtggcggagccgtccggcgcgctggcgctggcggggatgaaaaaatatatcgcccagcacaatattcgcggcgaacgcctggcgcacgtcctttccggcgccaacgtcaacttccacggcttgcgctatgtgtctgaacgctgcgagctgggggaacagcgcgaagcgttactggcggtgaccattccggaagaaaaggggagcttcctcaaattctgccagttgcttggcgggcgtatggtcaccgaatttaactaccgttttgccgacgcgaaacatgcctgtatttttgtcggcgtacgcgtcagtcaggggctggaggaacgaaaagagattatcacccaactgtgcgacggcggttatagcgtagtggatctctccgacgatgaaatggcgaagctgcatgtgcgctatatggtcggcgggcgcccctccaagccattacaggagcgtttgtatagtttcgaatttccggagtcgcccggcgcgttgctcaaattccttcatacgcttggcacgcactggaatatttcgctattccattaccgcagccacggtaccgattatggccgcgtgctggcggcgttcgagttaggcgatcatgagccggatttcgaaacccggctgcatgaactgggctatgaatgccatgatgagagcaataacccggcgttccggttctttctggcgggttaa

SEQ ID NO: 31414 - protein, 514 aa, Salmonella enterica subsp. enterica serovar Typhi Ty2
MAESQPLSVAPEGAEYLRAVLRAPVYEAAQVTPLQKMEKLSSRLDNVILVKREDRQPVHSFKLRGAYAMMAGLTEEQKAHGVITASAGNHAQGVAFSSARLGVKSLIVMPKATADIKVDAVRGFGGEVLLHGANFDEAKAKAIELAQQQGFTWVPPFDHPMVIAGQGTLALELLQQDSHLDRVFVPVGGGGLAAGVAVLIKQLMPQIKVIAVEAEDSACLKAALEAGHPVDLPRVGLFAEGVAVKRIGDETFRLCQEYLDDIITVDSDAICAAMKDLFEDVRAVAEPSGALALAGMKKYIAQHNIRGERLAHVLSGANVNFHGLRYVSERCELGEQREALLAVTIPEEKGSFLKFCQLLGGRMVTEFNYRFADAKHACIFVGVRVSQGLEERKEIITQLCDGGYSVVDLSDDEMAKLHVRYMVGGRPSKPLQERLYSFEFPESPGALLKFLHTLGTHWNISLFHYRSHGTDYGRVLAAFELGDHEPDFETRLHELGYECHDESNNPAFRFFLAG

SEQ ID NO: 31415 - DNA, 1056 bp, Enterococcus faecalis V583
  CDS (1)..(1056): transl_table=11
atgtatgaaggtttgttaaaacagtatcaagcgtatttgcccgtaacagaaaaaacaccaatgatttctttagccgaaggaaatacgccactgattcctttacctaatttatccaaagaattaggtattcaattatatggaaaatacgaaggcttaaatcccactggctcattcaaagatcgcgggatggtgatggctgtagcaaaagcggtagaagaaggtgccaaagcgattgtttgtgcttctacaggaaatactagtgccgccgctgctgcgtatgccacaagagcaggcattaaagcgtatgtagtgattccagaagggaaaatcgcactgggaaaattggcgcaagctattatgtatggggcggacattatttcgattccaggtaactttgatgaagcattaaaagcggtgcgagagattgcgaaaactgaggcagttgcgctagttaattcagtgaatccttatcgcttagaagggcaaaaaacagcagcttttgaagtttgtgaacaattaggtcaagcgcccgatgtcttagcgattccagttggaaatgccggcaatatttccgcttactggaaaggctttaaagaatggcatgaaaaacaaggaacaactttaccaagaatgcatggttttgaagcagaaggtgccgcagcgatcgtgaaaggccaagtgattgagcaacctgaaaccgtggcaacagcgatccggattgggaatcctgctagttggcaattagcagaacaggcacgggatgaatccggtggtttcattgatgccgtgacagatcaagaaattttaacggcttaccgaaaaattgctgctcaagatggggttttcattgaacctggttcggctgcttcattagctggagttattcaacatgttaaaagcggtaaaatcaaagcaggtgaaaccgtcgtggcagtctttactggtaacggactgaaagatcctgatacagcaatggagacagaagtagctatttcaaaaatgagtgacgtggaagaaatgcgtctgcacttacgaaaaggagtcgcaacactatga

SEQ ID NO: 31416 - protein, 351 aa, Enterococcus faecalis V583
MYEGLLKQYQAYLPVTEKTPMISLAEGNTPLIPLPNLSKELGIQLYGKYEGLNPTGSFKDRGMVMAVAKAVEEGAKAIVCASTGNTSAAAAAYATRAGIKAYVVIPEGKIALGKLAQAIMYGADIISIPGNFDEALKAVREIAKTEAVALVNSVNPYRLEGQKTAAFEVCEQLGQAPDVLAIPVGNAGNISAYWKGFKEWHEKQGTTLPRMHGFEAEGAAAIVKGQVIEQPETVATAIRIGNPASWQLAEQARDESGGFIDAVTDQEILTAYRKIAAQDGVFIEPGSAASLAGVIQHVKSGKIKAGETVVAVFTGNGLKDPDTAMETEVAISKMSDVEEMRLHLRKGVATL

SEQ ID NO: 31417 - DNA, 1059 bp, Bacillus cereus ATCC 14579
  CDS (1)..(1059): transl_table=11
atgtataaaggactattgaaacaatatgcttcttatttaccggtgaatgaaaacacacctgatgtcagtttaatggaaggaaatacacctcttattccgttattaaatatatcaaagcaattagggattcagctatatggtaagtacgaaggagcgaatccgacaggttcttttaaagatcgtggtatggtgatggcagttgctaaggcgaaagaagaaggttcagaagcaatcatttgtgcatcaacaggtaatacatcagcatcagctgcagcatatgcggcacgtcttgggatgaaatgtataatcgtaatccctgaaggaaagattgcgcatggaaaattagcgcaagcggtcgcttatggagctgaaattatttcaatagaagggaatttcgatgatgcacttaaggctgtaagaaatattgctgcagaagagccgattacattagtaaattcagtgaatccttatcgaattgaaggacaaaaaacggcagcatttgaaatttgtgaccaattgcaaaatgcaccagatgttctagctatccctgttgggaacgcagggaatattacagcatattggaaaggtttctgtgaatatgagaaagaaaaaggttataagaagccaagaattcatggttttgaagcagaaggagcagctgcaattgtaaaagggcatgtaattgaagaacctgaaacaattgcaacagcgattcgcatcggtaacccagcaagttggtcgtatgcagtagaggctgccgagcagtcttgtggtgaaatagatatggtatcagatgaagaaattttacatgcgtataggttattagcaaaaactgaaggagttttcgctgaaccaggatcaaatgcttcattagctggcgtaattaaacatgttaaatctggaaaaatcaaaaagggagaaacagttgttgcagtattaactggaaatggtttgaaggatcctgatatcgctatttcttcaaatcaactagacatcgcaagtttgtcaaatgatatagaacagattaaagatcatattaaaggggtgattatgtcgtga

SEQ ID NO: 31418 - protein, 352 aa, Bacillus cereus ATCC 14579
MYKGLLKQYASYLPVNENTPDVSLMEGNTPLIPLLNISKQLGIQLYGKYEGANPTGSFKDRGMVMAVAKAKEEGSEAIICASTGNTSASAAAYAARLGMKCIIVIPEGKIAHGKLAQAVAYGAEIISIEGNFDDALKAVRNIAAEEPITLVNSVNPYRIEGQKTAAFEICDQLQNAPDVLAIPVGNAGNITAYWKGFCEYEKEKGYKKPRIHGFEAEGAAAIVKGHVIEEPETIATAIRIGNPASWSYAVEAAEQSCGEIDMVSDEEILHAYRLLAKTEGVFAEPGSNASLAGVIKHVKSGKIKKGETVVAVLTGNGLKDPDIAISSNQLDIASLSNDIEQIKDHIKGVIMS

SEQ ID NO: 31419 - DNA, 1002 bp, Bacillus cereus ATCC 14579
  CDS (1)..(1002): transl_table=11
atgataactagaaaactaccattacatatagacgatattaaaaaagctcacaaaattctagatagaaatgctcgtaaaacgccattagtaaaatctttttacttgactagtaaaacgggtggagaaattcatttgaaattagaaaatatgcaattaacgggttcttttaaatttcgtggcgcatttaataaaatgtcgcggctcacggatcaagaaaaagaaagaggtgtaattgcatgttcagcaggtaatcatgcacaaggagttgcattatctgctcatttactcggtattaagagtaaaattgttatgccaatttctgcacctcaggcaaaagttgaagcaacaaaaggatatggatctgaagtgattttacatggtgaaacctttgatgatgcaaaggtaaaatgtgaagaaattataagggaaacaggtgaaacatacttacatccatatgatgatgtagaggtaatggctggtcaaggtacaattggattagacattcttgatgatatgtgggatgtagatactgtcattgtaccaataggtggaggcggaattatttctggtatttctgtagcattgaaatcttttaatccatccattaatataattggtgtccaagcagataatgttcatggaatgaaggcatcttacgataaaggagcaatcgtagaacactatgaggcgcctactattgcagatggttgcgcagttaaaataccaggtgaattaacatttgaaattgtaaaagaattagtagatgatattgtaactgtatcagaaaaagagctggaagtagcgatgaaagatttattacaacgtgggaaagctgttgtagaaggtgcaggtgcattagcaactgctgcacttcttgcaggaaaagttgatagttatataaaagggaaaaaagtagtggctgttatatctggtgggaacgtggacttacagcgcatatcaagtgtatgtgagcacttttttgtcgctaatgaagtgaaatag

SEQ ID NO: 31420 - protein, 333 aa, Bacillus cereus ATCC 14579
MITRKLPLHIDDIKKAHKILDRNARKTPLVKSFYLTSKTGGEIHLKLENMQLTGSFKFRGAFNKMSRLTDQEKERGVIACSAGNHAQGVALSAHLLGIKSKIVMPISAPQAKVEATKGYGSEVILHGETFDDAKVKCEEIIRETGETYLHPYDDVEVMAGQGTIGLDILDDMWDVDTVIVPIGGGGIISGISVALKSFNPSINIIGVQADNVHGMKASYDKGAIVEHYEAPTIADGCAVKIPGELTFEIVKELVDDIVTVSEKELEVAMKDLLQRGKAVVEGAGALATAALLAGKVDSYIKGKKVVAVISGGNVDLQRISSVCEHFFVANEVK

SEQ ID NO: 31421 - DNA, 1512 bp, Nitrosomonas europaea ATCC 19718
  CDS (1)..(1512): transl_table=11
atggtaaatgattatctcgaaaggatactgactgcgcatgtctatgacgttgccagcgagacgccccttgatttcgctccgtcattatctgctcgtatccataaccgcgtattgctcaaaagagaggacatgcagcgggttttttccttcaagctgcgcggcgcctataacaaaatggccaggctctccccggatgtactgcaacagggtgtggtggccgcttcagcgggtaatcatgcacagggggtggcactggccgcacaaaagctgggctgttctgccaccatcgtgatgccggccaccacaccgcaaatcaaaatcaatgcggtgatggcaatgggtgcagccgtgctgctgcaaggagattcctataatgatgcctacgaatatgcacggaatctcgccgaagaaaaagaagctgaatttgtccatccttacgacgatcccgatgtaattgccggacagggcacgattgccatggaaattctgcgccagcatccgggcaggattcacgcaatttttgtaccgatcggtggcggagggctgatttcaggcattgccgcgtatgtgaaacggttgcgaccggatatcaaggtgatcggagtggagccggttgattcaaatgccatgtaccgctccctgcaggcaggctatcgtgtcgaactctcccaggtggggctgtttgcggatggcgtggctgtccgcctggtaggcgaggaaaccttccggctgtgccgtgagctggtggatgacatcatcctggtggattcggatgccatttgtgcagcgatcaaggatattttcgaggatacacgctccatcgttgaaccttcgggagcactttcaattgccgggttgaaggcatacgtcaaacaaaaaaacttgctgcacgaagtcctggttgcgattgcttccggcgcgaacatgaattttgaccgtttgcgtcatgtttctgaacgggcagaacttggtgagcagcgcgaagctatcctcgcagtcacgatccctgaaaaaccgggcagcttcaaaaaattctgcaatctgctgggcgctcgtaatatcactgaattcaattaccgctatgcggaccccgagatggcgcatgtctttgtcggtgtatcagtgcgcaatcgggaggaatcgttacatttgatcgagattctgcaggaaaacggtttgaaaaccgaagacatgaccgataacgaaatggccaaactgcatatccgtcacatggtgggcgggcgcagcagagaagtcatgcatgaaattttgtatcgcttcgaattccctgatcgcccgggtgcactcatgaattttctgaatcacatgagcgaccactggaacatcagcctgtttcactatcgtaatcatggtgccgatttcggccgtgtgctgatcggtatacaagttccgccggaagaaaaacaggaattcagggagttcctcgataaactgggctacagcttctgggatgaaaatgacaacccggcttaccagctttttctcgcctga

SEQ ID NO: 31422 - protein, 503 aa, Nitrosomonas europaea ATCC 19718
MVNDYLERILTAHVYDVASETPLDFAPSLSARIHNRVLLKREDMQRVFSFKLRGAYNKMARLSPDVLQQGVVAASAGNHAQGVALAAQKLGCSATIVMPATTPQIKINAVMAMGAAVLLQGDSYNDAYEYARNLAEEKEAEFVHPYDDPDVIAGQGTIAMEILRQHPGRIHAIFVPIGGGGLISGIAAYVKRLRPDIKVIGVEPVDSNAMYRSLQAGYRVELSQVGLFADGVAVRLVGEETFRLCRELVDDIILVDSDAICAAIKDIFEDTRSIVEPSGALSIAGLKAYVKQKNLLHEVLVAIASGANMNFDRLRHVSERAELGEQREAILAVTIPEKPGSFKKFCNLLGARNITEFNYRYADPEMAHVFVGVSVRNREESLHLIEILQENGLKTEDMTDNEMAKLHIRHMVGGRSREVMHEILYRFEFPDRPGALMNFLNHMSDHWNISLFHYRNHGADFGRVLIGIQVPPEEKQEFREFLDKLGYSFWDENDNPAYQLFLA

SEQ ID NO: 31423 - DNA, 1002 bp, Bacillus anthracis str. Ames
  CDS (1)..(1002): transl_table=11
atgataactaaaaaactaccattacatatagacgatattaaaaaagctcaaagcattctggatagaaatgctcgtaaaactccattagtaaaatcattttatttgactagtaaaacgggtggagaaattcacttgaaattagaaaacatgcaattaacaggttcgtttaaattccgtggtgcgtttaataaaatgtcacagctgacagatcaagaaaaagaaagaggagtaattgcttgttctgctggtaatcatgcgcaaggaattgctttatctgctcatttacttggtattaagagtaaaattgttatgccgatttctgcaccgcaggcgaaagttgatgcgactaaaggatatggatctgaagtagttttacatggtgaaacctttgatgatgcgaaggcaaaatgtgaggagattattagggaaacaggtgaaacatacttacatccatatgacgatgtagaagtaatggcaggtcaaggtacaataggattagatattcttgatgatatgtgggatgttgatacggtcattgtaccaattggtggaggaggaattatttctggaattgctgtcgcattaaaatcttttaatccgtcgattcatataattggtgtgcaagcagaaaatgttcatgggatgaaggcatcttatgacaaaggcaaaattatagaacattatgaggcacctacgatagcagatggttgcgcggtaaaaatacctggcaatttaacttttgaagttgtaaaagaattagtagatgatattgtaacggtatcagaaaaagagctggaagtagcgatgaaagacttattacaacgcgggaaagctgttgtagaaggtgcaggcgcattagctactgctgctctacttgcagggaaagtggatacatatattaaagagaaaaaagtagtagcagttatatctggtgggaacgtagacttacagcgcatatcgagtgtttgtgaacaattttttgtggcgaatgaagtggaatag

SEQ ID NO: 31424 - protein, 333 aa, Bacillus anthracis str. Ames
MITKKLPLHIDDIKKAQSILDRNARKTPLVKSFYLTSKTGGEIHLKLENMQLTGSFKFRGAFNKMSQLTDQEKERGVIACSAGNHAQGIALSAHLLGIKSKIVMPISAPQAKVDATKGYGSEVVLHGETFDDAKAKCEEIIRETGETYLHPYDDVEVMAGQGTIGLDILDDMWDVDTVIVPIGGGGIISGIAVALKSFNPSIHIIGVQAENVHGMKASYDKGKIIEHYEAPTIADGCAVKIPGNLTFEVVKELVDDIVTVSEKELEVAMKDLLQRGKAVVEGAGALATAALLAGKVDTYIKEKKVVAVISGGNVDLQRISSVCEQFFVANEVE

SEQ ID NO: 31425 - DNA, 1227 bp, Helicobacter hepaticus ATCC 51449
  CDS (1)..(1227): transl_table=11
atgaaaaagcagatatatgaaaaagtaataaaagccaagcaacgtttagaaaatgtgattattccctcgcctttaagctatgcacctatgctctctcttttagctcaagctgatatttatcttaaaaaagagaatctgcaactgacgggagcatttaagattcgtggagcgttcaataaaattgcctctttggttgaacaatctactcattcccaaatacagggcgttatcgctgcaagtgctgggaatcacgcgcaaggtgttgcctatgctgcaaagcattttggtataaaagccgtgattgtaatgcccgaagctactcctttacttaaggtaagtgcgacaaaagctcttggtgcggaagtggttttaagtggagataattatgatgaagcctatgctaaagctttgcaggttgctaaagagcgtgatttagtgtttattcacccttttgctgacgaggaggtgattgcagggcagggcagtattgcgcttgagatgatacaagaatgtgaggatttaaatgtagtagttgtgcctattggtggaggtggtttgattagtggtatagggagtgtgtataagcaactatatccgaatgtaagagttataggtgtagtggcaagtggtgcagacgctatgaaacgctcttttgagagtggtgctatccaaaaaatagaatctgtgcggagcattgctgatggtatagctgtgcgtgatgttaatgaggagaattttgcgcttgtgcaagaatgtgttgatgaaatagtgagcgtagatgatgaagaaattgcaaatgctattttatttttgattgaaaaacaaaaacttgttgttgagggtgcaggagcagcgagtgtagcaagtattttgcacaaaaagtttgcacttacaaagcaagataaagtagcacttgtgctaagtggaggaaatattgatattactttgcttaatgttattattgaaaaaggtttattgaaatctaatcggaagatgaagcttgaagtcgtgctcatagataagcccggtagtttgcaagggctaacaaatattttaagtaaagtgggtgcaaatatcgttcagattgaatatgataggacttctgttatgcttaaatatggagatgcacttgtaacaatggcattagagacaaaaaatgaagaacacaaagtgctcattcgcgagcaacttcaacattatggttatcattttaatgagattaattag

SEQ ID NO: 31426 - protein, 408 aa, Helicobacter hepaticus ATCC 51449
MKKQIYEKVIKAKQRLENVIIPSPLSYAPMLSLLAQADIYLKKENLQLTGAFKIRGAFNKIASLVEQSTHSQIQGVIAASAGNHAQGVAYAAKHFGIKAVIVMPEATPLLKVSATKALGAEVVLSGDNYDEAYAKALQVAKERDLVFIHPFADEEVIAGQGSIALEMIQECEDLNVVVVPIGGGGLISGIGSVYKQLYPNVRVIGVVASGADAMKRSFESGAIQKIESVRSIADGIAVRDVNEENFALVQECVDEIVSVDDEEIANAILFLIEKQKLVVEGAGAASVASILHKKFALTKQDKVALVLSGGNIDITLLNVIIEKGLLKSNRKMKLEVVLIDKPGSLQGLTNILSKVGANIVQIEYDRTSVMLKYGDALVTMALETKNEEHKVLIREQLQHYGYHFNEIN

SEQ ID NO: 31427 - DNA, 1248 bp, Rhodopirellula baltica SH 1
  CDS (1)..(1248): transl_table=11
atgtcccctctgatcgccgccgacaaaattgaagcggctcgcaagcgaatcgccaaagtggttcgccacacgccattgatgcgaaacgctcggctctctgcactttatgatgcggagattttgctcaaacgtgaggacttgcaggaagttcgcagctacaaaattcgtggcgcgtacaaccggatgtcgcaactcagtgatgcacaacgtgccgcgggagtcgtttgcgctagtgccggaaatcacgcgcaaggattcgcctacgcctgccatgccatggggattcaggggcgagtttttatgccggcggtcacgccgaagcaaaaggtcgacaaagtcaagctgtttggacaggaacacgttgaggtcatcttgattggtgacacctttgacgacgccgccgcggaggctcatcgcgcagctgaggaaggcctgacgtacattcctccgtttgatgatcccgcgatcattgagggacaaggcaccgttggtgctgaaattttagaggaccattccgagccaattgatatggtgctcgttgccgtcggtggcggcggtctgatctcgggattgggcagcatcttcaaacagctttcaccgaaaacgaagatcatcggcattgaacccaccggtgcaccagcgatgcatgatagccttcgagcaggcgaggtgatcacgctggaaaagatcgacaacttcgttgatggagccgcggtcaggcgtgtcggagatttgaatttcaagatcgctcaacatgtgattgacgaaatgattttggtgccggaaggaaaggtgtgcagcgtgatgttgcagctctacaacgacgaaggtttggtcgtggaaccggctggcgcgttgtcgatcgccgcactggaccagctcgcatccgaaatttgcggcaaaactgttgtctgcgttgtcggcggaagcaacaacgacatcactcgcaccgaagaaattcgtgaccgagcaatgttgtacgaaggtttgcagcactacttcatcatcaagtttccgcagcgagccggggctttgcgagagttcctcaacaatgtgcttgggccaaccgacgacatcacacactttgagtacacacgaaagcacaatcgcgaaaccgggccggcgctcgttggtttgcaggtcgcccaccgcgacgactaccaaggcttgctcgaccggatggccgccagcaatatcgaataccaagtcgtcaacgaacaacgcatgctgttcgagttgttggtgtaa

SEQ ID NO: 31428 - protein, 415 aa, Rhodopirellula baltica SH 1
MSPLIAADKIEAARKRIAKVVRHTPLMRNARLSALYDAEILLKREDLQEVRSYKIRGAYNRMSQLSDAQRAAGVVCASAGNHAQGFAYACHAMGIQGRVFMPAVTPKQKVDKVKLFGQEHVEVILIGDTFDDAAAEAHRAAEEGLTYIPPFDDPAIIEGQGTVGAEILEDHSEPIDMVLVAVGGGGLISGLGSIFKQLSPKTKIIGIEPTGAPAMHDSLRAGEVITLEKIDNFVDGAAVRRVGDLNFKIAQHVIDEMILVPEGKVCSVMLQLYNDEGLVVEPAGALSIAALDQLASEICGKTVVCVVGGSNNDITRTEEIRDRAMLYEGLQHYFIIKFPQRAGALREFLNNVLGPTDDITHFEYTRKHNRETGPALVGLQVAHRDDYQGLLDRMAASNIEYQVVNEQRMLFELLV

SEQ ID NO: 31429 - DNA, 1545 bp, Candidatus Blochmannia floridanus
  CDS (1)..(1545): transl_table=11
atgatgaagaagtatcaggaatcattttcttgtcaggaaatgtgtccatcagagtatttgaaaattgctttgcattctcatgtatatgaagttgcacaagttactccgttgcaggtgatgcataagttatcgagtagacttaaaaatatagtgttagttaaacgtgaagatagacagccagtacatagttttaagttacgtggggcttatgctatgctttcgaatcttaccgaaaaacaacaatcgtctggggtaatcacagcttctgccggtaatcatgcccaaggagtggcattttcagctagtcatttaggaattagttctgtagttgtaatgcctgtgaatacggctgatataaaaattgatgcagtacgtcattttggaggaaaaccattgttgtttggatcaaattttgatgaagctaaagttaaagctatttatttagctgataagaattgtttgacttttattcctccttttgatcatccgtttgttattgcaggtcaaggtactgtggcgatggagttattacaacaagattcgcatttagatcgtatttttgtgccagtaggcggaggtggattagcagcaggtattgctgtattaattaaatatcttatgccaaaaattaaagttattggagtggaatcagaagaatcagcatctttatgtgcagctttggaagctgggtttccagtatatttaagtaaggtgggattatttgcagagggagtggcagtacgatgtataggtcatgaaacatttcgtttgtgtcaaaaatatcttgatgatgttattactgtagataatgattcaatttgtgctgcaataaaagatctatttgaagatgttcgagctatagctgaaccatcaggtgcgttagcgttagctggaatgaagaaatatattcagcgacatgcgatacatggagaaaaattagtacatgttctttccggggctaatattaattttcatgaattaagatatatttcagagcgttgtgaactaggagaacaaagagaggcgttaatggtagttactattccagaaaaaaaaggtagttttttagaattttttaaaattttagaagataaatcagtaacagaatttaattatcgttataatggatctaaaaatgtttgtgtatttattggtgtgcgtttacagaatggacgttgtgaacgagatagtatagtagaaaatattcttaatcatggatttcctgttgtagatttgtctgataatgaaatggctaaattacatgctagatatatggtgggatctcgttctttacagtcttttcgtgagcgaatttttagttttgagtttccagaagctccaggagcattattgaaatttttgaatactttaggaactgattggaatatttctttatttcattatcgtaatcatggtacggattatggtcgagttttagctggatttgaattatctcatcaggaactagaatttgatcagcatttatctaaattagggtatacatgtcatgatgtgactactaatccagtatttcaatttctttag

SEQ ID NO: 31430 - protein, 514 aa, Candidatus Blochmannia floridanus
MMKKYQESFSCQEMCPSEYLKIALHSHVYEVAQVTPLQVMHKLSSRLKNIVLVKREDRQPVHSFKLRGAYAMLSNLTEKQQSSGVITASAGNHAQGVAFSASHLGISSVVVMPVNTADIKIDAVRHFGGKPLLFGSNFDEAKVKAIYLADKNCLTFIPPFDHPFVIAGQGTVAMELLQQDSHLDRIFVPVGGGGLAAGIAVLIKYLMPKIKVIGVESEESASLCAALEAGFPVYLSKVGLFAEGVAVRCIGHETFRLCQKYLDDVITVDNDSICAAIKDLFEDVRAIAEPSGALALAGMKKYIQRHAIHGEKLVHVLSGANINFHELRYISERCELGEQREALMVVTIPEKKGSFLEFFKILEDKSVTEFNYRYNGSKNVCVFIGVRLQNGRCERDSIVENILNHGFPVVDLSDNEMAKLHARYMVGSRSLQSFRERIFSFEFPEAPGALLKFLNTLGTDWNISLFHYRNHGTDYGRVLAGFELSHQELEFDQHLSKLGYTCHDVTTNPVFQFL

SEQ ID NO: 31431 - DNA, 1581 bp, Bordetella parapertussis 12822
  CDS (1)..(1581): transl_table=11
atgtccgataccgccaccgccccgacgaccgccgagccgcgcaccgcgccgccggcgcgcgccgatctgcttgcccactacgcccgcaagacgctttccgcgccggtctacgacgtcgcgctggagacgccgctgcaagcggcgccgcgcctgtcgcgccagctggattgccgcgtgctgctcaagcgcgaagacctgcagccggtgttctcgttcaagatccgcggcgcctacaaccgcgtcgcgcagttgagcgccgaggagcgccgccgcggcgtcatcgccgcctcggccggcaaccatgcgcaagggctggcgctggccgccgcgcgcctgggcattccggcgctcatcgtcatgccgcgcaccgcgcccgagctgaagatcgacggcgtgctggcgcacggcgcgcaggtggcgctgcatggcgacgcctttccggcggcgctggcgcacgcgcaggcgctggctgaacgcgagggcagggtgttcatcccgccgtacgacgatcccgacgtgatcgccggccagggcacggtgggcatggagatcctgcgccagcatccgggccgcctggacgccattttcgtgccggtcggcggcggcagcctgatcgcgggcgtggccgcctacgtcaagcatgtgcgtccggagatccgcatcatcggcgtcgagccggtggattcgaactgcctgcaggccgcgctggcggcgggccggcgcgtggtgctcgaccgcgtgggcaccttcgccgacggcgtggcggtggcgcagatcggccatcacaatttcgagatctgccgcgaccatgtcgacgaggtgatctgcgtcaccaacgatgaaatctgcgccgccatcaaggacatctacgacgatacccgctccatcaccgaaccggccggcgcgctggcggtggcgggcctgcgcaagtacgccgagcgcggcgaggcggccgggcgcaccctggtggcgatcgactcgggcgccaacatcaacttcgaccgcctgcggcacgtggccgagcgcgccgcgctgggcgagcagcgcgaagccttgatcgcggtgaccatccccgagcggccgggcagctttaaggccttctgcgcggcattggggccgcgccagatcaccgaattcaactatcgctaccatcccggcgacgaggcgcagatcttcgtcggggtgcggacccatcccgagcacgaccggcgcgatgcgctgctggccgggctgcgcggccagggcttcgcggtgcaggacctcagcgacgacgaactggccaagctgcacgtgcgccacatggtgggcgggcgcgccaaccagatcgacgacgagcaggtgttccgcttcgagttccccgagcgtcccggcgcgctgttcgacttcctgagcaaactgggcggccgctggaacatcaccatgttccactaccgcaaccacggctcggccgacggccgcgtggtggccggcctgcaggtgccggccgacgagcgccacctggtgccgcaggcattgacgcgcatcggctatccgttccgggacgagacggccaatccctcgtatcgcctgttcatccggtga

SEQ ID NO: 31432 - protein, 526 aa, Bordetella parapertussis 12822
MSDTATAPTTAEPRTAPPARADLLAHYARKTLSAPVYDVALETPLQAAPRLSRQLDCRVLLKREDLQPVFSFKIRGAYNRVAQLSAEERRRGVIAASAGNHAQGLALAAARLGIPALIVMPRTAPELKIDGVLAHGAQVALHGDAFPAALAHAQALAEREGRVFIPPYDDPDVIAGQGTVGMEILRQHPGRLDAIFVPVGGGSLIAGVAAYVKHVRPEIRIIGVEPVDSNCLQAALAAGRRVVLDRVGTFADGVAVAQIGHHNFEICRDHVDEVICVTNDEICAAIKDIYDDTRSITEPAGALAVAGLRKYAERGEAAGRTLVAIDSGANINFDRLRHVAERAALGEQREALIAVTIPERPGSFKAFCAALGPRQITEFNYRYHPGDEAQIFVGVRTHPEHDRRDALLAGLRGQGFAVQDLSDDELAKLHVRHMVGGRANQIDDEQVFRFEFPERPGALFDFLSKLGGRWNITMFHYRNHGSADGRVVAGLQVPADERHLVPQALTRIGYPFRDETANPSYRLFIR

SEQ ID NO: 31433 - DNA, 1218 bp, Bordetella parapertussis 12822
  CDS (1)..(1218): transl_table=11
gtgatcgatcttgccgccatccagaccgcccgggacatcctgcggggacaggtcctcaatacgccgttcacgcattcccgcacgctgtccgatatcctcggcgccgaaatctggctgaagttcgagaacctgcagttcaccgcctcgttcaaggagcgcggcgccctcaaccggatgctcaacctgaccgaggccgagcgcgccgccggcgtgatcgccgtgtcggccggcaaccatgcccagggcgtggcgtaccacgcgcagcgcatgggcgtgccggcggtgatcgtcatgccgcgcttcactcccacggtcaaggtggccaacacgcggcgcttcggcgccgaagtcgtcctggccggcgacaccttcgacgacgccaaggcgcgcggctacgaactggcgcgcgagcgcggcctggtcatgatccatccctacgacgatccagccgtgattgccgggcagggtacggtggcgctcgaaatgctgcaggcgcgcccagacctggacgccatcgtggtgggcatcggcggcggcggcctgatcgcgggcatcgccaccgccgccaaggccatcaagccggacatcgagatcatcggcgtgcagaccgagcgctttccgtccatgtacgccgccgtcaagggcgtggccatggaaagcggccactacacgatcgccgagggcatcgccgtcaagtcacccggcacgctgacccaggagatcgtcacgcgcctggtcgaccacatcgagctggtcaacgaaagcgatatcgagcatgccatcgtggtcctgctggaaatcgagaagaccgtggtcgaaggggccggcgcggccggcctggcggcgctgctgcggctgcaggaacgccgcgacgagcggttccgcggcaagcggctggggctggtgctcacgggcggcaacatcgatcccctgatgctgggcgagctgatcgagcgcggtatggtgcgcgccgggcgcctggcgcgcatccgggtcgacctgcgcgacctgccgggcgcgctggcgcaggccaccaagctgatcgccgacgcgcacgccaacattaccgaggtgcatcaccagcgcgccttcaccaccttgccagtgcgcaatgtcgaggtcgatttcgtgctgcagacgcgtggccatgaccacatccaggaagtcatcgcggtgctcaatgccgcgggcttcgcggccagcaaccacgatcactga

SEQ ID NO: 31434 - protein, 405 aa, Bordetella parapertussis 12822
MIDLAAIQTARDILRGQVLNTPFTHSRTLSDILGAEIWLKFENLQFTASFKERGALNRMLNLTEAERAAGVIAVSAGNHAQGVAYHAQRMGVPAVIVMPRFTPTVKVANTRRFGAEVVLAGDTFDDAKARGYELARERGLVMIHPYDDPAVIAGQGTVALEMLQARPDLDAIVVGIGGGGLIAGIATAAKAIKPDIEIIGVQTERFPSMYAAVKGVAMESGHYTIAEGIAVKSPGTLTQEIVTRLVDHIELVNESDIEHAIVVLLEIEKTVVEGAGAAGLAALLRLQERRDERFRGKRLGLVLTGGNIDPLMLGELIERGMVRAGRLARIRVDLRDLPGALAQATKLIADAHANITEVHHQRAFTTLPVRNVEVDFVLQTRGHDHIQEVIAVLNAAGFAASNHDH

SEQ ID NO: 31435 - DNA, 969 bp, Bordetella parapertussis 12822
  CDS (1)..(969): transl_table=11
atgcagccccaattgcccacttatgccgacgtcgaacaggcggccgccacgctggctggcgtggcgcatcgcacccccgtgctgacctcggccaccgccgacgccatggcgggcgcgcaggtctttttcaagtgcgagaacttccagcgcatgggggcgttcaagttccgcggcggctacaacgccatcgcccgcctgacgcccgaacagcgccgcgccggcgtggtgacgttttcgtcgggcaaccatgcccaggccatcgccctggccgcgcgcctgcagggcgtgcaggccaccatcatcatgccgcaggacgcgccggcggccaagcgcgcggccaccgagggctacggcggccggatcgtcacctacgaccgctacagcgaggaccgcgaggccatcgcgcgccggctgcaggaagaaaccggcgccacgctgatcccgccctatgaccacgccgacgtgatcgccgggcaggggaccgccgccaaggaactgttcgacgaggtcggcgaactcgactacctgttcgtgtgcctgggcggcggcggactgctggcgggctcggccctggcggcgcgggccctcagcccggcctgccgcgtctacggcgtcgagccggcggccggcaacgacagccagcactccttgcgcaagggcgagatcgtcaccatcgccgcccccaagtcgatcgccgacggcgcggtcacgacgcacctgggccggctgaccttcgccatcatccagcagcaggtggcggacatcctgaccgtcagcgatgccgaactggtgcaaagcatgaggttcttcgccgagcgcatgaaaatggtggtcgaacccaccggctgcctggccgccaccgccgcgttgcgcaaactcatccccgaggcggccggcaagcgcgtcggcgtcatcatcagcggcggcaacgtcgacctgccggtctacgcgcgcctgctggccgactga

SEQ ID NO: 31436 - protein, 322 aa, Bordetella parapertussis 12822
MQPQLPTYADVEQAAATLAGVAHRTPVLTSATADAMAGAQVFFKCENFQRMGAFKFRGGYNAIARLTPEQRRAGVVTFSSGNHAQAIALAARLQGVQATIIMPQDAPAAKRAATEGYGGRIVTYDRYSEDREAIARRLQEETGATLIPPYDHADVIAGQGTAAKELFDEVGELDYLFVCLGGGGLLAGSALAARALSPACRVYGVEPAAGNDSQHSLRKGEIVTIAAPKSIADGAVTTHLGRLTFAIIQQQVADILTVSDAELVQSMRFFAERMKMVVEPTGCLAATAALRKLIPEAAGKRVGVIISGGNVDLPVYARLLAD

SEQ ID NO: 31437 - DNA, 987 bp, Bordetella bronchiseptica RB50
  CDS (1)..(987): transl_table=11
atgctcgacgtgacctccgacacctccgccgtacccgacagttccgccatcgcctacctgcacgcccagctgcagcgctgggtgcgcgccacgccgatcctggagaaaaccgatttcgagccggtggccggcatcgcggtgtgcttcaagttcgaactgctgcaggccagcggcaccttcaaggcgcgcggcgccttctcccacctgctggcgctggacgacgcgcaacgccaggccggcgcgacctgcgtctcggccggcaaccatgccgtggccgtcgcctacgcggccatgcggctgggcctgtcggccaaggtagtcatgatcaagaccgccagcccggcgcgcgtggcgctgtgccgccagtacggcgccgaggtcgtcctggccgacgacggcccgcaggccttcgagacggtgcgccgcatcgagaacgaggaaggccgctacttcgtgcatccgttcaatggctaccgcacggtgctgggcaccgccacgctgggccacgaatggctgcagcaggccggcgagctcgatgcggtcatcgtgcccgtcggcggcggcgggctgatctcgggcgtggccaccgcgatcaagctggccgcaccgcaatgccaggtcatcggcgtcgaacccgaaggcgccgacgccatgcaccgcagcttcgcggccggcggcccgatcaggatgggcccgatgcacagcatcgccgacagcctgatggcgccgcacaccgagcagtacacctacgacctgtgccggcgccacgtcgaccggctggtcaaggtggacgaccacgcgctgcgcgccgccatgcggctgctgttcgaccagctcaagctggccaccgagccggcctgcgcggccgccaccgccgcgctggccgggcccttgcgcaacgacctggccggccggcgcgtgggcgtgctgctgtgcggcaccaacaccgatccggccaccttcgcgcgccacctgggcgcggactga

SEQ ID NO: 31438 - protein, 328 aa, Bordetella bronchiseptica RB50
MLDVTSDTSAVPDSSAIAYLHAQLQRWVRATPILEKTDFEPVAGIAVCFKFELLQASGTFKARGAFSHLLALDDAQRQAGATCVSAGNHAVAVAYAAMRLGLSAKVVMIKTASPARVALCRQYGAEVVLADDGPQAFETVRRIENEEGRYFVHPFNGYRTVLGTATLGHEWLQQAGELDAVIVPVGGGGLISGVATAIKLAAPQCQVIGVEPEGADAMHRSFAAGGPIRMGPMHSIADSLMAPHTEQYTYDLCRRHVDRLVKVDDHALRAAMRLLFDQLKLATEPACAAATAALAGPLRNDLAGRRVGVLLCGTNTDPATFARHLGAD

SEQ ID NO: 31439 - DNA, 1509 bp, Bordetella bronchiseptica RB50
  CDS (1)..(1509): transl_table=11
atgtccaccgactacctcaaacgcatcctgacctccaaggtctacgacgtcgccgtcgaatcgccgctggagcgcgcgcccctgctgtcgcagcgcatcgcgaacaacgtgctgctcaagcgcgaggacacccaggcggtattcagcttcaagctgcgcggcgcctacaacaagatggccaacctgacgccggcggcgcgcagccgcggcgtgatcgccgcctcggcgggcaatcatgcccagggcgtggccctggcggccaccaggctgggctgccgcgcggtcatcgtcatgcccaccaccagcccgcaggtcaaggtcgacgccgtgcgccggctcggcggcgaggtcgtgctggccggcgacagcttcaccgacgcctacgaacacgcgcagcagctggaaaagcgcgaaaagctgaccttcgtgcatcccttcgacgatcccgacgtgatcgccggccagggcaccatcggcatggaaatcctgcgccagcatccgggcgagatcgaggcgatcttcgtggccatcggcggcggcggcctgatcgccggcgtggccgcctacatcaagcagttgcggccggaaatcaagatcatcggcgtgcagaccgaagactccgacgccatggtccgcagcgtacgcgccggccggcgcgtgcagctcagcgatgtcggcctgttctcggacggcacggccgtcaagctggtgggcgccgaaacgttccggctggcgcgccagtacgtggacgacttcgtggtggtcaataccgacgcgatctgcgcggccatcaaggacgtgttccaggacacccgcagcgtgctggagcccgccggcgccatggcggtggccggcgccaagcagtacgcggccgagcacaagctcaagggcaagaccctggtggcggtggcatgcggcgccaacatgaatttcgaccggctgcgcttcgtggccgagcgcgccgaagtgggcgaaatgcgcgaggcggtgttcgccgtcaccatgcccgagcagcgcggcagcttccgccgcttctgcgagctggtcggcaaccgcagcgtcaccgagttcaactaccgcatctccgatgccgagcgtgcgcacgtcttcgtgggcgtgcaggtctccacgccggccgaaccggaaaagatcgccgccaacttccgccggcacggcttcgacaccctggacctgacgcacgacgaactggccaagacgcacctgcgccacatggtcggcggccattcggcgctggcgcgcaacgaactgctctaccgcttcgagttccccgagcgcccgggcgcgttgatgcgctttctcaacgccatgaaccccgactggaacatcagcctgttccactaccgcaaccagggcgccgactacggcaacatcctgatcggcatccaggttccgcccaccgacaagaaactgttcaagaccttcgtcgccgaactgggctacccgcactggaacgaaacggacaacccggcgtacaggctgttcctgtag

SEQ ID NO: 31440 - protein, 502 aa, Bordetella bronchiseptica RB50
MSTDYLKRILTSKVYDVAVESPLERAPLLSQRIANNVLLKREDTQAVFSFKLRGAYNKMANLTPAARSRGVIAASAGNHAQGVALAATRLGCRAVIVMPTTSPQVKVDAVRRLGGEVVLAGDSFTDAYEHAQQLEKREKLTFVHPFDDPDVIAGQGTIGMEILRQHPGEIEAIFVAIGGGGLIAGVAAYIKQLRPEIKIIGVQTEDSDAMVRSVRAGRRVQLSDVGLFSDGTAVKLVGAETFRLARQYVDDFVVVNTDAICAAIKDVFQDTRSVLEPAGAMAVAGAKQYAAEHKLKGKTLVAVACGANMNFDRLRFVAERAEVGEMREAVFAVTMPEQRGSFRRFCELVGNRSVTEFNYRISDAERAHVFVGVQVSTPAEPEKIAANFRRHGFDTLDLTHDELAKTHLRHMVGGHSALARNELLYRFEFPERPGALMRFLNAMNPDWNISLFHYRNQGADYGNILIGIQVPPTDKKLFKTFVAELGYPHWNETDNPAYRLFL

SEQ ID NO: 31441 - DNA, 1545 bp, Prochlorococcus marinus str. MIT 9313
  CDS (1)..(1545): transl_table=11
atggacgattatctacagaggattctgagggcacgtgtctatgacgtagcccatgaaacccccctggaactggccaaaaacctcagtcgccgttttcagaacaagatctggttgaaacgtgaggacctacagccagtcttctcattcaagctgcgtggtgcgtataaccgcatgtcccttctcagccaagaagagttgcagcgtggcgtgattgcttcaagtgctggaaaccacgctcagggagtggcactgagcgcctcttatctcaattgcagagctgtgattgtgatgcctatcaccacacccgaaatgaaggtacgggcagtccgtgctcttggcgctgaagtcgcacttcatggagagacctacgacgaggcctatcaagaggccatgcgtcgcagtgaaaaagatggactcacgtttatccacccgtttgatgatccagaggtgattgctgggcaagggacgattgctctagaaatcctgcgccagatccaagatccaccagatgcaatctatgtcgcagttggcggtggcggactgatcggagggattgccacctatgtcaaaagcttgtggccgcaagtcgaaattatcggtgtcgagccctacgacgctgcagcaatgaagctctctcttgaggctggtgaacgtattcagctgcccaatgttggcctatttgccgacggagtcgctgtacgtcaagtaggcaaactcaccttctcattagcccagatgcacgtagacgcgatggtgacggtaagcactgatgaaatctgtgcagcgatcaaagatgtttttgaagatacccgctcaattcttgaaccagctggcgcactggcaattgctggcatgaaggcagatatcgccaaacgtgatcttcaagaccgcactcttgtggccgtggcctgtggcgcaaacatgaactttgaacggcttcgttttgtcgccgaaagagcagagctaggggaagaaagggaagcaatactcgctgtggaaatcccagaacaggcaggcagcctgcgaaagctctgcaatgtccttgcagggaaaaatctcaccgaattcagttaccgaatggcagaaggggatagagcacaaatattcatcggggtacaggttttagacctggatgatcgaaccaagcttttaacgcgactgcagtcgtcaggattcgcatgccttgatctcagcaacgacgagctcaccaaagggcaccttcgtcacatggtgggtggtcggcttcctgcctcagccaaaaccctttgccgagatggatgtcgcgaactgctctatcgctttgagttccctgagcgaccaggagctcttatgacctttgttagtgcccttcaccctgaatggagtatcagcatcttccactaccgcaatcacggagcagatgtcggcaggatcgttgtaggtgtgttggttcaggacaacgaaatggacgattggcagcgctttcttgaagatctgggctacccaaactgggaagaaacaaacaaccccgcctactgcttatttctgggtgcacagaccgtttga

SEQ ID NO: 31442 - protein, 514 aa, Prochlorococcus marinus str. MIT 9313
MDDYLQRILRARVYDVAHETPLELAKNLSRRFQNKIWLKREDLQPVFSFKLRGAYNRMSLLSQEELQRGVIASSAGNHAQGVALSASYLNCRAVIVMPITTPEMKVRAVRALGAEVALHGETYDEAYQEAMRRSEKDGLTFIHPFDDPEVIAGQGTIALEILRQIQDPPDAIYVAVGGGGLIGGIATYVKSLWPQVEIIGVEPYDAAAMKLSLEAGERIQLPNVGLFADGVAVRQVGKLTFSLAQMHVDAMVTVSTDEICAAIKDVFEDTRSILEPAGALAIAGMKADIAKRDLQDRTLVAVACGANMNFERLRFVAERAELGEEREAILAVEIPEQAGSLRKLCNVLAGKNLTEFSYRMAEGDRAQIFIGVQVLDLDDRTKLLTRLQSSGFACLDLSNDELTKGHLRHMVGGRLPASAKTLCRDGCRELLYRFEFPERPGALMTFVSALHPEWSISIFHYRNHGADVGRIVVGVLVQDNEMDDWQRFLEDLGYPNWEETNNPAYCLFLGAQTV

SEQ ID NO: 31443 - DNA, 1530 bp, Synechococcus sp. WH 8102
  CDS (1)..(1530): transl_table=11
atgaccgactatctccagcggatcctgcgggctcgcgtctacgacgtcgcgcgggagacgccgcttgaccctgccccaaacctcagtcgccgacttggcaatgaggtgctgctgaagcgcgaagacctgcaaccggtgttctcgttcaagcttcgcggtgcttacaaccgcatggcccagctcacgccggaggaactcagtcgtggcgtgatcgcctccagcgcaggaaaccatgcccagggcgtggccctaagtgccaaaaaactcggctgccgcgccgtcatcgtgatgcccgccaccacacccgaggtgaaggtgcgggccgtgcgcaccattggcggggaagtcgtgctccatggggagacctacgacgaatgttcagcagaagcgagacaacgctgcgctgatgagggactcacctacatccatccctttgacgacccggaagtgatcgccggccagggaaccatcggtctggaaatcatgcggcagagccctgaaccgccggatgccatttatgtagcggtcggcggcggcggactaattgccggaatcgcggcttacgtcaaacagctgtggcccagcaccgagatcgtcggcgttgaaccggttgatgcggacgccatgacccagtcgttagagaagggagtacgggttgagctggcccaggtgggcctgttcgccgacggcgttgcggtccgcagggtgggggagcacacctttgccctggcccaacaatttgttgaccgcatggtgcgggtcgacaccgatgcgatctgtgccgccatcaaggacgtttttgaagacacgcgctccatcctcgaaccggctggagcacttgccgtggctgggctgaagcaggacgtggccgattgccaaatgacggaccgccgactggtggcggtggcctgcggcgccaacatgaacttcgatcgcctgaggttcatcgccgaacgctccgaactgggagaggaacgcgaggcgatgctggcggtggagatccctgagcaaccgggaagcctcagaaccctgtgtgatcacctacgcagccgcagcctcaccgaattcagttaccgaatgagtgagggcgcatcagcccacatcttcatcggcgtgcaggtgaacggcgcacaggatcgttaccagctcgtggatggactccagcagcagggcttctcctgtcttgacctcagcgacaacgaattgtccaaggttcacctccgccacatggttggcggtcgtcttccatccacttcgcaggacagttgcgctgggggctgcctcgaactgctgtaccgctttgaatttccagagaggccgggggcactgatgcgcttcgtcagcgctctcaatcccggttggagcatcagcatcttccactaccggaaccatggagctgacgtgggtcggatcgtggtgggtgtgctgataccggtggaagaacagccgcagtggacggccttcctcaatgagcttgggtatccctattggaatgaaaccgacaatccggcttacaccctgttcctctga

SEQ ID NO: 31444 - protein, 509 aa, Synechococcus sp. WH 8102
MTDYLQRILRARVYDVARETPLDPAPNLSRRLGNEVLLKREDLQPVFSFKLRGAYNRMAQLTPEELSRGVIASSAGNHAQGVALSAKKLGCRAVIVMPATTPEVKVRAVRTIGGEVVLHGETYDECSAEARQRCADEGLTYIHPFDDPEVIAGQGTIGLEIMRQSPEPPDAIYVAVGGGGLIAGIAAYVKQLWPSTEIVGVEPVDADAMTQSLEKGVRVELAQVGLFADGVAVRRVGEHTFALAQQFVDRMVRVDTDAICAAIKDVFEDTRSILEPAGALAVAGLKQDVADCQMTDRRLVAVACGANMNFDRLRFIAERSELGEEREAMLAVEIPEQPGSLRTLCDHLRSRSLTEFSYRMSEGASAHIFIGVQVNGAQDRYQLVDGLQQQGFSCLDLSDNELSKVHLRHMVGGRLPSTSQDSCAGGCLELLYRFEFPERPGALMRFVSALNPGWSISIFHYRNHGADVGRIVVGVLIPVEEQPQWTAFLNELGYPYWNETDNPAYTLFL

SEQ ID NO: 31445 - DNA, 1530 bp, Chromobacterium violaceum ATCC 12472
  CDS (1)..(1530): transl_table=11
atgagcaacaagcaagactatctggaacgcatcctcacctcgcgggtgtacgacgtggcggtggaaacgccgctggagctggcgcccaatctgtcgcgccgttaccgcaaccacatcctgctcaagcgcgaggatctgcagccagtgttctcgttcaagctgcgcggcgcttacaacaagatggccaagctgacgccggagcagcgcgcgcgcggcgtgatcaccgccagcgccggcaaccacgcccagggcgtggcgctgtcggccagcaagctcggctgcgaggcggtgatcgtgatgccggtcaccacgccgcagatcaagatagacgcggtgaagcagcgcggcggccaggtggtgctgtcgggagactccttcaacgaagcctacctgcatgcggtgaagctggccgaggagagcggccgcacctacatcccgcctttcgacgacccggacgtgatcgccggccaggggacggtgggcatggaaatcctgcgccagcatccggatgatctggatgccgtattcgtcgccatcggcggcggcggcctggcggccggcgtggccagcttcatcaaacggctgaagcccgagatcaagatcatcggcgtgcagcctgtcgactcggacgcgatgcgccagtccatagagaagggcgagcgggtcgagctgaaggatgtgggtttgttcgccgacggcgtggcggtgaagctggtgggcgaagagaccttccgcatctgccgcgagctgctggacgagatcatcctggtggattccgacgccatctgcgcggcgatcaaggatatttttgaagatacccgctccatcgtcgagccggccggcgcgctggcggtggcgggcgccaaggcctacatcgagcgcgagggctgcgagggccagtcgctggtggcgatctcctgcggcgccaacatgaatttcgaccgcctgcgccatgtctcggagcgatccgagctcggcgagcggcgcgaggccatcattgccgtcaccattccggagaagccgggcagctttaagcgcttctgttcggtgataggcggccgcaacatcaccgagttcaactaccgtttcgccgaccccagcgtcgcccatgtgttcgtcggcgtgcagatcgccggcaaggaggatgtggaaaagctgttgcgcgacttgcgcgcggcggagctggatggcatcgacctgaccgacaacgagctggccaagctgcacatccgccacttggtcggcggccacgcgccgcaactgaaggacgaacgcgtgctgcgcttcgagtttcccgaccgtcccggcgcgctgatgcgctttttggaggcgatgcgcaccgactggaacatcagcctgttccactaccgcaaccatggcgcggactatggccgggtgctggtcggcatccaggtgccgtccggcgacgcccaggcctttcagcaattcctcgacacgctcggatatccttatatagaggaaaccgaaaatccggcctatcgattgttccttggcaagaccatccgttga

SEQ ID NO: 31446 - protein, 509 aa, Chromobacterium violaceum ATCC 12472
MSNKQDYLERILTSRVYDVAVETPLELAPNLSRRYRNHILLKREDLQPVFSFKLRGAYNKMAKLTPEQRARGVITASAGNHAQGVALSASKLGCEAVIVMPVTTPQIKIDAVKQRGGQVVLSGDSFNEAYLHAVKLAEESGRTYIPPFDDPDVIAGQGTVGMEILRQHPDDLDAVFVAIGGGGLAAGVASFIKRLKPEIKIIGVQPVDSDAMRQSIEKGERVELKDVGLFADGVAVKLVGEETFRICRELLDEIILVDSDAICAAIKDIFEDTRSIVEPAGALAVAGAKAYIEREGCEGQSLVAISCGANMNFDRLRHVSERSELGERREAIIAVTIPEKPGSFKRFCSVIGGRNITEFNYRFADPSVAHVFVGVQIAGKEDVEKLLRDLRAAELDGIDLTDNELAKLHIRHLVGGHAPQLKDERVLRFEFPDRPGALMRFLEAMRTDWNISLFHYRNHGADYGRVLVGIQVPSGDAQAFQQFLDTLGYPYIEETENPAYRLFLGKTIR

SEQ ID NO: 31447 - DNA, 966 bp, Chromobacterium violaceum ATCC 12472
  CDS (1)..(966): transl_table=11
atgaatgacttgtaccagtacatactcgatgcccatcgggcattgcggccgcaggtcgccgtcacgcctctgagccacagcccggcattgtcggcgctgaccggctgcgaagtgtatttgaagtgcgagcacctgcagcacaccggctccttcaagttccgcggcgccagcaacaagatccggctgctggacgccgcgtcgcgccggctgggcgtggccacggtgtccagcggcaaccacggcctgggcgtggcgctggccggcaagctggccggcgtgccggtcacggtgtacgcgtcggccgcggcgtccgaggtgaagctggacgcgatccgcgcccacggcgcgaaggtggtcgtcatcgacgcgccaatgctggaagtggagctggaggccgcgcggctcgccgagcgggccgggctgcccttcgtctcgccgtacaacgacgtcgacgtcatcgccggccagggcacgatagggatggagctggccgagcagcatcccggcctggtggcggtgttcgcgtcggtgggcggcggcggcatgatttccggcatcggctccgcgctggagatgatgagcccgagtaccgagatcgtcggctgctggccgcgccattcccaggcgctgtaccagagcatgctggccggcgagatcgtcgaatacgaggagctggacaccatttccgacggcaccgccggcggcgtggagcccggcgccatcaccctgcccatcgcgcagcgggtgataggcaagaccgcgctggtggacgaggcggcgatcaaggcggcgatgcgcaagatcgccgaggccgagcgttggatcgtcgagggcgcggccggcgtcgcgatggcggggctgttccagctggccgaggcatatcgcggccggccggtggcggtggtgctgtgcggccgcaacatcaagctggagactttcctggaggcttgccatgaagctgcttga

SEQ ID NO: 31448 - protein, 321 aa, Chromobacterium violaceum ATCC 12472
MNDLYQYILDAHRALRPQVAVTPLSHSPALSALTGCEVYLKCEHLQHTGSFKFRGASNKIRLLDAASRRLGVATVSSGNHGLGVALAGKLAGVPVTVYASAAASEVKLDAIRAHGAKVVVIDAPMLEVELEAARLAERAGLPFVSPYNDVDVIAGQGTIGMELAEQHPGLVAVFASVGGGGMISGIGSALEMMSPSTEIVGCWPRHSQALYQSMLAGEIVEYEELDTISDGTAGGVEPGAITLPIAQRVIGKTALVDEAAIKAAMRKIAEAERWIVEGAAGVAMAGLFQLAEAYRGRPVAVVLCGRNIKLETFLEACHEAA

SEQ ID NO: 31449 - DNA, 1212 bp, Wolinella succinogenes DSM 1740
  CDS (1)..(1212): transl_table=11
atgattccattatctaaaatcgttgaggcgcatgagcgtgtcaaaaaagtgatccaaaaaaccaaactcgcctacgcgccaagactaagtgagttaagcggagccaatgtctatctcaaaaaagagaatctccaacacacgggcgcctacaagctaagaggcgcttataatagaatcgccaccctgagccaagaggagcgagccaagggagtgattgccgctagtgcggggaatcacgctcaaggagtggcctatagcgccaaacaatttgggattcgtgcggtgattgtgatgcctgaggcaactccattgcttaaagtcacgggtgtgaagcgcttgggggctgaggtgatcttagcgggcaacaactacgatgaggcctatgcccatgcactagagtgcgccaaggagcaggagctgtgctttatccacccttttgctgatgatgaggtgatcgcagggcaggggacggtggctttggagatgatcgaggagaagagcaacatccaaaccgtagtgcttcctatcgggggcggggggctcatctcgggcgtggcagcggcgtataagcagatgcttcccaatgtgagaatcattggtgtgacggccaagggagcgccagccatgcacgattctttccatgccaagaaaatcgtttctgtcaaaggcgtgaagacaatcgccgatggaatcgccgtcagagatgtcactcctagaaattttgagtacatcttagagggcgtggatgatgtggtgcaagtggatgatgaggagatcgctaacgcggtcttgtatctattagagaatcaaaagcttgttgttgaaggcgcaggagcggttggtgtggcggctttgttgcacgagaagttgcccgtgagcaagggtgagaatgtcgctatcgtgctaagcggcgggaatatcgatgtgacgatgctcagtgtcatcatcgagaagggtctcatcaaatcccagcgcaagatgaagtttagcgtcatcttggtggacaagcctggaagcctcaaagggctcacggatattctctcgcaagtgggggctaatattgtgcgaatcgactatgatcgcacctctacctctttggcttacggggatgccaatgtcactatcgcgctagagaccaaggggggagagcaccaggaggagattcgccaagagctctggaaatatcactatcgattcgtcgaaatcgattag

SEQ ID NO: 31450 - protein, 403 aa, Wolinella succinogenes DSM 1740
MIPLSKIVEAHERVKKVIQKTKLAYAPRLSELSGANVYLKKENLQHTGAYKLRGAYNRIATLSQEERAKGVIAASAGNHAQGVAYSAKQFGIRAVIVMPEATPLLKVTGVKRLGAEVILAGNNYDEAYAHALECAKEQELCFIHPFADDEVIAGQGTVALEMIEEKSNIQTVVLPIGGGGLISGVAAAYKQMLPNVRIIGVTAKGAPAMHDSFHAKKIVSVKGVKTIADGIAVRDVTPRNFEYILEGVDDVVQVDDEEIANAVLYLLENQKLVVEGAGAVGVAALLHEKLPVSKGENVAIVLSGGNIDVTMLSVIIEKGLIKSQRKMKFSVILVDKPGSLKGLTDILSQVGANIVRIDYDRTSTSLAYGDANVTIALETKGGEHQEEIRQELWKYHYRFVEID

SEQ ID NO: 31451 - DNA, 1188 bp, Gloeobacter violaceus PCC 7421
  CDS (1)..(1188): transl_table=11
atgtttgcttttatcagccatttgatttgcccgcgctgcgacagccgctttgatccgcgcaaagtccacaacctttgcactgcctgcgcttcgcctttgttggtcgagtacgacctcgaacaggtccgtgcctcggtggataaagagacgctcgcccgccgcggcgagtcgatgtggcgctaccgggaactgctgcccgtgatggacccggcccatatcgtgagcttcggcgaagggttcacaccactgctacccatcgacgcgctcacccgaacctggggattggagacagtctggatcaaagacgacgggctcaatcctaccggctccttcaaggcgcggggtgcctcctgcggcatctcgaaggctaaagaactcggtatccgggaggtggccctgcccacggcgggcaacgcgggcggtgcctgggcctgctacggggccgccgccggtttgcgcgtgcacgtggcgatgcccagggacgccccggccgtcaaccagctcgaatgccgtctgtacggcgcggatctgacattagtggacgggttgatttcggacgcgggaaaattgattgcccagggggtgcgcgagcatggctggttcgacgtctcgacgctcaaggagccttaccgcatcgagggcaagaagaccctgggtcttgaacttgccgagcagatgaactggcagttgcccgatgccatcctctacccggccgggggcggcgtcggaatcatcggcatctggcggggcttgcagcaattgaaagcgatgggctgggtgacgggaagtctgccccggctcattgtcgtgcaggcagaaggctgcgctccgctggtcaaggcgttcgaggagggccgcaccgagtccgaattctggccggatgcccggacttttgcctccggactgcgcgtacctaaggccctgggcgattttctggtgctgcaggcggtgcgcgagaccggcggcaccgccatcgccgtcagcgacgagcagtgcggcgagatgatgaaacttttggccggtcgcaccgggatatttgcagcaccggaaggagccgccaccctggctgccgccaaaatcctgcgcgagcgcggcgatctggcttcccgcgatcgggtggtgctcatcaacaccggctccgctctcaagtacccggaggcaatgagcgaggcactggcgatgcggtag

SEQ ID NO: 31452 - protein, 395 aa, Gloeobacter violaceus PCC 7421
MFAFISHLICPRCDSRFDPRKVHNLCTACASPLLVEYDLEQVRASVDKETLARRGESMWRYRELLPVMDPAHIVSFGEGFTPLLPIDALTRTWGLETVWIKDDGLNPTGSFKARGASCGISKAKELGIREVALPTAGNAGGAWACYGAAAGLRVHVAMPRDAPAVNQLECRLYGADLTLVDGLISDAGKLIAQGVREHGWFDVSTLKEPYRIEGKKTLGLELAEQMNWQLPDAILYPAGGGVGIIGIWRGLQQLKAMGWVTGSLPRLIVVQAEGCAPLVKAFEEGRTESEFWPDARTFASGLRVPKALGDFLVLQAVRETGGTAIAVSDEQCGEMMKLLAGRTGIFAAPEGAATLAAAKILRERGDLASRDRVVLINTGSALKYPEAMSEALAMR

SEQ ID NO: 31453 - DNA, 996 bp, Gloeobacter violaceus PCC 7421
  CDS (1)..(996): transl_table=11
atgtcctcatccgcccccactttgccggtgagtttcggcgatatccaggcggctgctgaccgtttgaggggagtcgctcaccgcacgccggttctgacttcgcgtacggtggacgacctgactggagcgcaggtcttcttcaagtgcgaaaatttccaacgcatgggggcgttcaagttccggggagcctacaatgccctctcgcaactggacaaagcgcaaaggcggcgcggggtgctcgcctactcctccggcaaccacgcccaggcgattgccctggcgggacaaatcctggagattccaacgacgatcgtgatgcccagcgacgctccggcggtcaagcggcgtgccaccgaaggttacggcggcgaggtgatcctttacgagcggtctgaaaccacccgcgaagccctcgccgaccaactggcgcgcgaacggggactggcggtgatcccgccctttgaccacccccaggtggtagcagggcagggaaccgccggattggaacttttcgagcaggtgggggcgctcgatgtgctcgtcgtctgctgcggcgggggcggcttgctctcaggatgcgccatcgccgcggcggccgtgagccccggttgtcaggtagtcggggtcgaacccgcgcaggcggacgatgcgatgcgctcgttttatacgggcgtcctgcacacagtccacaaccccgccacgatcgccgatggggcgcgcactccatcgctgggagccgtcacctttccactggtgcgccactacgttcatcagatggtgaccgtggaggaggaagcgatcgtgcgggcgatgctgtttttgtgggagcggctcaagatcgtcgtggagcccaccggtgcccttggggcggcagcccttttcgaaggccgggtgcaggcagcggacaggcgcgttggagtcattattagcggtggcaacgtcgatttgcagcttctccatgaattcatacgcgatatcgataaggggtacagttaa

SEQ ID NO: 31454 - protein, 331 aa, Gloeobacter violaceus PCC 7421
MSSSAPTLPVSFGDIQAAADRLRGVAHRTPVLTSRTVDDLTGAQVFFKCENFQRMGAFKFRGAYNALSQLDKAQRRRGVLAYSSGNHAQAIALAGQILEIPTTIVMPSDAPAVKRRATEGYGGEVILYERSETTREALADQLARERGLAVIPPFDHPQVVAGQGTAGLELFEQVGALDVLVVCCGGGGLLSGCAIAAAAVSPGCQVVGVEPAQADDAMRSFYTGVLHTVHNPATIADGARTPSLGAVTFPLVRHYVHQMVTVEEEAIVRAMLFLWERLKIVVEPTGALGAAALFEGRVQAADRRVGVIISGGNVDLQLLHEFIRDIDKGYS

SEQ ID NO: 31455 - DNA, 969 bp, Photorhabdus luminescens subsp. laumondii TTO1
  CDS (1)..(969): transl_table=11
atgaaaaatatttctgtttatgatgatgtcattgccgccgcccggcgaatagaagcttatgcttaccgtacgccagtcctgacttcccgcactgctaatgaaatgacaggagccaggttatttttcaaatgtgaaaattatcagcgaatgggagcctttaaatttcgtggtgcttttaatgcgttatcacaatttaatgatgaacagcgccgcaatggggttgtcacttattcatcgggtaatcatgctcaggcaatttcattggcggctcgtatactgaatatttcggcgacaatcatcatgccgttcgatgcgccagtggctaaggtcgccgcgaccgaaggttatggtggcaaaattgttttctatgatcgttatacggacgatcgtgaacaaattagccgtgaattatcagaaaagcagggattgaccttaattcctccctatgatcatccgcatattattgccggacagggaactgcggcaaaagagttgtttgaagaggtcggtgaactgaatgcgttgtttgtctgtctcggtggaggagggctgctttcaggcagtgcgcttgcagctcgccatttctctcctgaatgtaaaatttatggtgtagaaccggaaaccggtaatgacgctcagcaatcatttcgtcagggcaaaattattcacatcgatacgcctaaaactattgctgatggcgcacaaactcaacatcttgggcaatatactttcgatattattcgaaaaaatgttgatgatattttcactgtttctgatgaagaattggtggatgcaatgcgattttatgcagaaagaatgaagatgattgtcgaaccgaccggctgcttgagttttgccgctgcccgcaaaatgtgtgagtcattgcgaggccaaaaggtagggattattgtcagtggcggtaatgtggatatcgaacgttactgctcgttgctggcaaaacaaccttag

SEQ ID NO: 31456 - protein, 322 aa, Photorhabdus luminescens subsp. laumondii TTO1
MKNISVYDDVIAAARRIEAYAYRTPVLTSRTANEMTGARLFFKCENYQRMGAFKFRGAFNALSQFNDEQRRNGVVTYSSGNHAQAISLAARILNISATIIMPFDAPVAKVAATEGYGGKIVFYDRYTDDREQISRELSEKQGLTLIPPYDHPHIIAGQGTAAKELFEEVGELNALFVCLGGGGLLSGSALAARHFSPECKIYGVEPETGNDAQQSFRQGKIIHIDTPKTIADGAQTQHLGQYTFDIIRKNVDDIFTVSDEELVDAMRFYAERMKMIVEPTGCLSFAAARKMCESLRGQKVGIIVSGGNVDIERYCSLLAKQP

SEQ ID NO: 31457 - DNA, 1560 bp, Photorhabdus luminescens subsp. laumondii TTO1
  CDS (1)..(1560): transl_table=11
atggctgcatgtcttcccttaacttcctcaccaaatggtgcagagtatttgaaagcagcattaagcgcgcctgtttatgaagttgctcaggtgactcctttgcaggaaatggagaaaatttctgcccgcttgggaaatactattttggtaaagcgggaagatcggcaacctgttcacagtttcaagctccgtggtgcgtatgccatgattgcgagtttgactgaggaacaaaaaaaccgaggagtgattaccgcgtcagccggtaaccatgctcagggggttgcactttctgccaatcgtttgggaattaactctttgattgttatgccggttactactgcggatattaaagtcgatgcggtccggagtttcggtggtaaggctctgttgtatggtgctaattttgatgaggctaaagctaaagcgatagaaatggcacaacaggagggctatacctttgttcctccgtttgatcatcctgctgtaatcgcaggtcaggcaacactggcgatggaacttttgcaacaggatgtgcgtctggatcgaatctttgtacctgtcggtgggggggggttgattgctggcgttgctgtgttgattaagcaactgatgccagaaattaaaattattggggtggaagcggaagattcagcttgcctgaaagcagcaatggaggctggacatccggtagatttaccacgagttggtttgtttgctgaaggtgttgcggttaagcgtatcggtgatgaaacatttcgtttgtgtcagcaatatgtagatgatgttatcacggtagacagtgatgctatttgtgccgcggtaaaagatctgtttgaggatgtgcgtgcgattgctgagccatccggtgcattggcacttgctggattgaaaaagtatgttcagcagcatcagcttagaggtgagcgactggcacatattctttctggcgctaacgtaagcttccacgggttacgttatgtctctgagcgttgtgaattgggcgagcagcgggaagcattgctggcagtgactattcctgaacagaaagggagtttcctgagtttttgccagaaattgggcgatcgggtggtaacagagtttaattatcgttatacggatgcagatcctgatcaggcttgtcttttcgttggtgttcgcctgagtcgtggtgaggtagaacgacgggaaattatcgaggaattgcgtaccgcaggatatcaggttgccgatctctctgatgatgagatggcgaaattacatgttcgctatatgatcggcggtcgtccatctaagccattgaaagagcgcttatttagttttgaatttcctgaatcaccgggggctttgctaaagttcctccaaactttgggaactcactggaatattacgttattccattatcgcaattatggtacagattatggtcgggtgttagccgcatttgaattgtcaggagcggaagtgcgttttaagcgtcatcttgatgcattaggctatgcgtatcatgatgagacggatacccctgcgtttaaattctttttgatgtgccaaaacatttaa

SEQ ID NO: 31458 - protein, 519 aa, Photorhabdus luminescens subsp. laumondii TTO1
MAACLPLTSSPNGAEYLKAALSAPVYEVAQVTPLQEMEKISARLGNTILVKREDRQPVHSFKLRGAYAMIASLTEEQKNRGVITASAGNHAQGVALSANRLGINSLIVMPVTTADIKVDAVRSFGGKALLYGANFDEAKAKAIEMAQQEGYTFVPPFDHPAVIAGQATLAMELLQQDVRLDRIFVPVGGGGLIAGVAVLIKQLMPEIKIIGVEAEDSACLKAAMEAGHPVDLPRVGLFAEGVAVKRIGDETFRLCQQYVDDVITVDSDAICAAVKDLFEDVRAIAEPSGALALAGLKKYVQQHQLRGERLAHILSGANVSFHGLRYVSERCELGEQREALLAVTIPEQKGSFLSFCQKLGDRVVTEFNYRYTDADPDQACLFVGVRLSRGEVERREIIEELRTAGYQVADLSDDEMAKLHVRYMIGGRPSKPLKERLFSFEFPESPGALLKFLQTLGTHWNITLFHYRNYGTDYGRVLAAFELSGAEVRFKRHLDALGYAYHDETDTPAFKFFLMCQNI

SEQ ID NO: 31459 - DNA, 1530 bp, Vibrio vulnificus YJ016
  CDS (1)..(1530): transl_table=11
atgtcattaacccaacaaactggcgcagactacctgcgccagatactacgcgctccagtgtatgaagtggcaaccgtcacccctttgcaagagatgccgcgtttatcggcacgtattggtaacaatgtgcagatcaaacgtgaagaccgccagccggtgcattcgtttaagttacgtggcgcttacaatatggtggccaatctgtcgcaagcgcagaaggacgcgggggtgattgctgcctctgcgggcaaccatgcgcaaggcatggctctgtcaggaacgcgccttggcattgaaaccaccatcgtgatgcctcgcacgacgccggatatcaaagtcgacgcggtgcgcggttttggcggcaaagtcgtcttgcacggcagcaacttcgatgaagccaaagccgaagccgagcgtctttcgcaagagaaaggttacacttttgtcccacctttcgatcatcctttagtgattgctgggcaaggcaccatcggcatggaaatgctgcagcaaaacggccatctcgaccacattttcgtccctgttgggggcggtggtttagccgctggtgtggcggtgttggtgaaacagctgatgccagagatcaaagtcattgcggtggaacctgaagattctgcctgcctcaaggcggcattggatgcaggtgagcctgtggtgctggatcaagtcagtatgtttgctgatggtgtggcggtaaaacgcattggcgatgaaactttccgtctatgccagcactacattgacgatcacgtcaccgtctccagtgatgaaatctgcgcggcggtcaaagatattttcgaagacacccgtgcgattgctgagccttccggagcactggcgctggcggggctgaaaaagtatgccgagaaacacaaactcaaaggacacaacttgggtaccgtgctttcgggtgccaataccaacttccacggtttacgttatgtttccgagcgttgtgagctgggtgaaaaacgcgaaggcttgcttgcggtgaccattccagagcgcaaaggggcattttttgagttctgccatttgattggtggccgtgcggtgacggagttcaactaccgttacaacgacgactcgctggccaatatttttgtcggtgttcgtctgcaaaatggtcaagaggagttggatggtatcattcgcgacttacgcgaaggcggctacccagtggtggacctttctgaggatgaaatggccaagctgcacgtacgctacatgattggcggtaaaccctccaaaccactcaaagagcgcttatacagctttgagtttccagaatacccaggcgcactgcttaagttcctgagcacactgggcacacactggaacattagcctatttaactaccgcaaccatggggccgattatggccgcgtactgtgtggttttgagcttgatgagagtgatttatcccgcttttcggcgcatttgcgcgaacttggctaccaatgcaaagatgtcacggataacccatcctaccgtttctttctttcctaa

SEQ ID NO: 31460 - protein, 509 aa, Vibrio vulnificus YJ016
MSLTQQTGADYLRQILRAPVYEVATVTPLQEMPRLSARIGNNVQIKREDRQPVHSFKLRGAYNMVANLSQAQKDAGVIAASAGNHAQGMALSGTRLGIETTIVMPRTTPDIKVDAVRGFGGKVVLHGSNFDEAKAEAERLSQEKGYTFVPPFDHPLVIAGQGTIGMEMLQQNGHLDHIFVPVGGGGLAAGVAVLVKQLMPEIKVIAVEPEDSACLKAALDAGEPVVLDQVSMFADGVAVKRIGDETFRLCQHYIDDHVTVSSDEICAAVKDIFEDTRAIAEPSGALALAGLKKYAEKHKLKGHNLGTVLSGANTNFHGLRYVSERCELGEKREGLLAVTIPERKGAFFEFCHLIGGRAVTEFNYRYNDDSLANIFVGVRLQNGQEELDGIIRDLREGGYPVVDLSEDEMAKLHVRYMIGGKPSKPLKERLYSFEFPEYPGALLKFLSTLGTHWNISLFNYRNHGADYGRVLCGFELDESDLSRFSAHLRELGYQCKDVTDNPSYRFFLS

SEQ ID NO: 31461 - DNA, 1341 bp, Corynebacterium diphtheriae NCTC 13129
  CDS (1)..(1341): transl_table=11
gtgttaggaagcagtagtaccccgtggttaaaattgttgcccatgagtaaagaagcagaaaaccagcaggtcactttcggcgcaattcacgccgctgatattcaaatggcacagtctcgaatttctgcttctattgcaccgacgcccctgcagcattgcccacggttgtcgcaaatgacgggatgcgaagtctatctcaagcgcgaagaccttcaagacgttcggtcctataaaatccgtggtgctgtcaatgcgatctcgcaactgacagaggaacaacgagtggctgggatcgtggcggcgtcggcaggcaatcatgctcaaggtgtggctttcgcctgccgaaccatgggtatcaaaggtcgaatctacgttccggcagcaacgccaaagcaaaaacgcgaccgtatcatggtccatggtggcgacgctgtagaactcgtagtcaccggtgccaattttgatgaagcggcagctgctgcacgtgagtacgctcgcgttgaaggcgcaacgatggtggaaccattcgataaccgcgataccgttatcggccaaggaactgtagcagcagagatcttggcacaattaacaacgctgggtaaaacacttgataccgtcgtcgtgcccgttggtggtggtggattgctttccggcgttgtcagctatcttgctgatatggcgccacgcaccgcgatcgttggagtagaaccagaaggtgcggcatccatgcgcgccgctctggatgcgcacggtcctgtgaccttggataatgttgacccatttgtcgacggtgccgctgtgaaacgtatcggtgatcttaactatcacatcatcgaacacaaccaaggccgtattcaccccatcagcgttaatgaaggtgctgtatgtactgagatgcttgacttgtatcaaaacgagggcatcattacagaacctgcaggggcgctgtcagttactggattgaaagagctgtcacttggaagcagggacgtagttgtctgcatcatctctggtggtaacaacgatgtgctgcgttatggggaaatcatggagcgctccctcgttcatcgcggactcaagcactacttcctcgtcaatttcccacaggagccagggcagctacgtactttcctgaacgacatcttgggcccagatgacgacatcactttgtttgaatatctcaaacgcaacaaccgtgaaaccggaacagcgctcgtaggacttcaactcggagttgcttccgaacttgacggtttgctcgagcgaatgaatgcttcgcggattgattgccggcgactagaacctggaacgccagagtatagttacctcgttaatttgtaa

SEQ ID NO: 31462 - protein, 446 aa, Corynebacterium diphtheriae NCTC 13129
MLGSSSTPWLKLLPMSKEAENQQVTFGAIHAADIQMAQSRISASIAPTPLQHCPRLSQMTGCEVYLKREDLQDVRSYKIRGAVNAISQLTEEQRVAGIVAASAGNHAQGVAFACRTMGIKGRIYVPAATPKQKRDRIMVHGGDAVELVVTGANFDEAAAAAREYARVEGATMVEPFDNRDTVIGQGTVAAEILAQLTTLGKTLDTVVVPVGGGGLLSGVVSYLADMAPRTAIVGVEPEGAASMRAALDAHGPVTLDNVDPFVDGAAVKRIGDLNYHIIEHNQGRIHPISVNEGAVCTEMLDLYQNEGIITEPAGALSVTGLKELSLGSRDVVVCIISGGNNDVLRYGEIMERSLVHRGLKHYFLVNFPQEPGQLRTFLNDILGPDDDITLFEYLKRNNRETGTALVGLQLGVASELDGLLERMNASRIDCRRLEPGTPEYSYLVNL

SEQ ID NO: 31463 - DNA, 996 bp, Rhodopseudomonas palustris CGA009
  CDS (1)..(996): transl_table=11
atgccggccatgacccattccgctgtgctgcccgtttccgtcgccgatatcgatgcggctgccgaggtgctcgcgcccgtcgcggtgcggacgccgctgctgtcgtcgccggcgctcgatgccgccaccggcgcgcgcgttttccttaaaccggaagtcttgcagcgcaccggctcgttcaagtttcgcggcgcctacaacaaactggcgtcgctgtcgccggagctacggcgtgccggcgtggtcggattcagctccggcaatcacgcccagggcgtcgccgcggcggcgcagctgctcggcgtccacgccaccatcgtgatgccgtcggatgcgcctgcctcgaagcgcgaacgcaccgccggctttggcgccgaggtggtgctgtatgatcgcgaccgcgaggatcgcgaagcgatcgctcgcgacattgccgagcgcagcggcgcgacgttggtgcggccgttcgacgatccgatggtgatcgccgggcagggcacggtcggccgcgagatcgccgaggaccttgctgcgctggggctcgcgccggatctggtggtggcgccggcctccggcggcgggctgatcgccggcacagcgcttgccgtcaaggcgcggtttccccaggcgctggcgatgtcggctgagccggagggcttcgacgaccacgcccgctcgctggtggcgggacgccgcgagtccaatccggccggcggacgcacgatctgcgatgcgttgatgatgtcgatcccgggcgaggtcaccttcgcgatcaatcgcgtgctgctcgccggcggcgtggccgcgtccgatgccgaggtcggcactgcggtcggcttcgcattccgcgagctgaagctggtggtggagccgggcggagcggtggcgctcgcggcattgctcgccggcaagctcgacgtccgcggcaagaccgtcgcgatcgtgctgtcgggcggcaatgtcgatgctgacctgttcagccgcctgatcgcctga

SEQ ID NO: 31464 - protein, 331 aa, Rhodopseudomonas palustris CGA009
MPAMTHSAVLPVSVADIDAAAEVLAPVAVRTPLLSSPALDAATGARVFLKPEVLQRTGSFKFRGAYNKLASLSPELRRAGVVGFSSGNHAQGVAAAAQLLGVHATIVMPSDAPASKRERTAGFGAEVVLYDRDREDREAIARDIAERSGATLVRPFDDPMVIAGQGTVGREIAEDLAALGLAPDLVVAPASGGGLIAGTALAVKARFPQALAMSAEPEGFDDHARSLVAGRRESNPAGGRTICDALMMSIPGEVTFAINRVLLAGGVAASDAEVGTAVGFAFRELKLVVEPGGAVALAALLAGKLDVRGKTVAIVLSGGNVDADLFSRLIA

SEQ ID NO: 31465 - DNA, 1209 bp, Geobacter sulfurreducens PCA
  CDS (1)..(1209): transl_table=11
atgctcccctacacactgattcaggaagccgacgaccgactcaggaagcgggttcgtcgcaccgagctcatccactcccatcacttcagcgagaaactgggaatcccgatctatttcaagtgcgagaacctccagcgcaccggtgcgttcaagatccgaggcgccctgaacttcatgacgtcgcagccgcgggaggcactggcaaagggtgtcattaccgcttctgccggtaaccatgcccaaggagtcgcgttctcggccgacctgctgggagtgccgtccacggtgttcatgccggaaagcacgccgccgcagaaggtctttgccacccgtgactacggcgccgaggtggtactcaccggccgcaacttcgacgaggcatacgctgcagcggtccaggcgcaggaggaacggggcgccctcttcgtccacccctttgacgacccgctcgtgatggccgggcaaggcaccatcggcctggaagttctccaggagcttcccgatgtagccaatatcctcgtccccatcggcggcggcggtctcatcgcgggcatcgccacggccatcagagaaacccacccccacgtgcggatcatcggcgttgaaacagcggcggccccatccgcccactattcgctgcaaaaggggaagatcgtccaggtccccgtgacggtcacccttgccgacggcatcgcggtcaagaagccaggggtgaacacctttcccatcatcagggacttggtggacgaggtggtcttggtggaagaagaggagatcgcccttgccatcgtggcgctgctggagcgaaccaagctcttggtcgagggggccggggccgttccgttggccgcgcttctcaaccggcgggtgactgatctttcgggaaaaacggtctgcgtgctgtcgggcgggaatatcgacgtgaagaccatctcagtagtggtggaacggggtctggtggctgccgggcgctacctgaagctgaaggtggagctggacgatctccccggtgccctggcgcgacttgcgacggaaattgccgaggctaaagccaacatctccatcatcacccatgaccggcgctcgaaatcgctccccatcggcaagaccgaggtcctcatcgagctggagacccgggggttcgagcacattcaggaggttatctctcacctgcagggggtggggtatctggtggatgtgctgaaataa

SEQ ID NO: 31466 - protein, 402 aa, Geobacter sulfurreducens PCA
MLPYTLIQEADDRLRKRVRRTELIHSHHFSEKLGIPIYFKCENLQRTGAFKIRGALNFMTSQPREALAKGVITASAGNHAQGVAFSADLLGVPSTVFMPESTPPQKVFATRDYGAEVVLTGRNFDEAYAAAVQAQEERGALFVHPFDDPLVMAGQGTIGLEVLQELPDVANILVPIGGGGLIAGIATAIRETHPHVRIIGVETAAAPSAHYSLQKGKIVQVPVTVTLADGIAVKKPGVNTFPIIRDLVDEVVLVEEEEIALAIVALLERTKLLVEGAGAVPLAALLNRRVTDLSGKTVCVLSGGNIDVKTISVVVERGLVAAGRYLKLKVELDDLPGALARLATEIAEAKANISIITHDRRSKSLPIGKTEVLIELETRGFEHIQEVISHLQGVGYLVDVLK

SEQ ID NO: 31467 - DNA, 1212 bp, Bdellovibrio bacteriovorus HD100
  CDS (1)..(1212): transl_table=11
atgaaagtcagctttgcagacatccaaaaagcccgtgaacttctgaaagacatcatctgtccaaccgagatgagtcattccatcagcgccagcaacctgcttaaaagcgaagtgtacctgaagtttgaaaacactcagcgcacgggaagttttaaattccgcggggcctataacaaaatctccaatctgacagccgacgaaaaagcccgcggtgtggtcgccagctctgccggaaatcacgcgcaaggtgtcgccctgtcagcgaaactggccggagtcaaatccaccatcgtgatgccggagacagcctcgatcagcaaagcttccgcgacccgtgattacggcgccaacgtcgtgcttaaaggcgagatctacgacgaggctttcgaacatgcccagaaactggaaaaagaacacggctacaccttcgtgcacccttatcaggacccttatgtgatcgctggccagggaaccatcgggatcgagatcctggaaaaggttccagacctggatacggtgattgtgcccatcgggggtggcggtctgatcagtggtgtggcgttggcggtgaaggccatcaatccaaagatccgcgtgatcggtgtgcaaagcgaccgctctccgggaatggcgcatctttataacaaacagcctttgtcccagatcaaacgtgccgccacgattgctgacggcattgcgatcaaaaacccttcccaggtgatgctggacagtttcatttccaagtatgtcgatcaggtggtgacagtcagtgatgacgagatcgctgaagcgattgtgttcctgatggaaagagccaaaaccgtagctgaaggctctggcgcagcggcgatggcagctgcgatgtcccgcggactggatctgggtaaaaagacctgtgtgattatcagcggtggaaatatcgatctgaacatcgtttcaaagatcatcgaccgtggtcagattctgcgcggacgcctgtgtgagttgtccgtgattgtggatgaccttccggggaatttgagccgtttgactcaggcaattgcctctcaaaaagccaacatcctggaagtgcgtcacgaccgtgtgtcgaaggggctttcactgcgtgaaacccgcatcgacttcgttctagagactacgagcattgaacatgttgaacggattaagcgggctcttgaggaaactggagccaaggttatccaaagcacctaa

SEQ ID NO: 31468 - protein, 403 aa, Bdellovibrio bacteriovorus HD100
MKVSFADIQKARELLKDIICPTEMSHSISASNLLKSEVYLKFENTQRTGSFKFRGAYNKISNLTADEKARGVVASSAGNHAQGVALSAKLAGVKSTIVMPETASISKASATRDYGANVVLKGEIYDEAFEHAQKLEKEHGYTFVHPYQDPYVIAGQGTIGIEILEKVPDLDTVIVPIGGGGLISGVALAVKAINPKIRVIGVQSDRSPGMAHLYNKQPLSQIKRAATIADGIAIKNPSQVMLDSFISKYVDQVVTVSDDEIAEAIVFLMERAKTVAEGSGAAAMAAAMSRGLDLGKKTCVIISGGNIDLNIVSKIIDRGQILRGRLCELSVIVDDLPGNLSRLTQAIASQKANILEVRHDRVSKGLSLRETRIDFVLETTSIEHVERIKRALEETGAKVIQST

SEQ ID NO: 31469 - DNA, 1227 bp, Mycoplasma mycoides subsp. mycoides SC str. PG1
  CDS (1)..(1227): transl_table=4
atgtcgcatccattttcagtagatgaaattaaacaaattcatcaagaaatttctaaaataattcattatacacctttacattatgcagataaattatcagctttaactggtaataatatttatttaaaattagaaaatttacaaaaaacaggaagctttaaattaagaggagcaactaataaaattaataaactaactaatgaagaaaaagaacatggaattattgcagctagtgctggaaatcatgcacaaggtgtagcttatgcagctactaatttagggttaaaatcaacaattgttatgcctgaaaatgccccaatggcaaaaattcaagcaacagaaaaatatggtggaaaagttgttctaagtggaagattttttgatgatgctttagctaaagcaattgaattaaaagaaaaagaaaatctaactttaattcatgcttttgatgatattgaaattattaaaggtcaagctactattacatatgaaattgatcaacaaattaaaaacatcgattattgtttagtaccaattggtggtggtggattaatgagtggtattgctacttatttaaaacaagttaatccaaatattaaaatgattggtgttgaagctgctaatgttaattcctatcaacaagcaaaagctttgagtagaccagtgatggttgattctaaaccatcaatagcagatggaattgctgttaaaaaagttagtgatttaactttttcaatattaaatcaatatgttgatgatgtagttgttgtaagtgaagaagaaattgctgaagcaatgttatttttaatggaaaattgtaagtttgtaactgaaggttcaggagcagttactgctgctgctttaatgtttgataaattaaatattaaaaatcaaaataaaacaatagttggtttagttagtggtggaaatattgatattgcaatggttggtaatattattaataaagctttaattaaaactaatagaagattagtattatcagttaatataacatcagataataaagaaatactaaaaataattaatattattaattcttgtggagctaaaatttttaaaataaaaactaatagagatattatgtatttagaattaagtgaaattcatgcaacatttattattgatttatcaaatactgatcaacaacagcaaatcattgacaaaattattcaagctaattacaaaattacaagcattacagattaa

SEQ ID NO: 31470 - protein, 408 aa, Mycoplasma mycoides subsp. mycoides SC str. PG1
MSHPFSVDEIKQIHQEISKIIHYTPLHYADKLSALTGNNIYLKLENLQKTGSFKLRGATNKINKLTNEEKEHGIIAASAGNHAQGVAYAATNLGLKSTIVMPENAPMAKIQATEKYGGKVVLSGRFFDDALAKAIELKEKENLTLIHAFDDIEIIKGQATITYEIDQQIKNIDYCLVPIGGGGLMSGIATYLKQVNPNIKMIGVEAANVNSYQQAKALSRPVMVDSKPSIADGIAVKKVSDLTFSILNQYVDDVVVVSEEEIAEAMLFLMENCKFVTEGSGAVTAAALMFDKLNIKNQNKTIVGLVSGGNIDIAMVGNIINKALIKTNRRLVLSVNITSDNKEILKIINIINSCGAKIFKIKTNRDIMYLELSEIHATFIIDLSNTDQQQQIIDKIIQANYKITSITD

SEQ ID NO: 31471 - DNA, 1683 bp, Eremothecium gossypii
  CDS (1)..(1683)
atggttttcaatgcctgcggaagacgcagcggcaaccttgtgagttccgctttaagaacgggccggaggtactccggcacgttacataaactttacactcagttgaaaccacaagaactacttccagacaatacgccggattatgtgcggatgatactgcgctcctcagtttacgatgttatcgaggaatcgcctatgtctgaagcgaaactgctctcggccaagctggatacaaatgtgtgcctgaagcgtgaagacctgctgcctgtgttctcattcaaactacgaggcgcgtataatatgatatccaacctagacgaataccagaagagcgcaggtgtcatcgcgtgctctgcgggaaaccacgcgcagggtgttgcgttctccgcacgggaattgggtatacgagcaatgattgtgatgcccacttcgacgccgtctatcaaatacaacagtgtcgcagcgatgggggcggaggtagtattgtacgggaaagacttcgatgaggcgaaagccgagtgtgcccggcttgcgcagcttcacaagctcaccgatatacccccctttgaccacccatatgtcattgctggccagggaaccatcgcaacggaaattctccggcaagtgcacaatgccagtcagattggcgcggtgttctgcggcgtgggcggagggggtctgatagccggcattgggtcgtacctgaaacggattgcgccacatatcaaaatcataggtgtcgagacgcatgacgcccccactctgcacaccgctctgaagcagggacgccgcacaatgctgcctgcggtcggctgtttcgcagatggcacgtccgtgcgaatgatgggcgaggaaacgttccgtgtagcacgcgatgttgtcgatgaggtggtgctggtcaacacggacgagctttgcgccgcaatcaaggatatattcgaggacacaagagcgattgttgagccttccggcgcgctgggggttgcaggtctaaagaagtacatagccagccatcaagacgccgagaacagtcgccacacctatgtccccgtgctatcgggcgcgaacatgaatttcgaccgcttacgcttcgtcagcgagcgcgcggtgctaggcgaaggcaaggaggtgttcctggccgtcactatcccggacgtgcctggctcctttaagcgcatgaaccagatcatccacccccgcgccgtaacagagttctcctaccgctacaatgagcatgctcgccgcaaccaagacggcaccgcccgggcctgtatctacacctcttttagcgtggccgaccctgccgccgaggtgcccgacgttctcactcgtcttcgcgcgctcggcttcgatgcccgcgatatttccgcgaacgagctcgccaagtcccacgcgcgctacctcgtcggcggtgccgcccgtgtcccgaacgagcggctctttgccttcgagttccccgagcggcctggcgcgctgaccaacttcctcgctggtctcgactcctcctggaacatcacgctgttccattaccgcaaccacggcgcggacgtgggccgcgtacttgtaggcatcgcagtcccttctgacgaatactcggccttcgatgcgttcctgagcgggctcggctacgcctaccaagaagaaaccggtaaccctgtctatcgcgagtttctgctctgctaa

SEQ ID NO: 31472 - protein, 560 aa, Eremothecium gossypii
MVFNACGRRSGNLVSSALRTGRRYSGTLHKLYTQLKPQELLPDNTPDYVRMILRSSVYDVIEESPMSEAKLLSAKLDTNVCLKREDLLPVFSFKLRGAYNMISNLDEYQKSAGVIACSAGNHAQGVAFSARELGIRAMIVMPTSTPSIKYNSVAAMGAEVVLYGKDFDEAKAECARLAQLHKLTDIPPFDHPYVIAGQGTIATEILRQVHNASQIGAVFCGVGGGGLIAGIGSYLKRIAPHIKIIGVETHDAPTLHTALKQGRRTMLPAVGCFADGTSVRMMGEETFRVARDVVDEVVLVNTDELCAAIKDIFEDTRAIVEPSGALGVAGLKKYIASHQDAENSRHTYVPVLSGANMNFDRLRFVSERAVLGEGKEVFLAVTIPDVPGSFKRMNQIIHPRAVTEFSYRYNEHARRNQDGTARACIYTSFSVADPAAEVPDVLTRLRALGFDARDISANELAKSHARYLVGGAARVPNERLFAFEFPERPGALTNFLAGLDSSWNITLFHYRNHGADVGRVLVGIAVPSDEYSAFDAFLSGLGYAYQEETGNPVYREFLLC

SEQ ID NO: 31473 - DNA, 990 bp, Yersinia pestis biovar Medievalis str. 91001
  CDS (1)..(990): transl_table=11
ttgaaaataaaatttaaaggaatcgagatgaatacgttgtttgatgccatcagagaggcccaccagatattacgcccacaagtgagagtcacgccgttggagcatagcccactgctatctcaacacagcggttgtgagatctatcttaaatgtgagcacctgcagcacaccggttcttttaaatttcgtggggccagtaacaagttacgtttactcaatgaggcacaacgccagcaaggtgtgatcaccgcctccaccggtaaccatgggcaaggtgtggcgctggccgcaaaactggcggggattaaatccactatttacgccccagaacaggcggcagccatcaagctggatgtgatccgtgcactgggggggcaaattgaattagtctccggagatgccttaaatgctgaactggccgccggtatcgccgctgagcaacaaggtaaagtgtatatctcaccgtataacgacccgcaggtcattgccgggcaaggcacctgtggcatggagatggtcgaacagcagcccgatcttgatgcggtgtttgttgccgttggtggtggtggcctgatttcaggtattgcgaccgtattgaaaacattatcggataaaacgcaggtgattggttgctggccagccaatgccaccagcctgtatacctgtctggagaaaggacagattcaggaggtggcagagcaagaaacgctgtctgacggaaccgccggtggtatcgaaccgggagcgatcacctttgcactgtgccaacagttaatcgatcagaaggtgctggtgagtgagcaagaaatcaaagaggccatgggtttgattgcccgtactgaccgctggatgattgaaggtgccgccggtgtggcactggctgcggcactgaaattggctccgcaatggcaaggtaagaaagtggcggtggtgttgtgcggtaaaaatatcgtgctggagaaatatctgggagctgtcagcggatgctaa

SEQ ID NO: 31474 - protein, 329 aa, Yersinia pestis biovar Medievalis str. 91001
MKIKFKGIEMNTLFDAIREAHQILRPQVRVTPLEHSPLLSQHSGCEIYLKCEHLQHTGSFKFRGASNKLRLLNEAQRQQGVITASTGNHGQGVALAAKLAGIKSTIYAPEQAAAIKLDVIRALGGQIELVSGDALNAELAAGIAAEQQGKVYISPYNDPQVIAGQGTCGMEMVEQQPDLDAVFVAVGGGGLISGIATVLKTLSDKTQVIGCWPANATSLYTCLEKGQIQEVAEQETLSDGTAGGIEPGAITFALCQQLIDQKVLVSEQEIKEAMGLIARTDRWMIEGAAGVALAAALKLAPQWQGKKVAVVLCGKNIVLEKYLGAVSGC

SEQ ID NO: 31475 - DNA, 1380 bp, Anopheles gambiae str. PEST
  CDS (1)..(1380)
atggtctctgcggcggattatctacgcaaggtgctgctctcccccgtctacgaggcggcgcgggtcacccccctgcaaaccctgaagaaactctccgagcggctcggcaatcacgtcagcctgaagcgggaggacctgcaaccggtccactccttcaagctgcgcggcgcctaccacaagatcgccaccctgaccgaggagcagaaggagcgcggcgtcatcgccgcctccgccggcaaccacgcccagggggtcgccctgtcggccgccaagctcggcatcaaggcgatcatcgtgatgcccaagaccacgccggacatcaagatcgacgcagtgcgccgtcagggcggcaacgtcatgctgtttggcaacagcttcgacgaggcctacggcgagagccgccgtctcgctgaattggaaggctacaccctgatcccgccgtttgacgacgtcgaggtgatcgccggccagggcaccatcggcaaggagctgctggagcaggatacccacctcacccacgtcttcgtgccggtggggggcggcgggttggccgccggggtggcggtctatatcaagcagctgctgccggatgtgaaggtgatcggggtggaggcggagggttctgcctgcctcaaggccgcgctggcggccggcgagccggtcaatctggagcgggtctcgctgtttgcggacggggtggcggtcaagcgcatcggcgaggagaccttccgcctgtgcaaccagtatctggacgaggtggtgaccgtctccaacgaccagatctgcgccgcactgaaagacatcttcgacgactgccgcgccattgccgagccgtcgggcgccctgtccctggcgggtctcaaggcctacagcgagcgggagcaggccaaggggggccggatggcggccattttgtccggcgccaatgtcaacttccacagcctgcgctatgtgtcggagcgctgcgagatcggcgagaagcgcgagggcatgctggcggtgaccatccccgagcgcaagggggccttcctcgacttctgccgtcagctcgggccgcgcatggtgaccgagttcaactaccgttatgcagatgccgagcaggcgtcgctgttcgtctcggtgcgcctcaccggcggtgacgaggagctgggccagatcatcgatcagctcggtggcaacggctatccggtggtcaacatgaccgagagcgagctggccaagaaccacaccctgggctgtcgctggaacatcagcctgttccactaccgcaaccacggtgccgactatggccgggtgctctgtgccttcgagctgccggacgaggacgtggcggcttttcacgactacctgcgcgagattggctacggctggaaagagtag

SEQ ID NO: 31476 - protein, 459 aa, Anopheles gambiae str. PEST
MVSAADYLRKVLLSPVYEAARVTPLQTLKKLSERLGNHVSLKREDLQPVHSFKLRGAYHKIATLTEEQKERGVIAASAGNHAQGVALSAAKLGIKAIIVMPKTTPDIKIDAVRRQGGNVMLFGNSFDEAYGESRRLAELEGYTLIPPFDDVEVIAGQGTIGKELLEQDTHLTHVFVPVGGGGLAAGVAVYIKQLLPDVKVIGVEAEGSACLKAALAAGEPVNLERVSLFADGVAVKRIGEETFRLCNQYLDEVVTVSNDQICAALKDIFDDCRAIAEPSGALSLAGLKAYSEREQAKGGRMAAILSGANVNFHSLRYVSERCEIGEKREGMLAVTIPERKGAFLDFCRQLGPRMVTEFNYRYADAEQASLFVSVRLTGGDEELGQIIDQLGGNGYPVVNMTESELAKNHTLGCRWNISLFHYRNHGADYGRVLCAFELPDEDVAAFHDYLREIGYGWKE

SEQ ID NO: 31477 - DNA, 1431 bp, Anopheles gambiae str. PEST
  CDS (1)..(1431)
atgtctcccacgatgcaagtgtcatccgtaacgacgcaaatggcttccgcgaagctgacagctcgcccgtcggcggcagagcggccgacagcagcaggccaaaatgggcacgaggccggagtgaatggtgcacccgccggcgccccaacagccgcaacgaccgagccggaaatcgtcgatccgttttgcaatgcggacaatccgcagataatcaccttccaggacgtaacgtccgcggcgttcaaaatcagaaaaggtgtcgagctgacgccgtgcgtgaaatcacacttctccgacctgatcgacatggacatctacctgaagaaggaatttctgcagtttactggcagcttcaaggagcggggagcgcgctacgcgttgctaatgctgtcggacgagcagaaaaaaacgggcgtcatctcggcctccctcgggaatcatgcgcagggtctgtcctatcacggctggaagctgggcatcccggtgacggtcgtgatgccgctgaaggcttcgctgatgaaaatccagaaatgccgtaactatcacgctaatgtcgtcgtacagggagcggacatgggcgaggctaaaaggattgcactgaaaatggcacacgaccggggactcacgtacattaacgggtacgaccatccgcacatcatgtccggtcagggcacgatcgggctggagatcgtggagcaggtcagcgacatcgacgccgtcgtggtgccggtcggtggcggcggactgattgccggtgttgcaactgccatcaaaaatctcagcccaaataccaaaatcatcggtgtcgagtcggagaagtgtcccagcttcacgcgagcgctcgagaacaagagcccagtgtttgtcgcgaaccaggaaacgctggcggacgggttggcagtgccgcaggtagggtacaacgcgtacgccacgaccgtgccgctgctggacaaaatgatcgtcgtgaaggaggagtggattgcgctggcgattctgcgactggtcgagctggaaaagtgcgtggtggagggagcgggtgccgccggcctggcagccattttggccggccatctggatgaattcattggaaaacgagtggtgctgctaatttgcggaggcaatatcgatacgaccatgttcggcaaatgtctcgagcgtggcatggctgccgagggccgtttgcagagattcaccgtcaccgtcagcgatggaccgggcggtgtagctaagctgtgcaatctgctcgccagcctgggcgtttccatcaaggacataatgcacgaacgtgccttcattcgtgatattcaccatgtagaggtgaaagtgatttgtgaaacacgtgactgggaacattcaaaggaaatgcgcagggtgctacaggaaacgtatagcaaagttcacttctatgacatgccaatggcgatcacctag

SEQ ID NO: 31478 - protein, 476 aa, Anopheles gambiae str. PEST
MSPTMQVSSVTTQMASAKLTARPSAAERPTAAGQNGHEAGVNGAPAGAPTAATTEPEIVDPFCNADNPQIITFQDVTSAAFKIRKGVELTPCVKSHFSDLIDMDIYLKKEFLQFTGSFKERGARYALLMLSDEQKKTGVISASLGNHAQGLSYHGWKLGIPVTVVMPLKASLMKIQKCRNYHANVVVQGADMGEAKRIALKMAHDRGLTYINGYDHPHIMSGQGTIGLEIVEQVSDIDAVVVPVGGGGLIAGVATAIKNLSPNTKIIGVESEKCPSFTRALENKSPVFVANQETLADGLAVPQVGYNAYATTVPLLDKMIVVKEEWIALAILRLVELEKCVVEGAGAAGLAAILAGHLDEFIGKRVVLLICGGNIDTTMFGKCLERGMAAEGRLQRFTVTVSDGPGGVAKLCNLLASLGVSIKDIMHERAFIRDIHHVEVKVICETRDWEHSKEMRRVLQETYSKVHFYDMPMAIT

SEQ ID NO: 31479 - DNA, 1167 bp, Neurospora crassa
  CDS (1)..(1167)
atggccgaccccagcaccacccctccccttacccgtgcctccgtcctcgccgctcactccctcataaagccctacattcacgagacgcccgtgcttacgaataccactttcgaccaactcgcttccacccctcgtactcccgaagagctgcaaggaacggaatgggaggctaccgaaagaccggcgaacccaaagattcggttctggttcaagtgcgagaatttccagcggattggcgcgttcaaggctagaggagcgtttcatgctgtggagaggttgaagcaaactgaggggttagaggggttgaagaagggcggagtagtgacgcatagttctggtaaccacgcccaagccctttccctcgctgcccgcgagaacggcatcccggcgcacatcgttatgcctaccatctcgcctccgcccaagatcgctgccaccaagggttacggcgccaacataacctttagcggaagcacgagtaccgagcgtgaagcagttacaagggaggtgattgagaagacgggtgcgaggctggtgccgccttatgatcacccagacatcatcctcggccaaggcaccgccgccctagagctccaacgccaagtcgccgcctctctctccacctccggcaccaccaccaccaccaaccgtcgtcgtcttaacgcgataataaccccctgcggcggcggtggtctcctctccggcaccgctctcgcctgttccgacctctccccttccgatccctccacacccggtccaatcctggtcttcggcgccgaaccctccttctcgggcgcggacgacggtcgtcggggttactactcgggcactcgcatcgagagcgtcaaatccttgacgattgccgatgggctgcggactcctctgggggcgtatccgtggagtatcatctatgagcggaagctggtggcgggcatgtacagtgtgggcgaggaagagatcaagaaggcgctgaggctggtttatgagaggatgaaggttgttgttgagccgagcgcggtagtggggttggcggtagcgttatttaatgaggagtttaggagtatggtggagagggaagggggggaggaagggtgggatttgggggtggtgtttagcggagggaatgttgagctggcggcgttggggaggttgtttggtgaggaatag

SEQ ID NO: 31480 - protein, 388 aa, Neurospora crassa
MADPSTTPPLTRASVLAAHSLIKPYIHETPVLTNTTFDQLASTPRTPEELQGTEWEATERPANPKIRFWFKCENFQRIGAFKARGAFHAVERLKQTEGLEGLKKGGVVTHSSGNHAQALSLAARENGIPAHIVMPTISPPPKIAATKGYGANITFSGSTSTEREAVTREVIEKTGARLVPPYDHPDIILGQGTAALELQRQVAASLSTSGTTTTTNRRRLNAIITPCGGGGLLSGTALACSDLSPSDPSTPGPILVFGAEPSFSGADDGRRGYYSGTRIESVKSLTIADGLRTPLGAYPWSIIYERKLVAGMYSVGEEEIKKALRLVYERMKVVVEPSAVVGLAVALFNEEFRSMVEREGGEEGWDLGVVFSGGNVELAALGRLFGEE

SEQ ID NO: 31481 - DNA, 1773 bp, Neurospora crassa
  CDS (1)..(1773)
atggcttcgacacttagtgcacagccgttgctcgtcaacggtgcttccctgcaggtagtcaacggtctcaacagcgagaggccagcgagcccgtcttcggttggcaacctcgcactgaccgagtacagcgcgatgccatcgccgccatcggaggatgccacggccaacaagatgaagcgcattgttcctgatgagttcctgcttcctaacggtcatccagattacttgcgcctcatcattacctcttacccacgtgtccgcgaagtttgcagtgaggtgcccctaacccgggctgtcaacctgagcaaccgcctcgagtgcaatgtcctactcaagcgtgaagatgaacagcccgtcttcagctttaaacttcgtggcgcctacaacaagatggcccatctcgaccccaaggagtcctggaagggggtagtctgctgcagtgccggcaaccacgcccaaggagttgcatactctgcccgtaagctgaagatccccgccactgtcatcatgcccaagggcactcccagcatcaagcacctcaacgtttcccgtatgggtagccacgtcgttctccatggtgccgacttcgacgaagcaaaggaggagtgtgctcgaagggccaagctggacggcctcatcaacatcccgcctttcgatgatccgtacgtaattgccggccaaggaaccatcggcatggaaattttgtcacagaccaatctgcagaagctacaggccatcttctgtgctgtcggcggtggtggcttgattgctggtgttggggtctacgtgaagcgtattgcccctcatgttaagatcatcggcgtcgagacgtacgatgcagacgccatgacccagtcgctcgctaagggcgaacgtgtccttcttcaagatgtgggtttgtttgccgatggtgccgccgtcaagacagttggtgaggagaccttccgtatctgtcaagaagtcgtcgacgagatggtccaagtcaccacggacgaggcttgtgccgccatcagagacatgttcgaggacacgcgctctatcatcgagcctgctggcgcgctggccgttgccggactcaagaagtgggttgctgccaacccatccgctgaccccacccggtccgtcgtcgccatcacctcaggcgcaaatatggactttgatcgcctgggctttgtctcagcgcgtgccaaatatggcgaaggcaaagaggccctcctctctgttaccatccccgagcgccccggcgcttttgccgaattagtcaacgccatcatgccacatgccatcaccgagttcagctaccgatacgctaccgaatccaaggcaaacgtcatggttggcatttctctggccgattccggcagccgccgggcagagcaactgcagaccatcatcggccgtatcaaacaatcaggtgacatggacgtaacagatctgtccgccgacgagcttgccaagagccatcttcgatacatggttggcggccgctcaaatgtccccaaggaaaggctttacacattccgctttcccgagcggccaggcgccctcgagcgttttttgcgactactgagaccaaagtacaacattagcctcttccaatatcgaaactacgggggagatattggccaggtattgacgggtattcagtgccctgacgaggaagttggcgaactacaaagcttttttaaggagatcggatacccatgggaagactcggacccgcactacaaatatgtgggtctcccctcctcgaacttttgtgagaggagatag

SEQ ID NO: 31482 - protein, 590 aa, Neurospora crassa
MASTLSAQPLLVNGASLQVVNGLNSERPASPSSVGNLALTEYSAMPSPPSEDATANKMKRIVPDEFLLPNGHPDYLRLIITSYPRVREVCSEVPLTRAVNLSNRLECNVLLKREDEQPVFSFKLRGAYNKMAHLDPKESWKGVVCCSAGNHAQGVAYSARKLKIPATVIMPKGTPSIKHLNVSRMGSHVVLHGADFDEAKEECARRAKLDGLINIPPFDDPYVIAGQGTIGMEILSQTNLQKLQAIFCAVGGGGLIAGVGVYVKRIAPHVKIIGVETYDADAMTQSLAKGERVLLQDVGLFADGAAVKTVGEETFRICQEVVDEMVQVTTDEACAAIRDMFEDTRSIIEPAGALAVAGLKKWVAANPSADPTRSVVAITSGANMDFDRLGFVSARAKYGEGKEALLSVTIPERPGAFAELVNAIMPHAITEFSYRYATESKANVMVGISLADSGSRRAEQLQTIIGRIKQSGDMDVTDLSADELAKSHLRYMVGGRSNVPKERLYTFRFPERPGALERFLRLLRPKYNISLFQYRNYGGDIGQVLTGIQCPDEEVGELQSFFKEIGYPWEDSDPHYKYVGLPSSNFCERR

SEQ ID NO: 31483 - DNA, 1467 bp, Rattus norvegicus
  CDS (1)..(1467)
atgccctcaggtaggattctccggtctccagtggtcgaacttcttggtcagagatggggagtctttgaacttggccaaggagccacgctgcgttgtgtgtcggaagaactggatccccaacagcttaacctgccccgtccttgttcccacctggtggctcagaagtcattcaaggaagagcccctcctctccctcatcacggccagcaactgtgtgactttagcaatggacttggtttctccgaacacgttccggatcattggaatgtttttgttcaggaccccagaatcaagagctgtccctttaacaaggaggaggggccagggcctgatagcggaagctgatctggtagcctgtcgtcagcgttctgttggaatggagggagcctcggcagagtgtgtcagggcagagcctttccacagggtcacacccctgctggagagctgggcgctgtctcaggtggcaggcatgcctgtcttcctcaaatatgagaacgtgcagatagctggctcctttaagatccggggcatcggacatttctgtcagcaggtgaaggaggatggccaagaggggatgcagacatctggtgtgctcctcaggccccacagtagcctgggtgacatacttatgtctgaagcagtcacgggccaggaggttgtgttctccgattggcttgacataaatcagcaagggggcaacgcaggcattgcggccgcatactccgctcagaagctgggcatccccgtcaccatcgtgctcccagagagcacctccaagcaggtggtgaggcggctggagggagagggggccgaggtccagctgactgggaaggtctgggatgaagccaatgtaagggcacaagaactggccaccagggacggctgggtgaacgtctccccgtttgaccatcccctgatatgggaaggcaatgccagcctagtgcgggagctcaaggagtccctgaggacgcctccaggtgccgtggtgctggccgtggggggtggagggctcctggccggtgtggttgctggcttactggaggtaggctggcagcatgtgcccatcgttgccatggagacccggggggcacacagtttcaacgcggctttgctggcgggcaggctggtcactctgccagacatcaccagcgtagccaggagcctgggagccaagactgtggctgcacggaccttggagtgtgcaaaggagtgtgaagtcctctctgaggtggtagaagaccgggaggctgtcagagctgtgcagaggttcctggacgatgagcgcatgctggtggagcctgcctgcggtgctgccctggctgctgtctactcaggcatcctggggaggctccagactgagggccgcctgagccctgccctggattccgtcgtggtcatcgtgtgtggtggcaacaacatcagtagccaacagcttcaggagctgaaaacacagctgaactgcagctga

SEQ ID NO: 31484 - protein, 488 aa, Rattus norvegicus
MPSGRILRSPVVELLGQRWGVFELGQGATLRCVSEELDPQQLNLPRPCSHLVAQKSFKEEPLLSLITASNCVTLAMDLVSPNTFRIIGMFLFRTPESRAVPLTRRRGQGLIAEADLVACRQRSVGMEGASAECVRAEPFHRVTPLLESWALSQVAGMPVFLKYENVQIAGSFKIRGIGHFCQQVKEDGQEGMQTSGVLLRPHSSLGDILMSEAVTGQEVVFSDWLDINQQGGNAGIAAAYSAQKLGIPVTIVLPESTSKQVVRRLEGEGAEVQLTGKVWDEANVRAQELATRDGWVNVSPFDHPLIWEGNASLVRELKESLRTPPGAVVLAVGGGGLLAGVVAGLLEVGWQHVPIVAMETRGAHSFNAALLAGRLVTLPDITSVARSLGAKTVAARTLECAKECEVLSEVVEDREAVRAVQRFLDDERMLVEPACGAALAAVYSGILGRLQTEGRLSPALDSVVVIVCGGNNISSQQLQELKTQLNCS

SEQ ID NO: 31485 - DNA, 1212 bp, Magnaporthe grisea 70-15
  CDS (1)..(1212)
atggcagacccggtaacttcgcctcccctcgagagagcctcgatattcgccgcgcacgagctcataaaaccctacgtgcaccggacccccgtgctcaccaatgcgaccctcacggcactggcctcgaccccgcggaccgccgaggacctgcgcggcaccaggtgggccgaccgggccgaccgccccgctcggccggtgctgcggctgtggttcaagtgcgagaactttcagcgcatcggcgccttcaagccgaggggggcgttccacgccgtcgagcgcctcaagcttatccccgggtggctcgagggtcaggggaggactaacggcgtcgtgactgctagctctggcaaccatgctcaggcactagcccttgcggcgcgcacagctggaataccagcacacatcgtgatcccaagcatcgcgccggcaccaaagctggcggcgacgaaggcgctaggggcaaccatctaccgcagcggaagcactggtgctgagcgcgaagcggtggcggccaaggttgttgcagacactggaggccgctatattcctccttatgatcacccggacatcattctgggccagggaacgctgggacttgagatgcaggagcaggttgaggcgctcatggccggcggggatgcagctgcgacaggcggtgatttcactcggcgaggtcaaacctcaggaacgcagggccaagctggaggtcagaagaagggcctcaatgccataatcgcgccatgcggcggcggtggtatgctctcgggtgtagcattatcctgcgagggaaccggcatccgcgtctttggcgccgagcccgagttccagggggcggacgagtgcaagcggtcctttgaggcgggcaagcgcatcgacacggtcaagtcgctaacgatcgccgacggactacggactgcggttggtaaatacccgtggtccatcatctacgagcgccgcctagtgtcgcaaatgttcaacgtgaccgaggacgagatcaaggacgccctgcggctgatcttggagcgcttcaagctagtcgtcgagcctagtgctgctgtgccggtggctgtcgcactattcaacgaggatttcagggccatggtcgagaccgaggccggcgagaacgggtgggatctgggcatcgttctcagtggtggcaacgttagtttggagatgcttgggaagctgttccccgagggcttgcctgcctag

SEQ ID NO: 31486 - protein, 403 aa, Magnaporthe grisea 70-15
MADPVTSPPLERASIFAAHELIKPYVHRTPVLTNATLTALASTPRTAEDLRGTRWADRADRPARPVLRLWFKCENFQRIGAFKPRGAFHAVERLKLIPGWLEGQGRTNGVVTASSGNHAQALALAARTAGIPAHIVIPSIAPAPKLAATKALGATIYRSGSTGAEREAVAAKVVADTGGRYIPPYDHPDIILGQGTLGLEMQEQVEALMAGGDAAATGGDFTRRGQTSGTQGQAGGQKKGLNAIIAPCGGGGMLSGVALSCEGTGIRVFGAEPEFQGADECKRSFEAGKRIDTVKSLTIADGLRTAVGKYPWSIIYERRLVSQMFNVTEDEIKDALRLILERFKLVVEPSAAVPVAVALFNEDFRAMVETEAGENGWDLGIVLSGGNVSLEMLGKLFPEGLPA

SEQ ID NO: 31487 - DNA, 1857 bp, Magnaporthe grisea 70-15
  CDS (1)..(1857)
atggcggcgccctcagatctagaggtcacggcgacaaaaatcaacggttcttcctgccaggagaccgtcaccaatggtgacggtatcaacggccccaatggctgcagcgtggcgcccgcaacgcctgcgacgcccaccactccagttatgactgtaacgcgcccctcgcggacgcccagcttgaccggtctttcactcacagagtacagcgccaacccatcaccaccggcggagagcaaacgtcgaaaggcaaagaaggtgatacctgacgactacatactgccaagtggacaccctgactatctccgcctgatcttgacttccaaggtctacgaggtatgcaaggagacgtcactcacccatgccgtcaacctcagcaacaggctcgagtgcaaagtccttctgaagagggaggatgagcagcccgtcttcagcttcaagctgcgcggtgcatacaacaagatggctcacctcgaccgcgctcaatcatggcggggtgtcgtctgctgctcagctggcaaccacgctcagggggtagccttttctgcccgcaagctcaagatccccgccaccatcgtcatgcccgagggcacgccaagcatcaagcaccttgccgtggctcgtatgggtggccatgtcgtgctgcacgggcccgatttcgacgcggccaaggaggagtgcgcccggcgcgagaagcacgacgggcttatcaacatcccgccctttgacgatccctatgtcatcgccggccagggcaccattggcatggagctgctccgccagaccaacctgcagaagctagaggccatcttctgctgtgtgggcggaggcggtctcatcgccggcataggtgtctacgtaaaacggattgcaccgcacatcaagatcatcggcgtcgagacccatgacgccaacgctatgactcagtcgttggccaagggtgagcgtgtactcctcaaggacgtcggcctctttgcagatggtgccgccgtcaggacagtaggcgaagagaatttccgcatctgccaggaggtcatcgatgagatggtccaggtgactacggacgaggcgtgcgctgccatcaaggacatattcgaggataccaggtccgtcgtcgaacccgccggggctctggctctggccggactcaagaagtgggtcgcggccaacccgtccaccgactcgagccgttcccttgtcgccataactagcggtgcaaacatgaactttgaccggctgcgcttcgtagcagagcgtgccaacgttggtgagggccgcgaggcgctactggcggcccgcattcccgagaagccgggttctttcgccaagctcatcgaagccatcatgcccaacaacgtcaccgagttcacttaccggtacactgatggcgaggtggccaacataatgctgggactctcgctgacagcgccagtagcgcagcgtgcccaccagctgcagctactcatgggccgcatcgcagaggccggtatggaggtgacggacctgtcgggtgacgaactggccaaaagccacgtgcggtatcttgttggaggacgggccaaagtgcccaacgaaaggctgtacatgtttgagttcccggagcggcccggcgcgctggagaagttcctggcaacgctgcggccgcgttacaacatcagcctgttccagtaccgtaactacggcagcgacgtcggcaagatcttggcgggcatccagtgcccagacggagaaatgccggagctggtcaaattcctcaaggagattggatacccgtggtttgactgcacgcaatcggaggtggccaagacctttttgggtggtccaggggtcaacgaagagggggcagtccctctttag

SEQ ID NO: 31488 - protein, 618 aa, Magnaporthe grisea 70-15
MAAPSDLEVTATKINGSSCQETVTNGDGINGPNGCSVAPATPATPTTPVMTVTRPSRTPSLTGLSLTEYSANPSPPAESKRRKAKKVIPDDYILPSGHPDYLRLILTSKVYEVCKETSLTHAVNLSNRLECKVLLKREDEQPVFSFKLRGAYNKMAHLDRAQSWRGVVCCSAGNHAQGVAFSARKLKIPATIVMPEGTPSIKHLAVARMGGHVVLHGPDFDAAKEECARREKHDGLINIPPFDDPYVIAGQGTIGMELLRQTNLQKLEAIFCCVGGGGLIAGIGVYVKRIAPHIKIIGVETHDANAMTQSLAKGERVLLKDVGLFADGAAVRTVGEENFRICQEVIDEMVQVTTDEACAAIKDIFEDTRSVVEPAGALALAGLKKWVAANPSTDSSRSLVAITSGANMNFDRLRFVAERANVGEGREALLAARIPEKPGSFAKLIEAIMPNNVTEFTYRYTDGEVANIMLGLSLTAPVAQRAHQLQLLMGRIAEAGMEVTDLSGDELAKSHVRYLVGGRAKVPNERLYMFEFPERPGALEKFLATLRPRYNISLFQYRNYGSDVGKILAGIQCPDGEMPELVKFLKEIGYPWFDCTQSEVAKTFLGGPGVNEEGAVPL

SEQ ID NO: 31489 - DNA, 1035 bp, Magnaporthe grisea 70-15
  CDS (1)..(1035)
atgggatcctactcagtagagcctgtgaagccatgggttgagaccccatgcttgtactctccccaagtctcgcgcgcagctggctgcaacatctacctcaaattagacaacctccagccctcgggctcgttcaagtccaggggtatcggcaacatgatgcaacgcgccatagccctgacgccgagggacgacgtgcacttctactgcccatcaggcggaaacgccggcctggcctgcgccacgtctgccgcatcactcggcaagcccgccactatcgtcgtcccgatcaagaccccggcccacatggtcgagaagcttgaggcgctaggagcagaggtgctccgccggggcggcagcatcgccgaggcggacgcgtacctcaagtcgcagctgctgataaacgacccgaacggcgtctacgtctcgccctttgaccaccctgacatctgggagggcgcctcgagcatcgtcgacgagatcacgacccagatgaggctgcagccgggagggcccaaggaggccgacggcatcgtctgcaacgttggcggcggcggcctgctgatcggcatcatggacgggctggaccgcatctactgcggccgcccgcagaaccagccccgggtgctggccgtcgagacgcgcggtgccgagagcctcgacgccagcatccgtgccggcgagctggtgacgctgccaaacattacttccatctgctcgtcgctgggcgtagctagagtggcaccccgcgcttacgagtggaccaaggccgcggccggtcagctcgccacgacggtggtggacgacgccgatgccgtcatggggtctgtcaagttcctggacgacgcgaggctgctcgtcgaggttgcctgcggcgctaccatttcggttgtgtacaacggccaactgaggcagaagctggggaagggcctgagcgacgccgagtgggccgagaagaacatagtgctggtggtgtgcggtgggtctcacaccactctcgaggcactgttgaggtacagggaagagtttggagtataa

SEQ ID NO: 31490 - protein, 344 aa, Magnaporthe grisea 70-15
MGSYSVEPVKPWVETPCLYSPQVSRAAGCNIYLKLDNLQPSGSFKSRGIGNMMQRAIALTPRDDVHFYCPSGGNAGLACATSAASLGKPATIVVPIKTPAHMVEKLEALGAEVLRRGGSIAEADAYLKSQLLINDPNGVYVSPFDHPDIWEGASSIVDEITTQMRLQPGGPKEADGIVCNVGGGGLLIGIMDGLDRIYCGRPQNQPRVLAVETRGAESLDASIRAGELVTLPNITSICSSLGVARVAPRAYEWTKAAAGQLATTVVDDADAVMGSVKFLDDARLLVEVACGATISVVYNGQLRQKLGKGLSDAEWAEKNIVLVVCGGSHTTLEALLRYREEFGV

SEQ ID NO: 31491 - DNA, 1746 bp, Gibberella zeae PH-1
  CDS (1)..(1746)
atgccttctgctgatcccatcgtggccgtccctgccaatggcgctgtcaatggcaccgccaatggaacaaatgacgactctcgtccgcagacgccgatgaccggaatggccttgaccgagtatagcgcaaacccctcgacaccgtccgcagagaagcaggctcgcctcaaagagattgttcccgaggaatacctcctccctactggataccctgactaccttcgtctcatcgccggcgctacttctcgagtctacgaggcctgcaaagtcactcccctcacccacgccatcaacctgagcaaccggctcgaatgcaatgtcctcctcaagcgtgaagacgagcagcccgttttcagcttcaagctgcgcggcgcttacaacaagatggcccatctcgaccccaagaagagctggaagggcgtagtctgctgctccgccggtaaccatgcccagggcgtcgcctattccgctcgcaagctcaagatccccgcgaccatcgtcatgcccgaagcgactcccagtatcaagcatctcaacgttgcccgtctcggcggccatgtcgtgttgcacggcgctgactttgacgccgccaaggaggagtgtgctcgacgagaggtccaggatggactcatcaacatcccccctttcgacgacccctatgtcattgctggtcagggcactatcggaaacgaattgttcggccaggtcaacatggccaaggtggaggctatcttctgctgtgtcggcggcggcggtctcattgctggaatcggtctctatgtcaagcgcatggctccccacgtcaagatcatcggtgtcgaggctcaggatgccaacgccatggcgcaatcgctaaagaagggcgagcgagttcttctcaaggaggtcggcctgttcgctgacggcgccgctgtcaagattcccggagaggaaactttccgcatctgcaaggaggttatcgacgatgttatcgaggtgtcaaccgacgagatctgcgccgctatcaaggacatgtacgacgacacccgttcaggtctcgagcccgccggtgccctttccatcgccggtctcaagaaatacgtcagccagaacccctcggacgattcgaagcgcaaccttatcgctgtgacgtccggcgccaacatgaactttgatcgcttgagatttgtcgctgaacgtgccaccatgggtgagggcaaggaagctcttctttctgtccagatccccgagcgtcctggtgctttctccgaactcatcaacaacatcatgccccacggtgtcacagagttcagctaccgatactccacagacgaagtcgccaacatcctcatcggtgtctccctcacagcccccgcccaccaacgatccgaagaactccgctccctcatcgaccgcatccaatcaaacaacatgaccgtgacagacctctcaaacgacgagctcgccaagagccacatccgatatctcgtcggtggacgatccggcgtccccaatgagcgcctctacatgttcaccttccccgagagaccaggagctctcgagaagttcctcgtcacgctccgtcccaagttcaacatcagcctgttccagtaccgtaactacggcggcgacgttggcaagatcgttaccggaatcctatgtcctgacgaagaggtcaccgagcttcacaactttttgcgcaagatcggttatccttacgaggactgcaccgagtcaccagtattcaagacatttttgcgatcatga

SEQ ID NO: 31492 - protein, 581 aa, Gibberella zeae PH-1
MPSADPIVAVPANGAVNGTANGTNDDSRPQTPMTGMALTEYSANPSTPSAEKQARLKEIVPEEYLLPTGYPDYLRLIAGATSRVYEACKVTPLTHAINLSNRLECNVLLKREDEQPVFSFKLRGAYNKMAHLDPKKSWKGVVCCSAGNHAQGVAYSARKLKIPATIVMPEATPSIKHLNVARLGGHVVLHGADFDAAKEECARREVQDGLINIPPFDDPYVIAGQGTIGNELFGQVNMAKVEAIFCCVGGGGLIAGIGLYVKRMAPHVKIIGVEAQDANAMAQSLKKGERVLLKEVGLFADGAAVKIPGEETFRICKEVIDDVIEVSTDEICAAIKDMYDDTRSGLEPAGALSIAGLKKYVSQNPSDDSKRNLIAVTSGANMNFDRLRFVAERATMGEGKEALLSVQIPERPGAFSELINNIMPHGVTEFSYRYSTDEVANILIGVSLTAPAHQRSEELRSLIDRIQSNNMTVTDLSNDELAKSHIRYLVGGRSGVPNERLYMFTFPERPGALEKFLVTLRPKFNISLFQYRNYGGDVGKIVTGILCPDEEVTELHNFLRKIGYPYEDCTESPVFKTFLRS

SEQ ID NO: 31493 - DNA, 1098 bp, Gibberella zeae PH-1
  CDS (1)..(1098)
atggcagacatctcaacttgccctcccctaacaagggactctgttatcgaggcacatcgcctaattgagcctcatgtgcatctaactccagtcatgacaagcagctacattaacaaacttgcttcaacgccaagagaccccgcctcttttgctaatcaaaaaaatctcccgcagcttgccaaacctcagttcaggctgtggttcaaatgcgagaacttccaacgtgctggggcctttaaagcacgtggagctttccacgctattgaaagattaaagttggagcctggatgggctgagaatggtgggaaggaaaaaggcgttgctacacatagctcgggtaatcatgcccaagcgcttgcactagctgcccgagaaaacggcatgcctgctcatgtcgtgatgccttcaatcactattccaagcaaggtcgctgctaccaagggctacggggcaaatgtcatcttcagcactttgaccgatcgccttgctgttgctgaaaacgttgtagcagaaacaggcgcacgccttgttccgccatatgatcaccccgatattattctagggcagggcaccatgggcctcgaactgcagcaacaggtcaaaggcctcaacggcatcattacaccctgcagtggtggcggaatgttgtcgggagtagcattgagttgcgaaaacacagggatcaaagtcttcggagccgaaccttcgtttcaaggcgcggatgatgccaagcggggaatggaacaaggtgaaagaatcacctatgtggatagtatgtccattgctgacgggctgcgctcctacttgggcgtttatccgtggagcatcctctacgagcgaaaacttgtccatggcatgtacagcgtgtcagaagacgagatcaaggcggccatgaagttgatattggagagaatgaagttattcgttgaaccaagtgccgctgtaccacttgcggtagtattgttcaacgaggagttccggtccatggttgagaaagaggcgaaaggggatgtttgggacttgggcattgtgctaagtgggggaaataccacaacagacggcattgcagatctctttccgagcgatgtatacacatag

SEQ ID NO: 31494 - protein, 365 aa, Gibberella zeae PH-1
MADISTCPPLTRDSVIEAHRLIEPHVHLTPVMTSSYINKLASTPRDPASFANQKNLPQLAKPQFRLWFKCENFQRAGAFKARGAFHAIERLKLEPGWAENGGKEKGVATHSSGNHAQALALAARENGMPAHVVMPSITIPSKVAATKGYGANVIFSTLTDRLAVAENVVAETGARLVPPYDHPDIILGQGTMGLELQQQVKGLNGIITPCSGGGMLSGVALSCENTGIKVFGAEPSFQGADDAKRGMEQGERITYVDSMSIADGLRSYLGVYPWSILYERKLVHGMYSVSEDEIKAAMKLILERMKLFVEPSAAVPLAVVLFNEEFRSMVEKEAKGDVWDLGIVLSGGNTTTDGIADLFPSDVYT

SEQ ID NO: 31495 - DNA, 1026 bp, Gibberella zeae PH-1
  CDS (1)..(1026)
atgggatctctagactctggcgcaaaattgccatggattaagacaccatgtatcatcagcactcaattatcccgccttacaggctgcaatgtctatctcaagcttgaaaatcttcaaccttcagggtccttcaagactcgtagcattagtagtctcatgacccaagctgctgccgcagccacaggtcctgttcatttttactgctcttcaggcggcaatgccggtctggcatgcgcaacatcagctatttcgctcggtcataaagccacaattgttatgcctaccattgttagcccgctcatgaaaagcaagctacttgatctgggagtagaagtgcaccagaaaggcaagaactgggctgagtgcgataagtacatgcgcgaagagctggtggccaacgatccttcagctatctatgtcgcaccattcgacgatcctcgactctgggatggagcggcaactatggtggatgagattcgggatcagctcgaggatcgtgtcgatggcatcgtctgcagcgttggcggtggcagtttagttaacggtttaatgcaaggcatcgagagccgtccctggctgggaacaaagcctgccgttctggccgttgagactgagggagccgacagtctcaatgccagtgtcctcgctggagagcacgtaacgctgcccgagatgacttcgatcgcaacgtctctcggtgctacaagagtgtcggagcagacatggaagtggagtcagcatccttcagggatgatgaagagtcttgttgtgtctgacgcagatgctgccataagtactgtgcgatttgcggacgatgcactacagctggttgaagtagcatgtggtgcagcattggcgattgcttatcggggagacctaagggatgttctcggaaagggcttgtctgatgaagaatggagtaagacgaacgtggtgtttgtggtttgtggtggctctggtatcacgttgagtatgttgtctgagtaccgggaaaagtactctggacagtcatccatcaaggtctga

SEQ ID NO: 31496 - protein, 341 aa, Gibberella zeae PH-1
MGSLDSGAKLPWIKTPCIISTQLSRLTGCNVYLKLENLQPSGSFKTRSISSLMTQAAAAATGPVHFYCSSGGNAGLACATSAISLGHKATIVMPTIVSPLMKSKLLDLGVEVHQKGKNWAECDKYMREELVANDPSAIYVAPFDDPRLWDGAATMVDEIRDQLEDRVDGIVCSVGGGSLVNGLMQGIESRPWLGTKPAVLAVETEGADSLNASVLAGEHVTLPEMTSIATSLGATRVSEQTWKWSQHPSGMMKSLVVSDADAAISTVRFADDALQLVEVACGAALAIAYRGDLRDVLGKGLSDEEWSKTNVVFVVCGGSGITLSMLSEYREKYSGQSSIKV

SEQ ID NO: 31497 - DNA, 1197 bp, Gibberella zeae PH-1
  CDS (1)..(1197)
atggcagacatctctaaaactcctcctctgactcgtgactcagtcattgaggctcacaaactcatcggccaatacgtccactatacgccagttctcaccaaccggaccatcacagaacttgcctcaacccctcgtacagcagaggaacttgagggaactcgctatgctggaagaacacccgcccgaccggtgttgagactctggttcaagtgtgagaatatgcagcgcataggcgctttcaaagctagaggcgcttttcatgctgttgagagattaaagcaggaacctggatggttggaaggagggggtaaagagaagggcgttgtcacgcatagttctgggaatcatgcccaggcgttagcccttgctgctcgtgagagtggcatcaatgctcatatcgtcatgcctgagatctccaaccccaagaagatcgccggcacaaaaggctatggtgctcgcgtgattttcagcggaagcacatcaactgaacgtgaagccatggctgaaaaggtaattgccgaaacaggtgctcgccttatcccaccttatgaccacccagatatcatgcttggtcaaggaactatgggattggagttccagcagcaagtcgccgagttgatgacgactgatgctgtggttgatggccaacgaaaactgtttcgtgcaccttcgactgggagggacaatgaggcaccacgtacaaagaaggaaaagccaggcttgaatgccatcatgacaccgctgggtggaggtggcatgctctcgggtgtagctctcagttgcgagggcactggaatccgcgtctttggatcggagccatcctttgaaggagctgatgatggcaagcgtggatacgagtcaggttctcgaatcacagcagtcaagactcttaccgttgccgacggactgcgcactcctgtaggggcccatccttggtcggtcatctacgaacgtcgtttggtgtcaggcatatacagtgtcaccgaagatgagatcctgtcagctatgaagctggtatttgagcgattcaagctcgtcgttgagcccagtgcttgcgttccgctggccgtggcgctgtacgatgaagattttagatccatggttgagaaggaggctggagaagagggatgggatctcggcttggtgtttagcggtggtaatgttggtcttgatgctattggcaagctctttgcgtag

SEQ ID NO: 31498 - protein, 398 aa, Gibberella zeae PH-1
MADISKTPPLTRDSVIEAHKLIGQYVHYTPVLTNRTITELASTPRTAEELEGTRYAGRTPARPVLRLWFKCENMQRIGAFKARGAFHAVERLKQEPGWLEGGGKEKGVVTHSSGNHAQALALAARESGINAHIVMPEISNPKKIAGTKGYGARVIFSGSTSTEREAMAEKVIAETGARLIPPYDHPDIMLGQGTMGLEFQQQVAELMTTDAVVDGQRKLFRAPSTGRDNEAPRTKKEKPGLNAIMTPLGGGGMLSGVALSCEGTGIRVFGSEPSFEGADDGKRGYESGSRITAVKTLTVADGLRTPVGAHPWSVIYERRLVSGIYSVTEDEILSAMKLVFERFKLVVEPSACVPLAVALYDEDFRSMVEKEAGEEGWDLGLVFSGGNVGLDAIGKLFA

SEQ ID NO: 31499 - DNA, 2019 bp, Ustilago maydis 521
  CDS (1)..(2019)
atgtacgacaagcaagtacaagtggtgactcaatcctcagatcctccaagcatccctttccgccatacgctgcggagcatcgaccttgttttggtccgggaaacgcgcagcttgatacagccaccaactatggcggacaccgcttcgacgtcgtcgtcttcggcggcgtacctttcgggacccttcccctcggctcgagcactgaccgagaacgatgtcacaccgtcagtgccacccactcggtcagaggagaaatctgcgcctacgcatctctacacggatctgccgcctcatctgatgcaggcagacaacacacccgactatctgcggctcatcctcaatgcggacgtctacgatctagtaaagcagacaccgctacaggcgggagtcaacctgtcgtccaagttgggctgtcaagtgcttctcaagcgcgaagatttgcagcccgtgttcagcttcaagctgcgtggtgcgttcaacatgatgcagcagctcgattcggagcaaaagtggaagggggtgatcgcttgttcggctggcaaccacgcgcagggtgtagctatggcgggtgcgcatctcaagatcccgtgtacgattgtgatgcccaagggtacaccggagatcaagacggcgaatgtcaagaggctgggtgccaaagtggtgctgttcggacaggatttcgatgaggccaaggcagagtgtacgcggctgtccaaggcgtatgggttgacgattatcccgccgtttgatcatcctcgcgtgatcgcaggtcagggtacgatcgctgtcgagatctgccgtcagacagacatgtcgcaagtcgacgctatcttctgctgcgtaggtggcggaggcttgctggccggtgtggcggcttacattaaacgcatcgctccgccgcatgtcaaggtgatcggtgtcgagacgttcgatgcggatgcactggctcagtcgctcgaagctggacatcgcgttctattgaatgaagtcgggcttttcgccgacggtaccgcggtgcgcatcgtgggcgaggaatgtttccgcatctgccgcgataccgtcgacggcgtggtgcgtgtaacgaacgacgaaatctgcgccgctatcaaggacacgtttgaagacacacgctctatcccggaaccgtcaggtgctctcgccgtcgccggtatgaagcgctacattgccgcgcacaatctgcaaggctcgggcaagaaattcgtcgcgctcgtctcgggcgccaacatgaactttgggcgcttgcgcttcgttgcagaacgtgccgagctaggcgaaaacaaagaagcgctcttgagcgtcgagatcgcggaagaaccgggcgcgttcttgaagctgcacaaccatatcaacccgaggatggtgaccgaattcagttatcgatacggcgatagcagcaaggcacagatcttactgtcattcatgctgaacggcaccaacgcgcgtgctgctagcgcgagcagcgaatcgcaatcgcatgcgagcggcgccgtacctgtacctgaagtggtgacgaatacggcctcgactggtgatgcgtcgatctcgtcgtcaagcgcatcgatcgatacagatgtgaaccagctcgctcagtcggtggcgccatcgacactgtcgacgtcgagcgaactcgcgtcgatccttgccgctctcactgcggacggcatgacaccgatcgacctgtcaggcgacgaagtgtccaagtcgcacctccgctacctcgtcggcggcaagacgagcgtcgccaacgaacgcattttccgcttcgagtttccggaacgtcccggtgcgctgcgcaagttcttggtcggaatgcagagcggctggaacatcagcttgttccattaccgaaaccacggtgctgacatgggcaagatcttgctaggcatccaagcgccgaaacaagatgagatcaagtttgaaaccttcctcaaggagctcggataccagtatcatgaagagaccaacaaccctgtgctgaggagatatctcgcacaataa

SEQ ID NO: 31500 - protein, 672 aa, Ustilago maydis 521
MYDKQVQVVTQSSDPPSIPFRHTLRSIDLVLVRETRSLIQPPTMADTASTSSSSAAYLSGPFPSARALTENDVTPSVPPTRSEEKSAPTHLYTDLPPHLMQADNTPDYLRLILNADVYDLVKQTPLQAGVNLSSKLGCQVLLKREDLQPVFSFKLRGAFNMMQQLDSEQKWKGVIACSAGNHAQGVAMAGAHLKIPCTIVMPKGTPEIKTANVKRLGAKVVLFGQDFDEAKAECTRLSKAYGLTIIPPFDHPRVIAGQGTIAVEICRQTDMSQVDAIFCCVGGGGLLAGVAAYIKRIAPPHVKVIGVETFDADALAQSLEAGHRVLLNEVGLFADGTAVRIVGEECFRICRDTVDGVVRVTNDEICAAIKDTFEDTRSIPEPSGALAVAGMKRYIAAHNLQGSGKKFVALVSGANMNFGRLRFVAERAELGENKEALLSVEIAEEPGAFLKLHNHINPRMVTEFSYRYGDSSKAQILLSFMLNGTNARAASASSESQSHASGAVPVPEVVTNTASTGDASISSSSASIDTDVNQLAQSVAPSTLSTSSELASILAALTADGMTPIDLSGDEVSKSHLRYLVGGKTSVANERIFRFEFPERPGALRKFLVGMQSGWNISLFHYRNHGADMGKILLGIQAPKQDEIKFETFLKELGYQYHEETNNPVLRRYLAQ

SEQ ID NO: 31501 - DNA, 1131 bp, Ustilago maydis 521
  CDS (1)..(1131)
atggtctcgttcaaagacattcaagaggcgcacgtccgtgtctcaccgtacactcactatacgcccgtactcaccaaccaggcgatcgaccaactcgcgaccgagtcactctttggccctgccacatctgcttctccttcgcccagacctcgcatacgtctcgcctttaaagccgagcatcttcagcgcgtaggagcattcaagtaccgaggcgctaccaactctgtgcttgtccacctcggcgcagctaaagcgcaacacgatgcctcggcatccaaatcgaccaagttcagcccgggcaagctggttgttgtaacgcattccagcggaaaccatgctgctgcgcttgcgtgtgctgccaagtcggccggctgtgtcgcagcggttgtgatgccgaacaacgcgcccaagccgaagaaggaggcggttgctgggtacggcgccagaatcacgttctgcgagccaacgctcgaggcacgtgaatcgacggccgaggctgtcatgcaggattacgagaagcaggggtatatcgtgcgctttgtacatccgtatgatgagccattagtgattgctgggcagggaacgatggcgctcgaattgctggatcaggctgcacaactggaggagtgggcaacttgctcgcatgcagctgatcgcataccgtcaaacgcaagaccactgcatggtacaagaaacgtcgctccctccggcccgaaggcggagtcagtatggcgaaagagagacatgtcggaagctgcgctcgatatcatcatcgctcccgttggaggcggaggaatgctctctggtgtcgctaccgcaatcaagggagccgacgaccgaatcgttgtcatcggcgctgagcccgacctagtcgacgacgctttccactcataccaaacaggttcagtacaacagccaccgcagcctccgaaaaccatctgcgatggactcctcacctcgctctcgcctctgacactcgaacacatccgaaatcacgtcgatggcatcgtcacggctcgtgaagaaaacgtgctgaaagccttacagctgcactggacccgacagaagcagtttgtcgaaccaagcgctgccgcttcaatcaagctgcagagcaggcaggtggtgctttga

SEQ ID NO: 31502 - protein, 376 aa, Ustilago maydis 521
MVSFKDIQEAHVRVSPYTHYTPVLTNQAIDQLATESLFGPATSASPSPRPRIRLAFKAEHLQRVGAFKYRGATNSVLVHLGAAKAQHDASASKSTKFSPGKLVVVTHSSGNHAAALACAAKSAGCVAAVVMPNNAPKPKKEAVAGYGARITFCEPTLEARESTAEAVMQDYEKQGYIVRFVHPYDEPLVIAGQGTMALELLDQAAQLEEWATCSHAADRIPSNARPLHGTRNVAPSGPKAESVWRKRDMSEAALDIIIAPVGGGGMLSGVATAIKGADDRIVVIGAEPDLVDDAFHSYQTGSVQQPPQPPKTICDGLLTSLSPLTLEHIRNHVDGIVTAREENVLKALQLHWTRQKQFVEPSAAASIKLQSRQVVL

SEQ ID NO: 31503 - DNA, 1086 bp, Aspergillus nidulans FGSC A4
  CDS (1)..(1086)
atggctcctcaactcccgaccccaaattctatacaagaagcttacaccctcataaccccgtacatccaccgcaccccgctccttacaaatcgcaccctcaacgccattgcttcagcccggcagtcacccgatgcgctacgcggaacacctttcgaaggctcgaccccagcgcaccccaagataaacttcttcttcaaatgcgagaactttcaacgcatcggcgcgttcaaggcccgcggcgcatttcacgcgctgctgaggctgattgagcgtgagggcgaggagaatgcccttgcgctcgcctcctcaactctcgggattcccgcgtatattgtcatgccgaaaatcagcactccctccaagatcgcagggacgcagtctcacggcgcagaagtgattttcagcggctcaacgagtgtagagcgggaagcggtagttgcggacgtccaagcgcgcacaggggcgattcttgtcccaccgtatgacgattaccatattatttgcggccaggggacgacgggactagagatgcatgcacagtatcttgatgctgtgcgcgagaagcctgagttgagtgtacatgagtccgagtctccgtccgctagggaaggtctagatgcggtgattacgccgattggaggaggcggtctcaattccggggttgcaactttcttctcggataagacgacgaaagtctttggcgcggaaccgagcttcgagggcgcggacgattgtcggcgtgggcttgacgctggacagagggttgagagcgtgaagactctgacgattgcggatgggttaagaacgccggtgggcgtgttgaattgggaggttatttcagacaagagcaaagtggcgggtgtgttttccgtcactgaggagcagatcaaggctgcaatgaggcttgttctggaacgaatgaaggtggttgttgaaccaagcgctgttgtgggattggctgtttgtctgtataatgaggagtttcgacggcttgtcgaacgcgaggcgccagccggctgggatgtaggaattgtgtttagtggtgggaatacgacggttgaggcgattgggaaattgtttggttga

SEQ ID NO: 31504 - protein, 361 aa, Aspergillus nidulans FGSC A4
MAPQLPTPNSIQEAYTLITPYIHRTPLLTNRTLNAIASARQSPDALRGTPFEGSTPAHPKINFFFKCENFQRIGAFKARGAFHALLRLIEREGEENALALASSTLGIPAYIVMPKISTPSKIAGTQSHGAEVIFSGSTSVEREAVVADVQARTGAILVPPYDDYHIICGQGTTGLEMHAQYLDAVREKPELSVHESESPSAREGLDAVITPIGGGGLNSGVATFFSDKTTKVFGAEPSFEGADDCRRGLDAGQRVESVKTLTIADGLRTPVGVLNWEVISDKSKVAGVFSVTEEQIKAAMRLVLERMKVVVEPSAVVGLAVCLYNEEFRRLVEREAPAGWDVGIVFSGGNTTVEAIGKLFG

SEQ ID NO: 31505 - DNA, 1764 bp, Aspergillus nidulans FGSC A4
  CDS (1)..(1764)
atgaccgagaacgcgtccatgaatggcgctgcgacaccactttcctcgaggttgagcaatttggctctgacggaatactctgctattccgactcctacttcggagaaggaagaatacaaaggacccgacagtccacccgcgtgggatatccctgatgctttcttacttcccaatggctacccggatgtgcgacatgtccctgctgcctacccaaatcgttctaccgctaacaatcgttatctgcagtatcttaaactgattttgacttcccgcgtctacgagatcactaccgagtcccctctccaccatgcagtcaatctcagtaaccgaatggaatgtcgagtgcttctcaagcgggaagacctgctacctgtattcagcttcaaactccgcggagcatacaacaagatggctcatttgaccgacgagcagcgatggaaaggcgtgattgcttgctcagcaggcaatcatgctcagggtgtcgcgtactctgcccgcaagctcaaaattcccgctaccattgtcatgccctccggcaccccagcgatcaaacacttgaatgtcgctcgccttggcggtagtgttgtccttcatggaaacgatttcgacgctgccaaagaagaagctcaccgccgggaaaagcagcacggtcttacaagcattccccccttcgatgacccgtacgttattgctggacaaggaaccatcggaatggagatcttgcgccaagcgaatctggacaagctggaagctgtcttttgcgccgttggcggaggaggtctgatctccggtgttggcgtttacatcaagcgcattgcgccgcatgtcaaggtcattggtgtggagacccacgacgccaacgcaatggcccagtctcttgatgaaggctctcgtgtgttgctgaacgaggtcggcctctttgcagatggcgctgcggtcaagagtgtggggtcggaatgttggcgcgtggcccgcgaggtagtagatgagattatcttggtttcaaccgatgagacttgcgctgcgatcaaggatgcatttgaggatacacgctcgatcatcgaacccgctggtgcgctggccattgcaggattaaagaaatatgtcgccaagcgccccagccccaacaccagccgtgaactggttgcaatcacctcgggagcaaatatggattttgaccggctgcggtttgttgcggaacgcgctgccttgggggagaaaaaggaagctcttctgagcgtaaaaatccctgaacaaccgggcgctttcgccaagctagtggaggtcgtccttccgcatgctgtaaccgcattcaactaccggtatgctgatgaaacaactgccgatgttctcatgggtatctccttgtccgcttcaacaggtcaagaagacctggctaagattatgacggaattaacccgaaacggcatggactcgaaggatctcagcgatgatgagcttgctaaacggcacctgcgcttcttggttggcggacgcagtgaagtgaaggatgagcgcctgttcatgttcgagttccccgagcgtcccggagcgttagccaaatttctcaggacgcttcgtcctagccagaacatctctctattccactaccggaattacggcggcgatgttggcaaggttctggcgggtattcagtgcccggaatgcgagaaggaacaacttgaggctttcctcaaggaccttggatacccatttaccgaggagacgcaatccgaaacttacaagactttccttcgtcgttga

SEQ ID NO: 31506 - protein, 587 aa, Aspergillus nidulans FGSC A4
MTENASMNGAATPLSSRLSNLALTEYSAIPTPTSEKEEYKGPDSPPAWDIPDAFLLPNGYPDVRHVPAAYPNRSTANNRYLQYLKLILTSRVYEITTESPLHHAVNLSNRMECRVLLKREDLLPVFSFKLRGAYNKMAHLTDEQRWKGVIACSAGNHAQGVAYSARKLKIPATIVMPSGTPAIKHLNVARLGGSVVLHGNDFDAAKEEAHRREKQHGLTSIPPFDDPYVIAGQGTIGMEILRQANLDKLEAVFCAVGGGGLISGVGVYIKRIAPHVKVIGVETHDANAMAQSLDEGSRVLLNEVGLFADGAAVKSVGSECWRVAREVVDEIILVSTDETCAAIKDAFEDTRSIIEPAGALAIAGLKKYVAKRPSPNTSRELVAITSGANMDFDRLRFVAERAALGEKKEALLSVKIPEQPGAFAKLVEVVLPHAVTAFNYRYADETTADVLMGISLSASTGQEDLAKIMTELTRNGMDSKDLSDDELAKRHLRFLVGGRSEVKDERLFMFEFPERPGALAKFLRTLRPSQNISLFHYRNYGGDVGKVLAGIQCPECEKEQLEAFLKDLGYPFTEETQSETYKTFLRR

SEQ ID NO: 31507 - DNA, 1278 bp, Aspergillus nidulans FGSC A4
  CDS (1)..(1278)
atggcgttcgtgaagagaataccctggatcgaaacacccctgattgaatctgcttccttatcaaagacggctggatgcagagtattcctcaaactagacctccttcagccttctggctctttcaaatctagaggaattggaaacctcatctgcaatgcccttcaagacccagccaacagaggcaaagaactccacttctttagctcctctggcggaaacgccggtctggctgccgttatcgcggcgcgtgatctcggctgccgttgtacagttgtcgtgccgtactcgacgaaacctatgatgatcacaaagctgcgggaggccggtgccactgatgtgatccaacatggggacagttggtttgaggccgatacgtatcttcgggagacatttattgagaatcaggaccaaggaggcgatgccgcgacaaagaggaatatctacgttccaccgtttgatcatccgcagatctggaagggtgtcgggactatgattgatgagatcgcacagcaaatgccgcctagggatgtttcgaaaggttcttttcccgcagatgctgtgatttgtagcgttggtggaggtggcctctttaatggtgtggttgaggggctgggtcgacatctggcaactaaaaatggcgatgctcctgggggcaaggtccgcgttttagccgtcgaaactgaaggaactgattccctcgctttgtcccttcgaaaaggtacattgcagccgctcccggctattacgtccctcgctacatcgctaggagcacttcaagtggcgccgcagactctgaagaacgcgcagtgcccgcccgccagagtagatgtcgtcagcgttgtcggctctgatgcggaagctgcccaaggcgtgattcggctcgcggatgaacaccggttgcaagttgaattggcttgtggtatcagtgtagaggttggtggctcggtgaagctgagggattacatgcctgatctgacgccggacagccggatagttattgttatttgtggaggaagcaatgtcactgcggagatggtggtggagtataggaaaaggcttcatgatggttgggatagcgcatacgcggcttttgcgtcgcctgcggtcggatccgtagttcacgcatttgacgccattcttggtagtcaggtccccgtcttatttctaatgtatccatccatatgctccagctgtaaagctgccagcataaacaagaagagcacaatgcactccagctttacttggagaagtagacaaattcagacttcgactgtgtga

SEQ ID NO: 31508 - protein, 425 aa, Aspergillus nidulans FGSC A4
MAFVKRIPWIETPLIESASLSKTAGCRVFLKLDLLQPSGSFKSRGIGNLICNALQDPANRGKELHFFSSSGGNAGLAAVIAARDLGCRCTVVVPYSTKPMMITKLREAGATDVIQHGDSWFEADTYLRETFIENQDQGGDAATKRNIYVPPFDHPQIWKGVGTMIDEIAQQMPPRDVSKGSFPADAVICSVGGGGLFNGVVEGLGRHLATKNGDAPGGKVRVLAVETEGTDSLALSLRKGTLQPLPAITSLATSLGALQVAPQTLKNAQCPPARVDVVSVVGSDAEAAQGVIRLADEHRLQVELACGISVEVGGSVKLRDYMPDLTPDSRIVIVICGGSNVTAEMVVEYRKRLHDGWDSAYAAFASPAVGSVVHAFDAILGSQVPVLFLMYPSICSSCKAASINKKSTMHSSFTWRSRQIQTSTV

SEQ ID NO: 31509 - DNA, 2076 bp, Gallus gallus
  CDS (1)..(2076)
atgcacttatgtgacatggccggggtatgggcttgccttaaactggacatgaagaaggcaccagtgaagccatcccgagctttagtcttagagctgactgcccttttgtctcctcacttctggcagcagcatgctgcagggttatggactcctagggttatgcagaaggactcccatccccatcccactacgcagccatctcgtgtttggaaagccctcaccgcttttgtcacaaaagcctgtgtcccccggtgctgccctaaaggatctctgcacgtgactcaaacaccacaggaagaagttgggccttccttgctacttgtgtcgaccctagtgcatgttgttaactcgtgggccctgcacaagtcggccgctcttcccacccaggcagtgcagggctggcagtgcccgtgggcaagcgtgtccctcctgctgtgctttgcacctggaattacaatgaattttgcagcacagttgatctactccagggtgttaaaaaacagaactcccagggaccgctacagggaagatgaagactacgatcctttctggcaaagttatgctgagcagctgttcttgaaaaaggatgacagtaaagtaaagaaacaagatgccccagcactttgcgatcttcgcctttgtaaggatgggccaataagaaatggacacattgggcagaggccacccccaatcaaccctgaaagactgaaggatttcgttgaggaggattacctcaatggggatgtgaagacgtgggaaatgaagatcgtcagccgtaatgaggagttacttggggatgccctttccctcgtccctcagtcaagcagcaggatcagcctgtccagccacaacaaattgattcgatttgaagacattagtgcagcagctttcaaaatccagtccggtgttcagaaaaccccttgcatgtactccaggctatccaagctgtacggagttgacatctacctaaagaaagagttcctccagtacacgggatctgtgaaggagcgaggtgtactttatcttctgacatcactgcctcaggatcagcaaaggaagggggtgattgtggcttcagatggcaacttttccatggctgttgcttaccatgcttcagagcttcgtatcccagtgtttgtcatcatgtcaaccagcacttcccctgccagagtgaaaacgtgccgtgaatacggtgccatggttatatcctatggcactacagctaaggactcccagatgcatgcaagaaggttggcacaggagaatggctatctctacctggaagaggaggacagtgctgtgtacctgtcgggcctgggcaccatggggctggagatgtatgagcaggtgcccaagctggatgcggtgattttccctgcaggaggccactgtggcttgctggcgggctcggctgctgcactcaaacacctcaacccacgtatttctgtcatcggggttgagtctgaaagctttcctgtattgcagcagtccctgaaggctggccatccagctgaagaccaggcttgcaacaaccaccacttttatggagatgtgagcggactttgcttcggcagcaattctttgcagctgactgggaagcttgtggataaggttgttgctgtgagcgaggaggacgtcctcatttcaatgctgagattgctggagtatgagcgagccacagttgatgcagaaggggccattggacttgcagcactggttgctgggaagctgcctgagttgaagggtaaaagagtggcgattgctatatgcagcggaaatgtggacttgcatttgctgcaacgatgcattgctcgtgccctgacccttgagagcagagtgtgcagattttccctggtgatttctgacagcccagcagatgtttcaaagctactggaggttttggctcgggaggaagcaagagttttggatatcagacaagaacgcacatttgtgacatctgagctcttcactgttgaggtcacctgcaccgtggagaccagagacaagatccacacagcccagctgcggaacgcgctgctggaacgctaccccacagccgcgtggacggagcgatga

SEQ ID NO: 31510 - protein, 691 aa, Gallus gallus
MHLCDMAGVWACLKLDMKKAPVKPSRALVLELTALLSPHFWQQHAAGLWTPRVMQKDSHPHPTTQPSRVWKALTAFVTKACVPRCCPKGSLHVTQTPQEEVGPSLLLVSTLVHVVNSWALHKSAALPTQAVQGWQCPWASVSLLLCFAPGITMNFAAQLIYSRVLKNRTPRDRYREDEDYDPFWQSYAEQLFLKKDDSKVKKQDAPALCDLRLCKDGPIRNGHIGQRPPPINPERLKDFVEEDYLNGDVKTWEMKIVSRNEELLGDALSLVPQSSSRISLSSHNKLIRFEDISAAAFKIQSGVQKTPCMYSRLSKLYGVDIYLKKEFLQYTGSVKERGVLYLLTSLPQDQQRKGVIVASDGNFSMAVAYHASELRIPVFVIMSTSTSPARVKTCREYGAMVISYGTTAKDSQMHARRLAQENGYLYLEEEDSAVYLSGLGTMGLEMYEQVPKLDAVIFPAGGHCGLLAGSAAALKHLNPRISVIGVESESFPVLQQSLKAGHPAEDQACNNHHFYGDVSGLCFGSNSLQLTGKLVDKVVAVSEEDVLISMLRLLEYERATVDAEGAIGLAALVAGKLPELKGKRVAIAICSGNVDLHLLQRCIARALTLESRVCRFSLVISDSPADVSKLLEVLAREEARVLDIRQERTFVTSELFTVEVTCTVETRDKIHTAQLRNALLERYPTAAWTER

SEQ ID NO: 31511 - DNA, 1083 bp, Candida glabrata CBS138
  CDS (1)..(1083)
atgtcagtatacaacaagacaccactaatacgtcagatatttccaagcataccacagatgtacttgaaacatgaatgtttccaaccaagtggaagtttcaaaagcagaggtattggccatctaatatcgaaacaatcacaaagaatattaggcaatggcctgggtaagaagccaatggtattcgccagctctggtggtaatgcaggactagcagcagccacagctgcaaaatttttaaacctaccttgtaccgtcgtcataccaaccgctacgaaacagaggatggcagataagattagagctaccggagctaatgtcattgtttctggtaacttctggaaggaggcagataactacctgaaagataatatcctatctaagttagaagagttacataaaaatgtggaaccaatatatgtacacccatttgataatccagatatatgggaaggtcatgcttcaatggtagatgaaattgttgaagactttaaaaataaaatgatacctcttaacaagataaaagctatagtgtgcagtgttggaggaggcggactttacaatggtataatacaaggcctcgaaaaatataacttagctgacaagatacctattgtaggcgtagagactaaaggttgccatgtattcaatacatctttgagaatgaacaaagtggtgagcttcaagaagatcaccagtattgctacctcgttaggtactgccgacatatctacagaggcctttaaatacgccaaaagatatggtacgaagtctgtggttttaagtgatcaggacgttgtcaagacatgcctaagatacactcatgactttaacatggtaattgaaccagcatgtggcgctgccgtccatttggcttatcacaccgagatcttagaaaaagaactcggcacaaaactaaatgcggatgacattgtactagtagtggcctgtggaggttcatcgaacactgtcgaagatatggaatcgatactacaaagactgtccaccgaggagaataacatcaatatcccaaatgttgcagaaaatattattgtcagaatgcctgaggtgtctgtcctagcttaa

SEQ ID NO: 31512 - protein, 360 aa, Candida glabrata CBS138
MSVYNKTPLIRQIFPSIPQMYLKHECFQPSGSFKSRGIGHLISKQSQRILGNGLGKKPMVFASSGGNAGLAAATAAKFLNLPCTVVIPTATKQRMADKIRATGANVIVSGNFWKEADNYLKDNILSKLEELHKNVEPIYVHPFDNPDIWEGHASMVDEIVEDFKNKMIPLNKIKAIVCSVGGGGLYNGIIQGLEKYNLADKIPIVGVETKGCHVFNTSLRMNKVVSFKKITSIATSLGTADISTEAFKYAKRYGTKSVVLSDQDVVKTCLRYTHDFNMVIEPACGAAVHLAYHTEILEKELGTKLNADDIVLVVACGGSSNTVEDMESILQRLSTEENNINIPNVAENIIVRMPEVSVLA

SEQ ID NO: 31513 - DNA, 1716 bp, Candida glabrata CBS138
  CDS (1)..(1716)
atgatacccaagctgctgtgtggtaacacactgttgagtgcatctgttacaacaagtaggtctgtctatggcttatctaccagatattttactcaggatctcgcaccttcattggttaaactgcattccgagttaaagcctgatgagcttcttactgataacacaccagactatgtgcgtttggtgctaagatcatcggtctatgatgttataaaggaatcgccaatctcacatggtgttggtctatcgtctagactaaacacaaatgtccaactgaaaagagaagatttactaccagtgttctctttcaagctgcgtggtgcatacaacatgatagcgaagttagacgatactcagagaaatcaaggtgtcatcgcatgttccgcaggtaatcatgcacaaggtgtagcatatgccgctagacatttggatattccagcaactattgtcatgcctgtgtctactccatctataaaatatcaaaatgtgtcgagactgggttcacaagttgttctatatggtaatgattttgacgaagctaaagctgaatgtactaaactggcagaagagcgtggtttgactaacatccctccatttgatcatccatatgtcattgctggtcaaggaacagttgcgatggaaatcttgagacaggtctataactcaaataagatcggtgctgtctttgttccagttggtggtggtgggttgattgccggtgttggtgcctatttgaagagagtcactccacacatcaagattataggtgtggaaacacatgatgcagcaactttacacacatctcttcaaagaaataaaagaacaaatctagctagcgttggtacttttgctgatggtacttctgtgcgtattattggtgaagaaacctttagagttgccagagaagttgtcgatgaaattgtattggtcaatactgatgaaatttgtgctgcggttaaggatgtctttgaggataccagaagtattgttgaaccatctggtgctcttgcggttgctggtatgaagaagtatattactcaacttcatccagaaatagatcactctaagcaaacatatgtcccaattttgtcaggtgctaatatgaacttcgatagattaagatttgtttctgagcgtgctgtattaggtgaaggtaaggaagtttttatgctggttaccattcctgacgttccaggctctttcaaaaaaatgcagaaggttattcatccaagagctgttactgagttctgttaccgttataatgaacatcgtcatgaatcttctagtgaggttccaaaggcctatatctatacatctttcagtgtggtagaccgcgaaaaggagattaaacaagtaatgcagcaactgaacaccctcggttttgaagccgtcgatatttctgacaatgaattagcaaaatcacatggtagatatttagttggtggtgcgtcaaaggtcccaaatgaaagaattatttcgttcgaattcccagaaagacctggggccttaaccagattcttggcaggtttaagcgagtcttggaatttgacattgttccattacagaaaccatggtgctgatattggtaaagtattggctggtatttctgtgccacctagagaaaatttaactttccaaaaattcttggaagatttaggctataagtaccaagatgaaacagaaaatatggtatatcaaagactactgaaatattaa

SEQ ID NO: 31514 - protein, 571 aa, Candida glabrata CBS138
MIPKLLCGNTLLSASVTTSRSVYGLSTRYFTQDLAPSLVKLHSELKPDELLTDNTPDYVRLVLRSSVYDVIKESPISHGVGLSSRLNTNVQLKREDLLPVFSFKLRGAYNMIAKLDDTQRNQGVIACSAGNHAQGVAYAARHLDIPATIVMPVSTPSIKYQNVSRLGSQVVLYGNDFDEAKAECTKLAEERGLTNIPPFDHPYVIAGQGTVAMEILRQVYNSNKIGAVFVPVGGGGLIAGVGAYLKRVTPHIKIIGVETHDAATLHTSLQRNKRTNLASVGTFADGTSVRIIGEETFRVAREVVDEIVLVNTDEICAAVKDVFEDTRSIVEPSGALAVAGMKKYITQLHPEIDHSKQTYVPILSGANMNFDRLRFVSERAVLGEGKEVFMLVTIPDVPGSFKKMQKVIHPRAVTEFCYRYNEHRHESSSEVPKAYIYTSFSVVDREKEIKQVMQQLNTLGFEAVDISDNELAKSHGRYLVGGASKVPNERIISFEFPERPGALTRFLAGLSESWNLTLFHYRNHGADIGKVLAGISVPPRENLTFQKFLEDLGYKYQDETENMVYQRLLKY

SEQ ID NO: 31515 - DNA, 1134 bp, Kluyveromyces lactis NRRL Y-1140
  CDS (1)..(1134)
atgtatgtccatatctttccaacttcatatagtcaaacgagtattaatagattaataatgaaagcccaattgttcagcaaaacaccgttattgaaacatcaattcaaaagaagtaaaggccctcaagtgcttttgaagtatgaatttttacagccgagtggtagtttcaaaagtagaggtatcggacatttaatctctacaaaggtagaagaaataaagaaatcctcgcctgaaaaaatcggtcacgtgtttgctagctctggcggtaacgctggattggcggcggcggttgcgtccctcgaattgaacgttccctgtacagtagttgtgtcgaatgcaacacgtccaagaattatagaaaagattcgctcctacggcgcagatgttgttgttcatggtaaccattggaaagaggcagattctttcatgaaggagcaccttatgaagaaacttgattcctttaaatacgagccaatttacagccatcctttcgataatccgctaatttgggaaggccattcctttatggtggatgaaatcatggatgtcttggctagttcaaaaatacctataaccaaaattaaaggtattgtttgcagttttggaggcggaggtctatataacgggttgattttgggtttgcaacggtataatttagctgacaaaattccgatagtatgtgtcgaaacgaagggaacagacgtattgagcgcctctttgcgtgtaggagcaccagtggagtttgaaaaaatatccagttgtgctacttcactagggacagcaaccatatcaacaacggcttaccaaaatgtgaaacgtcacggaagcaagtcagctgtcatctctgatactgaagtgatttcaacttgccttcaattttctaacgataccaacatagttgcggaacctgggtgtggggcaacgttatacttcgggtataatatcgataaactacaaaatattctcggttcagacattaaagatgatgattatgtcatcttgatcggttgtggtgggtcatctacaagcttagaggatcttaaagagttatctagttttactaattgtgaatttgagcttccttctactggtgtgagccgtctgaattcccattcgttacacacactccagtag

SEQ ID NO: 31516 - protein, 377 aa, Kluyveromyces lactis NRRL Y-1140
MYVHIFPTSYSQTSINRLIMKAQLFSKTPLLKHQFKRSKGPQVLLKYEFLQPSGSFKSRGIGHLISTKVEEIKKSSPEKIGHVFASSGGNAGLAAAVASLELNVPCTVVVSNATRPRIIEKIRSYGADVVVHGNHWKEADSFMKEHLMKKLDSFKYEPIYSHPFDNPLIWEGHSFMVDEIMDVLASSKIPITKIKGIVCSFGGGGLYNGLILGLQRYNLADKIPIVCVETKGTDVLSASLRVGAPVEFEKISSCATSLGTATISTTAYQNVKRHGSKSAVISDTEVISTCLQFSNDTNIVAEPGCGATLYFGYNIDKLQNILGSDIKDDDYVILIGCGGSSTSLEDLKELSSFTNCEFELPSTGVSRLNSHSLHTLQ

SEQ ID NO: 31517 - DNA, 1704 bp, Kluyveromyces lactis NRRL Y-1140
  CDS (1)..(1704)
atgctacaatctatagtgagaactcctagagttcttcgtgcttcaaatgcattaaaactttctgttcgctgtgttagcacggaccagttctctgataatttgcagaggatgtactcccatttgaaggctgacgaacgattggaagatggatctccagactacgtgcgtttaattttaaggtcttctgtttatgaagtcattgaagagacccccatttcacgtgcggtgtcattgtcctctagactaaacactaacgttaaattgaaaagagaggatttgttgccagtgttttccttcaagctgcgtggtgcttataacatgattgccaagctagacgaaacacagaagaatgctggtgttattgcgtgctctgctggtaatcacgcacaaggtgttgccttttcaagtaatcatatgaacattccagctaccattgtgatgcctgtttcaacaccatcaatcaaatatcaaaacgtgtcgagattaggtgcccaagtggttctatacggtgacgacttcgatgaagccaaattggaatgtgcgaggttagctgaagaacgtggtatgacagatattccaccatttgatcatccttacgttatcgctggtcaaggtactattgccatggagattctaagacaagtacaaaatgggtctaacatcggagcagtgttctgtgccgtaggtggtggtggtttgatttcaggtattggttcatacttgaagagaatcgcacctcatatcaaggttattggtgtggaaacttacgatgccgctacgttagatgtttcattaaagaacggtaaacgtaccccattgccaagtgttggaacgttcgctgatggtacctctgtgaggttaatcggtgaagaaacattccgtgtttgtcaagacgtagtcgatgaagttatcttggtgaacaccgatgaaatctgtgctgccgttaaagatgtgtttgaggacacaagatcaattgtcgaaccaagtggtgctcttgctgttgccggtttgaaaaaatatgtctctcaactacaccctgaaatagaccattctaagaagacatacgttccaattctttccggtgccaacatgaatttcgaccgtttaagattcgtctcagaacgtgctgtattgggtgaaggtaaagaagtgtttatgttggtcaccattccagatactccaggttctttcaagaagctacagaatgtgatccatccaagagctgtcactgaattctcataccgttataacgagcattgtcacgaaaatgactccgatgtaccaaccgcttgtatctacacatcttttaacgtcgttgaccgtgaaaaggaaatcaagcaagtggttcaacaattgcatgctttaggtttcgaagccgtagatatctctgacaacgaaatggccaagtctcacggtagatatttggtcggtggtgcttctaaaattgaaaatgagaaagtcattgcattcgaattcccagagagaccaggtgcactaactaaattcttatcaggattgaacgtttcctggaacttgactttattccattacagaaaccatggcgctgatattgggaaaattttggctggtatcagtgtgcctccacaagacaacgaaatcttccaaaagttcttggacgatctaggatataaatatcaagatgaaactgacaatatggtttaccagaagtttttgaagtactag

SEQ ID NO: 31518 - protein, 567 aa, Kluyveromyces lactis NRRL Y-1140
MLQSIVRTPRVLRASNALKLSVRCVSTDQFSDNLQRMYSHLKADERLEDGSPDYVRLILRSSVYEVIEETPISRAVSLSSRLNTNVKLKREDLLPVFSFKLRGAYNMIAKLDETQKNAGVIACSAGNHAQGVAFSSNHMNIPATIVMPVSTPSIKYQNVSRLGAQVVLYGDDFDEAKLECARLAEERGMTDIPPFDHPYVIAGQGTIAMEILRQVQNGSNIGAVFCAVGGGGLISGIGSYLKRIAPHIKVIGVETYDAATLDVSLKNGKRTPLPSVGTFADGTSVRLIGEETFRVCQDVVDEVILVNTDEICAAVKDVFEDTRSIVEPSGALAVAGLKKYVSQLHPEIDHSKKTYVPILSGANMNFDRLRFVSERAVLGEGKEVFMLVTIPDTPGSFKKLQNVIHPRAVTEFSYRYNEHCHENDSDVPTACIYTSFNVVDREKEIKQVVQQLHALGFEAVDISDNEMAKSHGRYLVGGASKIENEKVIAFEFPERPGALTKFLSGLNVSWNLTLFHYRNHGADIGKILAGISVPPQDNEIFQKFLDDLGYKYQDETDNMVYQKFLKY

SEQ ID NO: 31519 - DNA, 1719 bp, Debaryomyces hansenii CBS767
  CDS (1)..(1719)
atgatgattgccagaaacctattgaagggcatacacaagcctgtaaacagaagggtttgtataccaaaaattggttcgttaacttcggccaaattctattccactcaatctacggttcaacaatttccagaattgcaagaagctgattttacgcccgaaggtgagccagattatattaagttgatattgacatctcgggtttacgatgtcgtcgatgaaggtggatctcctctcactcatgctgttaacttatcacagaaatgcaataccaatatattcttaaagcgtgaagatttattaccggtattttcattcaagttacgtggagcatataatatgattgcacatttacattctaattcaaagtcaccagtatcaggggtaattgcatgttctgctggtaatcatgcacaaggtgttgctttctctgctagtaaattaaagattcaatctactatagtcatgccaacagctactccttctatcaaatataaaaatgtttctagattaggatcacaagttgttttatacggagacgattttgatagcgcgaagaaagaatgtgatcggttgagttcattgaacggattgaccaatatccctccttttaaccacccatatgtcatcgcaggtcaaggtactatagccctagaaatcaccagacaattgaggttagacaaacttgatgccttatttgttccagtaggtggaggtggattgatagctgggattgctgtttatttaaaaaagattgctccccatgtcaagattattggtgtcgagacttttgatgcagatgcattgtatcagtcattgcaaaaccatcaactgaagacattggatcaggttggagtttttgctgacggtactgctgtcaaggttcttggtgatgaaacttggaagctttgccataaatatgttgatgaagtagttagggttctgaccgatgaattatgtgcagcaattaaagatatttttgaagataccagactgattgttgaaccatctggagcgttatctgttgctgggttgaagagatatcttagtgataattctgaaattgatcataggaataagaattacgttccaattttaagtggagccaatatgaatttcgatagattaagatttgtaagtgaaagagctgtactcggtgaaggtaaggaagtatcattagctgtcaccattcctgagagacctggtgagtttgctatattacagaatataatcgacccaagagctattacagaattttcctatagatttaacaatagtggtcctgcaaatatttttgttagtttcaatgttaccaataaggacaaagaattagctcctattgttgaatctatgaagagtaatgattatgaagttattgatatctcagagaatgagttggcgaagactcatggtcgttatttagtcggcggaaaatctacaacggctaactgcaataagatttctaaagaaaggttattcagattcgaatttcctgaaagaccaggtgctttaacaaaatttttacaaaccttgaagtatgattgggatataaccttgtttcactatagaaatcatggccatgatgttgggaagattttgtgtggttttgtacttccagaaggcacaagcgatgaggacttccaggatttcttgaaaaaaattggttataattttgttgatgaaacagacaatgtcgtatataaaaaattcttacaaagctag

SEQ ID NO: 31520 - protein, 572 aa, Debaryomyces hansenii CBS767
MMIARNLLKGIHKPVNRRVCIPKIGSLTSAKFYSTQSTVQQFPELQEADFTPEGEPDYIKLILTSRVYDVVDEGGSPLTHAVNLSQKCNTNIFLKREDLLPVFSFKLRGAYNMIAHLHSNSKSPVSGVIACSAGNHAQGVAFSASKLKIQSTIVMPTATPSIKYKNVSRLGSQVVLYGDDFDSAKKECDRLSSLNGLTNIPPFNHPYVIAGQGTIALEITRQLRLDKLDALFVPVGGGGLIAGIAVYLKKIAPHVKIIGVETFDADALYQSLQNHQLKTLDQVGVFADGTAVKVLGDETWKLCHKYVDEVVRVLTDELCAAIKDIFEDTRLIVEPSGALSVAGLKRYLSDNSEIDHRNKNYVPILSGANMNFDRLRFVSERAVLGEGKEVSLAVTIPERPGEFAILQNIIDPRAITEFSYRFNNSGPANIFVSFNVTNKDKELAPIVESMKSNDYEVIDISENELAKTHGRYLVGGKSTTANCNKISKERLFRFEFPERPGALTKFLQTLKYDWDITLFHYRNHGHDVGKILCGFVLPEGTSDEDFQDFLKKIGYNFVDETDNVVYKKFLQS

SEQ ID NO: 31521 - DNA, 1809 bp, Oryza sativa (japonica cultivar-group)
  CDS (1)..(1809)
atggcggccgccgccaccgccgcggccgcggccacctccaccttcaccgccgccgtgccgcgcgcgcgcgggcgcaggcatccaacgcgcgtggcggcggcggcggcggcgacggcgtcgtcaccggaggcggcgatggcggcggcggcgccgccgttgccgatgatgcgggtggcgcccgagacgctgcagcggcagagcgggtacctcgtgcggggccgcggggaggaggggattggggagggggaggcggaggcggtgggaggggacgcggcgggagggctcggcgcgatggagtacctgaccagcgtgctctcgtccaaggtgtacgacgtcgccatcgagtcgccgctccagctcgccaccaagctctccgagcgcctcggcgtcaacttgtggatcaagcgcgaggacctgcagcccgtattctcattcaagttgagaggagcatacaatatgatggcaaagctctcgcgtgaacagttggagaggggtgtcatctgctcctctgctgggaaccatgcccagggagtggccctttccgctcaaagactcggttgcgatgctgttattgtcatgcctgtgacaacgcctgaaatcaagtggcgatcggtggagagattgggtgcaacagttgtactcaaaggggactcatatgatgaagctcaatcatatgcaaaacaaagatgcgagcaggaaggccgcacattcatacctccttttgaccatcctgatgttataagtggacaaggaacgattggcatggaaattgttcggcagttgcaaggcccacttcatgccatatttgtacctgtaggaggaggtggattaattgctgggatcgctgcctatgtaaaaagggttcgcccagaggtgaaaataattggagtggagccatcagatgcaaatgcaatggcattgtccttgtgtcatggtcaaagggtcatgctggagcaagttggtgggtttgctgatggtgtggctgtcaaagttgtaggggaggaaacatttcgcttgtgccgggaacttgtagatggtattgttcttgtcagtcgagatgctatttgtgcttcaataaaggatatgtttgaggagaaaagaagcatacttgaacctgctggtgcccttgcgctggcaggagctgaagcttactgcaaatactatggcttgaaaggggaaaatgttgttgcaataactagtggagcaaatatgaactttgatcggctcagattagtaactgagctggctgatgttggtcgaaaacgagaagcagttcttgccacatttttgccagaggagcagggaagcttcaaaaagtttgcagagctggttggccggatgaatattactgaattcaaatacagatacgattgcaatgcaaaagatgcccttgtcctttacagtgttggcatctacactgacgatgaacttaaagcaatggtggaacgtatggaatcttcaaaattgagaactgttgatcttactgacaatgatttggcaaaggatcatctaagatactttattggtggcaggtcagaagtaacagatgaacttgtttaccggttcattttcccagaaaggcctggtgcacttatgaaatttttggatgcattcagcccccgctggaatatcagccttttccattaccgtgcacaggtgtgtgacagatttattattcatcagtttccctgctgtaaagtagtcttgtatgaaaattgcaatctcatgcatctgaaatcgtcattttattgccatctatcctgtacaatattccctttccattttcacttgacaaaaatgtacatctaa

SEQ ID NO: 31522 - protein, 602 aa, Oryza sativa (japonica cultivar-group)
MAAAATAAAAATSTFTAAVPRARGRRHPTRVAAAAAATASSPEAAMAAAAPPLPMMRVAPETLQRQSGYLVRGRGEEGIGEGEAEAVGGDAAGGLGAMEYLTSVLSSKVYDVAIESPLQLATKLSERLGVNLWIKREDLQPVFSFKLRGAYNMMAKLSREQLERGVICSSAGNHAQGVALSAQRLGCDAVIVMPVTTPEIKWRSVERLGATVVLKGDSYDEAQSYAKQRCEQEGRTFIPPFDHPDVISGQGTIGMEIVRQLQGPLHAIFVPVGGGGLIAGIAAYVKRVRPEVKIIGVEPSDANAMALSLCHGQRVMLEQVGGFADGVAVKVVGEETFRLCRELVDGIVLVSRDAICASIKDMFEEKRSILEPAGALALAGAEAYCKYYGLKGENVVAITSGANMNFDRLRLVTELADVGRKREAVLATFLPEEQGSFKKFAELVGRMNITEFKYRYDCNAKDALVLYSVGIYTDDELKAMVERMESSKLRTVDLTDNDLAKDHLRYFIGGRSEVTDELVYRFIFPERPGALMKFLDAFSPRWNISLFHYRAQVCDRFIIHQFPCCKVVLYENCNLMHLKSSFYCHLSCTIFPFHFHLTKMYI

SEQ ID NO: 31523 - DNA, 1020 bp, Oryza sativa (japonica cultivar-group)
  CDS (1)..(1020)
atggggagcagaggtggaagtggcggcgatggcgcagaaagccatggctatgccgcggacatccactccatcagggaggcgcaggctcgcatcgcaccatacgtgcacaagacgcccgttctgtcatcaacatcgatcgatgccatagtggggaagcagctgttcttcaagtgcgagtgcttccagaaggcaggggcgttcaagatccgaggcgcttccaattcgatatttgcgcttgatgatgatgaggcatccaagggcgttgtgacgcatagcagtgggaaccatgctgctgcagtggctcttgctgcaaagctacgcggaatacctgcttacattgtcattccaagaaatgcaccggcatgtaaggttgacaatgttaagcggtacggtggccatattatctggagtgatgtctccattgaatcaagagaatctgttgctaaaagagttcaggaggaaactggtgctattcttgttcacccattcaataataaaaacactatcagtggtcaaggtacagtgtctctcgaacttttggaggaagtccctgaaattgacacaataattgttccaatcagtggtggtggtttaatttctggtgtggcactggctgccaaggccataaacccttcaatacgtattctggcagcagaaccaaagggtgctgatgattctgcccagtccaaggctgctggaaagatcataacattgccttcaaccaacaccattgctgatggacttcgagcttttcttggtgacctgacatggccggtggtgcgcgacttggtggatgatatcattgttgtggatgacaatgccattgtggacgccatgaaaatgtgctacgagatgctgaaggtggctgttgagccgagtggagcaataggcctcgcagccgccctctctgacgagtttaagcaaagctctgcttggcatgagagcagtaagatagggatcattgtttctggaggcaatgttgacctcggtgtcctctgggagtctctctataaacgttga

SEQ ID NO: 31524 - protein, 339 aa, Oryza sativa (japonica cultivar-group) [sequence omitted]

SEQ ID NO: 31525 - DNA, 972 bp, Yarrowia lipolytica CLIB99
  CDS (1)..(972)
atgactggcgaaggaatcacctacaaggatgtcaagcacgcacacaagcgactcgacaaggtcgccgtcaagacacccgtgctgtcgatccagctcgacgacactcaatactttctcaagtgcgagaatatccagcgaaccggagccttcaagttccgtggagcctacaatgccttgtcgcagttctcgtccaagcaaaaggccggtggagtactaacgtactcatctggtaaccatgctcaggccattgcccatgctgctgccatgctcggaatcaaggccaccatcatcatgcccacggatgcccctaaaagcaagttgcaaggtaccaaggacctgggggctacaattgtgccctacgacagatacaaacaggaccgtgacgaggtagccaatgcaattctcacggaacatcccgaaatgacgctcattcctccatatgatcatcccgacatcatcgcaggacaaggtacagtggtcaaggagctgctagaggaaacaggacctctggacgatatctttgtgccgctgggtggaggaggactgctggcaggctcccttctggcagcagaaaaactcgctccaaagtgtaaggtgtggggtgtggagcccgagacaggaaacgacggtaagctgtcacttcaaagaggccaaatcgtgcatattgacaccccggtgacgattgccgacggtgctcagacccagcatctgggagaactcaccttccccatcattcagagacttgtcacggatatcaagacggtcaacgagggagagatgattgctatgacgcaatggtacgcccgaaagatgaagctggtggtggagccaactggatgcatggctttggcagcggcgttctcgtgctgtggaggcacccacaagaagcgagtgggagtcatcatcagtggaggaaacgtggatctcgataagtatgccacctatctaaccactccggtcgttcagcattga

SEQ ID NO: 31526 - protein, 323 aa, Yarrowia lipolytica CLIB99
MTGEGITYKDVKHAHKRLDKVAVKTPVLSIQLDDTQYFLKCENIQRTGAFKFRGAYNALSQFSSKQKAGGVLTYSSGNHAQAIAHAAAMLGIKATIIMPTDAPKSKLQGTKDLGATIVPYDRYKQDRDEVANAILTEHPEMTLIPPYDHPDIIAGQGTVVKELLEETGPLDDIFVPLGGGGLLAGSLLAAEKLAPKCKVWGVEPETGNDGKLSLQRGQIVHIDTPVTIADGAQTQHLGELTFPIIQRLVTDIKTVNEGEMIAMTQWYARKMKLVVEPTGCMALAAAFSCCGGTHKKRVGVIISGGNVDLDKYATYLTTPVVQH

SEQ ID NO: 31527 - DNA, 1590 bp, Yarrowia lipolytica CLIB99
  CDS (1)..(1590)
atgtccgaacccgactatctgaagctcatcttgaagagccgcgtctacgacgtgtgcaaggaaacacctgtgacatctgctcatggtctgagcgagaagctgggctgcaaagtgctgctcaagcgggaagatcttcagccggttttctcgttcaagctgcgaggagcctacaacatgatttcgcagctgagtgacgaggaaaagtggaagggagtgattgcgtgtagcgccggtaaccatgcccaaggagtcgccttttcagccaactatctcaacattccagcgactattgtcatgccgttggccactccttccatcaagcacagtaatgtttctagactaggtggcaaggtggttttgcacggagacgattttgattcggccaaggcccactgcaagcagctgtgtgagaaatatggactcacagatatccctccctttgatcacccccacgtgattgcaggccagggaactattggtatggagattcttcgtcaggcgtcggacaacctgaaggccgtgtttatctgtgttggaggcggcggtctgattgccggagtaggcgcttacatcaagcggatccagcccgatgtcaaaatcattgccgtggagacctatgatgcatgtgctctgaaacagagtctcatcaagggcgaacgggtgactctgcctgaagtcggtctgtttgccgatggagctgctgtcaagctgtgtggcgaggagactttccgactctgtcgcaagtacgttgatggagttgtgcttgtgaacacggacgagatctgcgccgctatcaaagatgtatttgaggccactagatcggtggtggagcctgctggtgctctgtcggtggctggtctcaagaagtactgctccgacccctcggccatttggtggtcacctgagtccgattccgcaaaggccaatggtatccccactaacgttgccatctcagaaaccgacgagtatctgtcaattctctctggagccaacatgaactttgaccggcttcgattcgtggccgaacgagctatgcttggagaaggaaccgaagtcttcatggtcgtcaccatccccgatattcccggagcgtttgaaaagctgcacgagatcattctccccagagctgtcaccgagttctcctacagaaagaagtccactgctgagaacgaagacgctaacatttttgtgtctttttcagtcaaaaaccgacaagaggaaattgcagacgtgctggaaaagctgcaagctgccggtatgagcggagtcgacgtttcagacaacgaactggcaaagacccacgctagatatctcgtgggaggccagccagacgtgcctaatgagagactgttccggttcgagttccctgaacgacccaacgcgctcaaaaacttcctcggaggtgtccagacaaagtggaatatcaccctgttccactacagaaacaacggcagtgatattggaaagattctgacagccttggacgtgccggaaagcgacaatgaggcgctcaaggagtttcttgagaagctcaagtacccctttgtggaggagacagacaatgtggtgtacaagcagtttatgaagtaa

SEQ ID NO: 31528 - protein, 529 aa, Yarrowia lipolytica CLIB99
MSEPDYLKLILKSRVYDVCKETPVTSAHGLSEKLGCKVLLKREDLQPVFSFKLRGAYNMISQLSDEEKWKGVIACSAGNHAQGVAFSANYLNIPATIVMPLATPSIKHSNVSRLGGKVVLHGDDFDSAKAHCKQLCEKYGLTDIPPFDHPHVIAGQGTIGMEILRQASDNLKAVFICVGGGGLIAGVGAYIKRIQPDVKIIAVETYDACALKQSLIKGERVTLPEVGLFADGAAVKLCGEETFRLCRKYVDGVVLVNTDEICAAIKDVFEATRSVVEPAGALSVAGLKKYCSDPSAIWWSPESDSAKANGIPTNVAISETDEYLSILSGANMNFDRLRFVAERAMLGEGTEVFMVVTIPDIPGAFEKLHEIILPRAVTEFSYRKKSTAENEDANIFVSFSVKNRQEEIADVLEKLQAAGMSGVDVSDNELAKTHARYLVGGQPDVPNERLFRFEFPERPNALKNFLGGVQTKWNITLFHYRNNGSDIGKILTALDVPESDNEALKEFLEKLKYPFVEETDNVVYKQFMK

SEQ ID NO: 31529 - DNA, 990 bp, Yarrowia lipolytica CLIB99
  CDS (1)..(990)
atgcgaccaggctacattgaaacaccgctgctgaagaacgacatcttctcgcaccaggtcgggtgcaacgtgtacctgaaaatggagaacttgcagccctcagggtcgttcaaatcccgaggcatgacccaggtcatctccgatgcgctggactcagacccccaggcttctctagacactctccacgtgtgttccagctctggaggcaacgcagggctcgccgcagcagtcacctcgcgactcaatggtgtcgcgtgcacggtggttgtgccggaatcgactaaacctcgaatggtggagaaactgagagctgcaggagcagaagtgattgtgcacggaaaacactggtcagaagccaacgactttctgcaaaaggaagagatgccgcggctcgaaaagacgggaaaaacgccaatctactgccatccctttgacgctccagcggtgtggaagggaaactcgactctcatcgacgaaatcatcaagcagggaatcaccccagacgccgtcgtgtgcagcgtgggaggcggaggactgttcaacggagtagtcgagggccttaaacgacacaagctcaactgccccgtgattgtagtggaaacaaacggtgctgatgctctgagccggagtctacagaagggcgagcaggtcactctacctggaattacgtcaattgccacttctctgggagccgttcgagtcgctgacaagacgtttgaaaacgcccagacataccctactgtgtctgcagtcgtttcagatgacgacgcagtatcagctctggtggagtacgctgagaccaagcagatcatcgtggaacccgcctgtggagcttccctcgctgttctgcctgctctaaaggatctggttgatttgaaacctgattctaacgttgttgttgttctctgtggaggctcggctactggcatttctgatatcgcgcagttcaagaaagacttggaagcaaaggagacaactgaagagaagtag

SEQ ID NO: 31530 - protein, 329 aa, Yarrowia lipolytica CLIB99
MRPGYIETPLLKNDIFSHQVGCNVYLKMENLQPSGSFKSRGMTQVISDALDSDPQASLDTLHVCSSSGGNAGLAAAVTSRLNGVACTVVVPESTKPRMVEKLRAAGAEVIVHGKHWSEANDFLQKEEMPRLEKTGKTPIYCHPFDAPAVWKGNSTLIDEIIKQGITPDAVVCSVGGGGLFNGVVEGLKRHKLNCPVIVVETNGADALSRSLQKGEQVTLPGITSIATSLGAVRVADKTFENAQTYPTVSAVVSDDDAVSALVEYAETKQIIVEPACGASLAVLPALKDLVDLKPDSNVVVVLCGGSATGISDIAQFKKDLEAKETTEEK

SEQ ID NO: 31531 - DNA, 1179 bp, Canis familiaris
  CDS (1)..(1179)
atgcccactcacctggtggttcgagagttcagtgagaccccatacagcaacccttggcaggggatcgggcacaaacagacgctcaggcaaccgatgacgcctggagagcccctgcacgtgaagacccccatccgtgacagcatgtcgctgtccaaagtggcaggcaccagcgtctacctcaagatggacagtgcccaaccttcaggctccttcaagatccggggcattggacacctctgcaagatgtgggctgagcaaggctgtgaacatttcgtctgctcctcggcgggcaatgcaggcatggcagccgcctatgctgccaggaagctgggcatccctgccaccatcgttgtgcccagcaccacccctgccctcaccattgagcggctcaagaatgagggtgccatagtcaaggtggtgggtgagatgttggatgaggccttcgagctggccaaggccctggccaagaacaaccctggctgggtgtacattcctccctttgacgaccccctcatctgggaaggccacacttccatcgtgaaggagctgaaggagaccctgagtgcaaagccaggggccatcgcgctgtcagtgggcggtgggggcctgctgtgcggagtggtccaggggctgcaagaggtgggctggggggacgtgcctgtcatcgccatggagaccgccggagcccacagcttccacgctgccaccactgccggcaagctggtctccctgtcccaggttaccagcgtggccaaggccctgtgcgtgaagactgtgggggctcaagccctgaagctgtttcaggaacaccccatcttctctgaagtcatctcggaccaggaggctgtggctgccattgagaagttcgtggatgacgagaagatcctggtggagcccgcctgcggggcagccctggccgccgtgtacagccgcgtggtgcagaagctgcaaggggaggggaagctccaggccccgctgtcctccctcgtggtcattgtctgcgggggcagcaacatcagtctgagccagctgcgggcccctcaaggaacagctgggcatgaatgggctgcccaacctgtggcccggaccagccggttccctcctcgttcccatgagcccaccctgccaacaggccgcagctccgaggcggagccgggtcggcagccagcaaagctgtga

SEQ ID NO: 31532 - protein, 392 aa, Canis familiaris
MPTHLVVREFSETPYSNPWQGIGHKQTLRQPMTPGEPLHVKTPIRDSMSLSKVAGTSVYLKMDSAQPSGSFKIRGIGHLCKMWAEQGCEHFVCSSAGNAGMAAAYAARKLGIPATIVVPSTTPALTIERLKNEGAIVKVVGEMLDEAFELAKALAKNNPGWVYIPPFDDPLIWEGHTSIVKELKETLSAKPGAIALSVGGGGLLCGVVQGLQEVGWGDVPVIAMETAGAHSFHAATTAGKLVSLSQVTSVAKALCVKTVGAQALKLFQEHPIFSEVISDQEAVAAIEKFVDDEKILVEPACGAALAAVYSRVVQKLQGEGKLQAPLSSLVVIVCGGSNISLSQLRAPQGTAGHEWAAQPVARTSRFPPRSHEPTLPTGRSSEAEPGRQPAKL

SEQ ID NO: 31533 - DNA, 936 bp, Thermus thermophilus HB27
  CDS (1)..(936): transl_table=11
atgccttccctccaagacctctacgccgccttccgccgcatcgccccccacacccaccgcacccccctcctcacctcccgcctcctggacgggcttttgggaaagcgcctcctcctcaaggccgagcacctgcagaaaacggggagcttcaaggcccggggagcgctttccaaggccctcgccctggaaaaccccaaggggctcctcgccgtctccagcggcaaccacgcccagggggtggcctacgccgcccaggtgctcggggtgaaggccctggtggtcatgcccgaggacgcgagcccctacaagaaggcctgcgcccgggcctacggggccgaggtggtggaccggggggtgacggcggagaaccgggaggaggtggcccgggcccttcaggaggaaacgggctacgccctgatccacccctttgacgaccccttggttatcgccgggcaagggacggcggggcttgagcttctggcccaggcggggcggatgggggtcttccccgaggccgtcctcgcccccgtggggggcggggggctcctcgcgggcctggccacggcggtgaaggccctctcccccacgaccctcctcctcggggtggagcccgaggtcgcggacgacgccaggaggagcctggaggcgggaaggcttttccgcttggaagcgccccccaggacccgggcggacggggtgcggacgctaagcctgggggagcacaccttccccatcctcaaggagaaggcggacgggatccttgtggtgagcgaggaggcgatcctcgaggcggagcgcctcctcttcacccgcaccaagcaggtggtggagcccacgggggcccttcccctggccgcggtgctggagcacggggcgaggcttccccaaaccctcgccctcctcctctccgggggcaaccgggacttctctccctag

SEQ ID NO: 31534 - protein, 311 aa, Thermus thermophilus HB27
MPSLQDLYAAFRRIAPHTHRTPLLTSRLLDGLLGKRLLLKAEHLQKTGSFKARGALSKALALENPKGLLAVSSGNHAQGVAYAAQVLGVKALVVMPEDASPYKKACARAYGAEVVDRGVTAENREEVARALQEETGYALIHPFDDPLVIAGQGTAGLELLAQAGRMGVFPEAVLAPVGGGGLLAGLATAVKALSPTTLLLGVEPEVADDARRSLEAGRLFRLEAPPRTRADGVRTLSLGEHTFPILKEKADGILVVSEEAILEAERLLFTRTKQVVEPTGALPLAAVLEHGARLPQTLALLLSGGNRDFSP

SEQ ID NO: 31535 - DNA, 1269 bp, Listeria monocytogenes str. 4b F2365
  CDS (1)..(1269): transl_table=11
atggaattagttgatttattagtaacagaagaagatgtcgaaaaggcctatgaagtcttaaaggcggtcgtcaaacatacgccactagaatatgatttttatctttcggaaaaatatcattgcaatgtctatctgaaacgcgaagatttgcaaagagtgcgttcttttaaattacgtggtgctttttatgctatttctagattatcagcggaacaattggaaaaaggtgtggtatgtgcaagtgcgggaaaccatgcgcaaggagttgcatatacgtgcaaacgaatgaccgtcccagctacgatttttatgccaacgactacgccgcaacaaaaagtatcacaagtaaaatttttcggtggtagtaatgtcgaagtggttttagttggcgatacgtttgatgcttctgcaactgccgcgaaagaatttgctgcaacgcatggccaaactttcatccctccgtttgatgatcctgatattatcgctggccaaggctctcttgctgtggagatggtgaaagatttaaataaagcacatgagcaagcagattatgtttttgcaggaatcggtggtggtggcttaattagcggtgttgcaacgtatctcaaagcaaagagcccgattacaaaaatcatcggggtagaacctgatggcgcgccttcaatgacagcagctttaaaacaaaatcaagtcgtaacactagataaaatcgataaatttgttgatggcgctgcggtaaaagaagttggtggcttaacgttccaacatgcgaaagtattagttgatgaagtgacaaccgtctctgagggagctgtttgttctacgattttggatatgtatacgaagcaagcaattgttgcagaacctgctggagcactatccgttgccgcacttgaaatttaccgtgaagagattaaagacaagaccgttgtctgtattgtaagtggcggaaacaacgacatcaaccggatgcaagaaattgaagagcgttccctcttacacgaaggattaaaacattattttatcgtcaatttctcgcagcgtcctggggctttgaaagaatttgttaacgatgtgctcggtccacatgacgatatcaccaaattcgaatatacgaaaaaagtgaatcgaggtaatgggcctgtaattatcggtgttttgttgcaagataaaaatgattatgaaggattgcttgagcgggttgctgcttttgacccgagctatattccgattaatgataatcaaaccctatacacattacttgtataa

SEQ ID NO: 31536 - protein, 422 aa, Listeria monocytogenes str. 4b F2365
MELVDLLVTEEDVEKAYEVLKAVVKHTPLEYDFYLSEKYHCNVYLKREDLQRVRSFKLRGAFYAISRLSAEQLEKGVVCASAGNHAQGVAYTCKRMTVPATIFMPTTTPQQKVSQVKFFGGSNVEVVLVGDTFDASATAAKEFAATHGQTFIPPFDDPDIIAGQGSLAVEMVKDLNKAHEQADYVFAGIGGGGLISGVATYLKAKSPITKIIGVEPDGAPSMTAALKQNQVVTLDKIDKFVDGAAVKEVGGLTFQHAKVLVDEVTTVSEGAVCSTILDMYTKQAIVAEPAGALSVAALEIYREEIKDKTVVCIVSGGNNDINRMQEIEERSLLHEGLKHYFIVNFSQRPGALKEFVNDVLGPHDDITKFEYTKKVNRGNGPVIIGVLLQDKNDYEGLLERVAAFDPSYIPINDNQTLYTLLV

SEQ ID NO: 31537 - DNA, 1206 bp, Picrophilus torridus DSM 9790
  CDS (1)..(1206): transl_table=11
atggaattcgatgatatattatatgcaaaatcagttgtatcaaggtatctgcacaggacgcctgtttttcattcaaagaccttcagcgacatgttccacggagatatattttttaaaatggagaatttccagaagaccggctcatttaaatcaaggggtgcagttacaaagttctcaaggttaagcgatgaggaactaaaaaacggtgtcataacggcaagcgctggaaaccatgcgcagggcgttgcatatgccgcatcgatctttaaaacagatgcaaagatagtaatgcctgaaaacacaacaccggcaaaggtaaacgctgttgaggcatacggcggccatgtgatactaaccgggagatcatacgatgaatcacatagccatgcattaaaaatagcaatggatgaaaatagaacatttatagaggcatacaatgatgaggccattatagcaggccagggtacaatagcacttgagctctttgaggatcttggaaatcttgatcagataatagtgcccattgggggtggcggtttaatatccgggatagcctttgccgcaaagcacataaatccaaatgtaaaaatcataggggtcgaatcagaaaaggcaaatgcaatgatgctatcattaagggaaaacagaatagttccatacacaagctctgatacaatagccgatggcatagccgtgaaatatcccggggatataacatttgacattgtaaaaaactatgttgacgatgttgttacagtaaatgatgaaagcatagcctattcattgtttaaactgcttgagcgtgaaaaggttcttgttgagccatccggggcagttggtcttgccgcactctacgagggtaagatagactcagaatcaaagaaaactgcaataatactatcaggcggaaacataaattttctgctgctatcaaaaattatatacaaatccatggagatggagaataaattaataaggcttgagttcaaccttcctgacaggccgggaaccatggtaaaaatagtaaacgcaatatcaagcgttggcgcaaatatataccatgccgaggtcgataatttaaaaaagaacacgcctataggctatcaaaatcttacatttaccgtaaacatagttgacgcaaatagaatagaaaaactattgaacgcactggactcccttggatataaatataatataataaattaa

SEQ ID NO: 31538 - protein, 401 aa, Picrophilus torridus DSM 9790
MEFDDILYAKSVVSRYLHRTPVFHSKTFSDMFHGDIFFKMENFQKTGSFKSRGAVTKFSRLSDEELKNGVITASAGNHAQGVAYAASIFKTDAKIVMPENTTPAKVNAVEAYGGHVILTGRSYDESHSHALKIAMDENRTFIEAYNDEAIIAGQGTIALELFEDLGNLDQIIVPIGGGGLISGIAFAAKHINPNVKIIGVESEKANAMMLSLRENRIVPYTSSDTIADGIAVKYPGDITFDIVKNYVDDVVTVNDESIAYSLFKLLEREKVLVEPSGAVGLAALYEGKIDSESKKTAIILSGGNINFLLLSKIIYKSMEMENKLIRLEFNLPDRPGTMVKIVNAISSVGANIYHAEVDNLKKNTPIGYQNLTFTVNIVDANRIEKLLNALDSLGYKYNIIN

SEQ ID NO: 31539 - DNA, 1149 bp, Picrophilus torridus DSM 9790
  CDS (1)..(1149): transl_table=11
atgagtgtcttaaaatgcccggtatgcgggaacgaatatgatataaacagaagcaattatctctgcgataaatgcggaaacatacttgaggtaattcatgaaaatgattttgtaaaagaaaattttaggggtgtctggaggtacaaaagcattatacatccgggcatagataaaaggctaattgttacaaggggtgagggcaatacctttgtgtacggtcatgaaaatatatcatcatattcaggaataaaaaatataaaactgaagcatgagggtgaaaatccaacaggttcatttaaggatcgtggcatgacagttgcagtatccgaggccatgaggctcggatataaaaagaccctatgcgcatcaaccggaaatacatccgcatctgctgcaagctattctgcaatggcaggcattgaaaacttcgtcctgataccagatggtaaaatagcggtaaacaagcttgcccaggcctacgtttatggttcaaaaataataaaggttcctggcaatttcgacgatgcaatggggaagctaatgaacataatatctaaaaataataatttttatgttttaaattcaataaatccctggcgtgttgagggtcaaaaaaccattgcctttgagatacttgaggaaaatgagccggactttatagcactacctgcaggaaaccttggaaacacaacggcaataggcaaggcaataaaggaatttcatgatcttggtttaataaaaaagataccaagaatcgtttcagttcaggccgagggcgcaagcccattctataaccttgtcaataaccatgagggcagtcttaatccggtaaatcctgaaacaattgcatcggcaataagaataggaaaccctgtcaactggaaaaaggcattaaaatacataaaattcacaaaaggtatagtcgagaaggttacagatgacgagatactaaatgcaaaaagaattatagacagatccggaataggctgtgaaacggcctctgccgcatcacttgcaggtgtaaaaaagctctcagatgcaggtataatagacagaaacgatgaggttttttgtatattaaccggaaacgttttaaaggatatacatatagaaaatataaattccatggatattaatattttatcttaa

SEQ ID NO: 31540 - protein, 382 aa, Picrophilus torridus DSM 9790
MSVLKCPVCGNEYDINRSNYLCDKCGNILEVIHENDFVKENFRGVWRYKSIIHPGIDKRLIVTRGEGNTFVYGHENISSYSGIKNIKLKHEGENPTGSFKDRGMTVAVSEAMRLGYKKTLCASTGNTSASAASYSAMAGIENFVLIPDGKIAVNKLAQAYVYGSKIIKVPGNFDDAMGKLMNIISKNNNFYVLNSINPWRVEGQKTIAFEILEENEPDFIALPAGNLGNTTAIGKAIKEFHDLGLIKKIPRIVSVQAEGASPFYNLVNNHEGSLNPVNPETIASAIRIGNPVNWKKALKYIKFTKGIVEKVTDDEILNAKRIIDRSGIGCETASAASLAGVKKLSDAGIIDRNDEVFCILTGNVLKDIHIENINSMDINILS

SEQ ID NO: 31541 - DNA, 1266 bp, Bartonella henselae str. Houston-1
  CDS (1)..(1266): transl_table=11
atgagtaaatttattcaagatgtaaacaaggctatggtggctttgcataatgtatttgctgaaacacctcttcaaagaaatgattttcttagtcaaaaatatgatgcagaaatttatttgaaacgtgaagatttaactccggtgcgatcttataaaattcgcggtgcttttaattttgtttcagaaatgcttagtaagatatctcaaaatgcagcatttgtttgtgcgtcagcggggaatcacgcgcaaggggtttcatttgtttgtcgctattttaaacgtaaaggcgtgatttttatgcctgtgacgactccgcaacagaaaattgataagacgcgcgtttttggcaaagagtttgttgatatccgtttaattggtgaaacgtttgaccaatgttatgcggcagcacaatcttttgctacggagagtggtggtgttatggcaccgccttttgacgatactcgcattattacggggcaggcgacagttttgtgtgaggctgttttgcaatggaaaaaactcaatggtgaaagcgagccagatttgattcttgttcctgtaggtggaggtggtttggccagtggtgtgagcaagtttttacatgaatatggttggaaaaccgagcttcgctttgttgagccgaagagagctgcaagcttgttcgcttgtttgaagagtggaaaacgtgtcaaacttgaaaatatcgatacatttgtagatggagctgctgtagcggaaattggtgcattaaattacacaatgctgaagaatttttcaccagattctgttattacagttcctgagaaccgtgtgtgctctacaatggttgaaatgctcaatgttgaaggtgtggtccttgaaccagctggtgctttatcgattgatgctcttaatagtcttcctcctcaagagttaaaaggcaaaaaaattcttcttgttatttcaggtggtaattttgattttgagcgtttgccagatattaaagaacgttctctccgttttcagggattgagaaaatattttatttttagttttccgcaacatcctggtgcgttgcgtagttttcttgctcaactttctcccgatgatgatatcgtacgttttgaatatcttaagaaatcatctagaagttttggctctgtgttgattgcaattgagacaaaaaaatatgataatttttgtcttttagagaaaaaatttcaagagttaggttggcgctatcgtgatattaccgatgatcaaacgttatttgattttgttatctga

SEQ ID NO: 31542 - protein, 421 aa, Bartonella henselae str. Houston-1
MSKFIQDVNKAMVALHNVFAETPLQRNDFLSQKYDAEIYLKREDLTPVRSYKIRGAFNFVSEMLSKISQNAAFVCASAGNHAQGVSFVCRYFKRKGVIFMPVTTPQQKIDKTRVFGKEFVDIRLIGETFDQCYAAAQSFATESGGVMAPPFDDTRIITGQATVLCEAVLQWKKLNGESEPDLILVPVGGGGLASGVSKFLHEYGWKTELRFVEPKRAASLFACLKSGKRVKLENIDTFVDGAAVAEIGALNYTMLKNFSPDSVITVPENRVCSTMVEMLNVEGVVLEPAGALSIDALNSLPPQELKGKKILLVISGGNFDFERLPDIKERSLRFQGLRKYFIFSFPQHPGALRSFLAQLSPDDDIVRFEYLKKSSRSFGSVLIAIETKKYDNFCLLEKKFQELGWRYRDITDDQTLFDFVI

SEQ ID NO: 31543 - DNA, 1539 bp, Acinetobacter sp. ADP1
  CDS (1)..(1539): transl_table=11
atgctgtctcgtttggttcgacaaattttacaagcaacggtatatgacgttgcaatcgaaactccactcgaagcagcgccacgaattagtgaaaaactaaacaacaatattcgctttaaacgcgaagaccttcaacccgttttctctttcaaactacgcggtgcttataaccgtattagtcaattaccgaaatctcagttggaacgtggcgttattactgcttcagcaggtaaccatgctcaaggtgtggctttatctggtcaaaagctggggattcgcgccattatcgtgatgccaaaaacaacgccagatattaaggtacaagcagttaaacgtttgggtggcgaagtggttttgcatggtgattcttttgatgttgccaataaatacgcgattcagcgtgcgcaagatgaaggtatgacttttattccgccatatgatgatgaattggtgatggcaggtcagggcacgattgccaatgaaattctgcgtcagtggcgtgatgttgaatatgtatttgttgccgtaggtggtggtggactcattgcaggcgttgcagcgtatttgggtgatgttgctcctcacgtaaaaatcattccagtcgaatatgatgaatctgcttgcctgaaagccgcattcgaacacaatgaacgtgttattttgccacaagtcggtttatttgcagatggtactgcggttgcacaaattggtgaaaaaccctttgaagtaattcagcttcaaaaatcagataactctggtccaattgttgaacgcgatgtgatcttggtcaataccgatgaaatttgtgctgccatcaaagacacttttgatgaatgccgtagcattgtagaaccatctggtgcaatggcgctggcaggtatcaaaaaatatatcgaacaacatcaaattacagataaaaatatcgtttcgattgtttgcggtgcaaacatgaattttgaccgattgcgttatattgctgaacgtacagaacttggcgaacgtaaagaggccatttttgctgtcaccattcctgaacaaaaaggcgcctttttaaatttctgccgtgcattacatggacgcaatattacagaatttaactatcgtgcaagcgatagcgatgatgctcaagttttcgtcggaatcagtttaaaatctggcgaaaaagaacgtcatgacattcacgagttacttaaaagccaatataatgttgatgatttatccgatgacgaagttgctaagctgcatattcgctatcttatcggtggtcatgccaatatcgaaaatgaacgcttgtttcgtgttgaatttccagagcgacccggtgcacttctaaccttccttgaacgccttggacctagtcataatattagcctgttccattatcgtaatcacggtgctgccgaaggacgtgtattggtaggtttacaggctaccgatacgcaagaaaacccagatgtactaattgaaacattggaaaatattacttatccatatgaagaaattacacacaatgtgggttataaacgctttttgcagtaa

SEQ ID NO: 31544 - protein, 512 aa, Acinetobacter sp. ADP1
MLSRLVRQILQATVYDVAIETPLEAAPRISEKLNNNIRFKREDLQPVFSFKLRGAYNRISQLPKSQLERGVITASAGNHAQGVALSGQKLGIRAIIVMPKTTPDIKVQAVKRLGGEVVLHGDSFDVANKYAIQRAQDEGMTFIPPYDDELVMAGQGTIANEILRQWRDVEYVFVAVGGGGLIAGVAAYLGDVAPHVKIIPVEYDESACLKAAFEHNERVILPQVGLFADGTAVAQIGEKPFEVIQLQKSDNSGPIVERDVILVNTDEICAAIKDTFDECRSIVEPSGAMALAGIKKYIEQHQITDKNIVSIVCGANMNFDRLRYIAERTELGERKEAIFAVTIPEQKGAFLNFCRALHGRNITEFNYRASDSDDAQVFVGISLKSGEKERHDIHELLKSQYNVDDLSDDEVAKLHIRYLIGGHANIENERLFRVEFPERPGALLTFLERLGPSHNISLFHYRNHGAAEGRVLVGLQATDTQENPDVLIETLENITYPYEEITHNVGYKRFLQ

SEQ ID NO: 31545 - DNA, 1005 bp, Erwinia carotovora subsp. atroseptica SCRI1043
  CDS (1)..(1005)
atgacaagcaaataccaaagagcaaccgactctgtaacgttgaaagatatttacacggcatctcagcagattaaaacgacgatacgcagaacgccgctagaccgctcgcaggaattatccgctcttgttggtgcagaaattcggctcaagatggaaaacctccaacagaccggtagcttcaagttacgtggcgcggcaaacgttcttgccaatctgggtgcagaacaacgccgtattggcgtcatcgccccaacggcaggaaatcacggattagggctcgcctatgccggacaagtggcgggcgtccccgtaaccatctttttgccacgctcagcagacccgatgaaagtcgcggccatgaaaggttgtggtgcccacattacgttttttgatgacatcgaagaagcgaggcaggcggcaatagcagcagcgcaacagtctagtgctaccttcgtttcagcctacgataatccgcatatgattgctggtggcggcaccgtcggccttgagattatggaagactggatggatgcagagataatcctggtgaatatcggcggcggcgggcttatttcggggattgcgacggcagtaaaagcaatcaaccccgcgatcgaagtatgggggatacaaagtgaagtcagcccgacatttgcccgttggaaagacgccggtgaaacgcttcccgtcgaactgactccctccatcgctgagggcgttagcggctatattgagcccagtgcgatgacctggccgctggttcgtgaccgtgtcgatcgcgtgctcacggtatcagaagttgaaatcaaagccgcaatgctgtcaatgctcgaacttcaccgtcatgttgtcgaaccttcaggggtgccagccgtcgcgggagccattcgctacgcgaaggagattgggggacgtaaaaccgtctgcgttgtcaccggtaggaacatttcgagttcacgttatctcacgctgcttaatgaggcgacggccggtgtagataagtag

SEQ ID NO: 31546 - protein, 334 aa, Erwinia carotovora subsp. atroseptica SCRI1043
MTSKYQRATDSVTLKDIYTASQQIKTTIRRTPLDRSQELSALVGAEIRLKMENLQQTGSFKLRGAANVLANLGAEQRRIGVIAPTAGNHGLGLAYAGQVAGVPVTIFLPRSADPMKVAAMKGCGAHITFFDDIEEARQAAIAAAQQSSATFVSAYDNPHMIAGGGTVGLEIMEDWMDAEIILVNIGGGGLISGIATAVKAINPAIEVWGIQSEVSPTFARWKDAGETLPVELTPSIAEGVSGYIEPSAMTWPLVRDRVDRVLTVSEVEIKAAMLSMLELHRHVVEPSGVPAVAGAIRYAKEIGGRKTVCVVTGRNISSSRYLTLLNEATAGVDK

SEQ ID NO: 31547 - DNA, 975 bp, Erwinia carotovora subsp. atroseptica SCRI1043
  CDS (1)..(975)
atgagcgacttacgcctcccaaccttcgacgatgtggtagccgcagcggaacgcattgatggctatgccaataaaacgccagtgatgacatcacgcacggtcaatgatgccttcggcgcagaggttttcttcaagtgtgaaaactttcagcgtatgggcgcattcaagttccgcggagccatgaacgcgctgttgcagttctcagatgagcagaaagccgcaggcgtggtcaccttttcttccggtaaccatgcgcaggccattgccctttccgccaaattacttggcattccggcaacgatcgttatgccgcacgatgcacccgcagcaaaggtcgctgcgacacgtggctatggcggaaacgtggtggaatataatcgatataccgaagatcgtgagcagatcggtagagatctggctgaaaagcagggtctgacgctcattcccccttatgaccacccgcacgtcattgcaggacaaggtacggctgcgaaagagctgttggaagaaaccggtgagctggacgccctgttcgtctgcttgggcggcggtggattgttggcaggttccgcactgtccgcgcgtcagctgtctccacgctgtaaaatttatggcgtcgaacctctcgcgggcaacgacgggcagcaatctttccgcagcggcaatattgtgcatatcgatacgcccaaaaccatcgccgatggcgcacagactcaacatctgggcaactataccttcccgctgattcgccagaacgtcgacgatattctgaccgtgacggatgacgacctgattgacgcaatgcggttttacgctgagcgcatgaagatcgtcgttgagccgacggggtgcctcagttttgcggcggcgcgtaatctcagggaatcactacacggcaaacgtatcggtatcattatcagcggcgggaatgtcgatatcagccgctacggcgcatttctgaccggcagcgtttga

SEQ ID NO: 31548 - protein, 324 aa, Erwinia carotovora subsp. atroseptica SCRI1043
MSDLRLPTFDDVVAAAERIDGYANKTPVMTSRTVNDAFGAEVFFKCENFQRMGAFKFRGAMNALLQFSDEQKAAGVVTFSSGNHAQAIALSAKLLGIPATIVMPHDAPAAKVAATRGYGGNVVEYNRYTEDREQIGRDLAEKQGLTLIPPYDHPHVIAGQGTAAKELLEETGELDALFVCLGGGGLLAGSALSARQLSPRCKIYGVEPLAGNDGQQSFRSGNIVHIDTPKTIADGAQTQHLGNYTFPLIRQNVDDILTVTDDDLIDAMRFYAERMKIVVEPTGCLSFAAARNLRESLHGKRIGIIISGGNVDISRYGAFLTGSV

SEQ ID NO: 31549 - DNA, 1551 bp, Erwinia carotovora subsp. atroseptica SCRI1043
  CDS (1)..(1551)
atgctgatggctgtgtcacaacctcttcctgccgcgccgggaggcgcggagtacctgcgcgcgatcttgcgctcgccagtgtatgaaatcacgcaggtcacgccgctggagaagatggataagctctcttcgcggctgggtaatgtcattctagtaaaacgtgaagaccgacacgcggtgcacagctttaagctgcgtggcgcgtacgcaatgatggcgggtctgagcgatgaacagaaatcgcacggcgtggtgacggcgtcagccggtaaccatgcgcaaggtgttgcactctcctccagcaagctggggattaaatcgctgattgtgatgccggtggcgacagccgacatcaaggtggatgcggtgcgtggttttggcggagaagtgctgctacacggcgctaactttgatgaagccaaagccaaggcgattgagctgtcagagcaacaacatatgacttttctgccgccgttcgatcaccctgcggtgattgccgggcagggcacgctggcgatggagttgttacagcaggatgcgcatctggatcgcgtgtttgtgccagttggtggtggtggcttggcggcaggcgttgccgtactgattaaacagctgatgccgcagattcaggtgatcggcgtggaagcggaagattccgcctgtctgcgcgcggcgctggatgctgggcaaccagtcgatctgccgcgtgtcgggctgtttgccgaaggcgtggcggtgaagcgcatcggcgatgaaacgtttcgcctatgtcgggaatatctggatgacgtgattaccgtcgacagcgatgccatctgtgcggcagtgaaagatctgttcgaagatgtccgcgcgattgctgaaccgtctggtgcgctggcgttggcggggatgaaaaagtacatccaacagcatcagattcagggtgagcgcttggcgcatgttctgtccggtgcgaacgttaacttccacggattacgttacgtttccgaacgctgcgagctgggcgaacagcgcgaagccttgctggctgtgacgatccctgagcaacagggaagcttcctgaagttttgccaactgttgggtggtcgttctgtcacggagttcaactatcgctacgcggatgccaaagacgcctgcatttttgtcggtgtgcgcttgacgcgcggctatgcggaacggcaggagatcatcgctgagctttccgcagacggttatgaagtagtggatttgtccgatgatgaaatggcgaagctacacgttcgctatatggtcggcggacgtccttccaaaccgttgcaggaacgtctgtacagctttgaattcccagagtcgccgggtgcattactgaaattcctgcatacgctgggggcgcactggaatatttctctattccattaccgcagccacggcacggattttggccgcgttctggctgggttcgagctggaggcgggcgatcgggagtttgagcagcacttgctggcgctgggctatgaatgccatgacgaaaccaataacccggcattccgcttctttctagcgggttaa

SEQ ID NO: 31550 - protein, 516 aa, Erwinia carotovora subsp. atroseptica SCRI1043
MLMAVSQPLPAAPGGAEYLRAILRSPVYEITQVTPLEKMDKLSSRLGNVILVKREDRHAVHSFKLRGAYAMMAGLSDEQKSHGVVTASAGNHAQGVALSSSKLGIKSLIVMPVATADIKVDAVRGFGGEVLLHGANFDEAKAKAIELSEQQHMTFLPPFDHPAVIAGQGTLAMELLQQDAHLDRVFVPVGGGGLAAGVAVLIKQLMPQIQVIGVEAEDSACLRAALDAGQPVDLPRVGLFAEGVAVKRIGDETFRLCREYLDDVITVDSDAICAAVKDLFEDVRAIAEPSGALALAGMKKYIQQHQIQGERLAHVLSGANVNFHGLRYVSERCELGEQREALLAVTIPEQQGSFLKFCQLLGGRSVTEFNYRYADAKDACIFVGVRLTRGYAERQEIIAELSADGYEVVDLSDDEMAKLHVRYMVGGRPSKPLQERLYSFEFPESPGALLKFLHTLGAHWNISLFHYRSHGTDFGRVLAGFELEAGDREFEQHLLALGYECHDETNNPAFRFFLAG

SEQ ID NO: 31551 - DNA, 1251 bp, Leifsonia xyli subsp. xyli str. CTCB07
  CDS (1)..(1251): transl_table=11
gtgaccgatcccacgcgcaccccgttcgccggccccagcctggccgctttcgaggctgcgcgcgcgatcgtggcgacggtggcccagccgaccccgctggagagctcccgctatctcgcgggcgtgctcggtgcgcccgtcctgctgaagtgcgagaatctgcaacgcaccggctcctacaagatccgtggcgcctacaaccgcatgtccaagcttaccgccgaggaacgtaatcgtggggtcgtcgccgcctccgccggaaaccacgcacagggcgtggccttcgcggcccgggagctcggcatccacgccacgatcttcatgccggtcggtgtggccatccccaagttccaggcgacgcgggcgtacggcgctgatgtggtcctgagcggcagcattgtggatgaggcgctgcgcgcggcggcggatttcgcggccgagaccggcgctgtgctcatcccgccgttcgaccacccggacgtggtggccggtcagggcacgctcggcctcgagatcctcgacgaggtccccgacgtgagcacgatcgtcgtcccgatcggtggtggcggactcatctccggcatcgccagcgcggtcaagcagcgttccgcacgcgagggccgcacggtgcgcgtgatcggcgtgcaggccgccaacgccgccgcctacccgccctcactcgaagccggcgcccccaccgagatctccctcgtcgcgaccatcgccgacggcatcgccgtcagccgcccgggcgcgctcaacttccagatcgttcaggacgcggtggatgccgtggtcacggtcaccgaggacgacatcgcccgagccctcctcgtcctcctcgaacgcgcgaagctcgtggtcgagcccgccggggccgcggccgtcgccgccgtcctcgccgggcacatccccgccgatggcacgacggtcgtcatcctctccggtggcaacatcgacccgttgctgatgcagcgtgtgatcagccacggtctcgccgcctcagaccgctacctcaagctgtcgatcatgctgcccgaccggccgggccagctggctcgcatcgcggagatcctcgcgggcgtcaacgcgaatgtggtcgaagtgctgcacacccggcatggccgcgggctgcagctcagtcaggtcgaactcgatgtctccgtggagacccgcggctccgagcaccgtcagcaggtcatctccgttctccgcgccgcgggatacgatccggtcctcgaagaggactga

SEQ ID NO: 31552 - protein, 416 aa, Leifsonia xyli subsp. xyli str. CTCB07
MTDPTRTPFAGPSLAAFEAARAIVATVAQPTPLESSRYLAGVLGAPVLLKCENLQRTGSYKIRGAYNRMSKLTAEERNRGVVAASAGNHAQGVAFAARELGIHATIFMPVGVAIPKFQATRAYGADVVLSGSIVDEALRAAADFAAETGAVLIPPFDHPDVVAGQGTLGLEILDEVPDVSTIVVPIGGGGLISGIASAVKQRSAREGRTVRVIGVQAANAAAYPPSLEAGAPTEISLVATIADGIAVSRPGALNFQIVQDAVDAVVTVTEDDIARALLVLLERAKLVVEPAGAAAVAAVLAGHIPADGTTVVILSGGNIDPLLMQRVISHGLAASDRYLKLSIMLPDRPGQLARIAEILAGVNANVVEVLHTRHGRGLQLSQVELDVSVETRGSEHRQQVISVLRAAGYDPVLEED

SEQ ID NO: 31553 - DNA, 1506 bp, Desulfotalea psychrophila LSv54
  CDS (1)..(1506): transl_table=11
atgaaaaaaataattcgtgacatcctcacctcccgggtctatgaggcagcggtggagacaccacttgaacaggcagtacaactctcccaccaactcggaaacaaaatccttctaaaaagagaagatcaacaaccggtattctcctttaaaatacgcggcgcttacaataaaattgcccatctgagcgaagaggagcgagcacggggggttattaccgcctcggcgggaaatcatgcccaaggcgtggcctattctgccaagaaactcggcatctcagccctgatcgttatgcccaccaccacccctaagatcaaggtagatgcagttcgccgtatgggcggccaggttatcctccacggcgacaactactccgaggcagccacccacaccgaacagatcatggcggagacaggtagatactatatccccccctttgacgatgagttggtcattgccggtcaaggcactattgccgatgaaattcttcgccaaaatcccggaaaaattgacgcaatttttattcccgtgggtgggggcggactcattgccggcattgccgcctatatgaaaaatctccgtcctgagatcaggataatcggggtagagccgaccgatagcaatgccatgcactgctcccttaaggcgggtaaacgggtggaactctccaccgttggtatctttgccgatggcgttgccgtacggaaggttggagagcaaacctttgccctctgccaggagtatgtagatgagatcatcgaaatcagcagcgacgaactctgcagtggtatcaaggccatctaccaggcgacccgctccattgtcgaacctgcaggcggccttggcatggccggtctcttaaaatatatccgggagacaggctgcaaggacaagactcttattgccattaattccggagccaatatgaactttgagcgcctgcgttacgttgccgagcgcaccctgatcggggaggagcaggaggcactttttgcggtaaccatgcctgaagaggcgggaagcctgaaaacattctgccagaggatagttgaaaaacgaaatatcaccgaattcaactatcgccatatctctccagaaaaggcacatatctttgtcggtatctccatagaacaggcaaaagaacgacaagagttcagccaacagctcacggcagccggttatgaaaatatcgatctgaccgataacgatcttgccaaaaaccatatccgctatatggtgggtggcaaaccggcaagcgtccaagaggagagactctttcgtttctggtttcctgaaacacccggagcccttgtccgttttctcgacgccacccgtggcgcactctccatctccctcttccactaccgcatgcagggtggaaattatagccgggtacttgttggctttaactcctgccgggatgacgatgagctattggagagattagatatactgggctaccgctttaaagaagagacagacaatcccgcatacaagatgtttttatag

SEQ ID NO: 31554 - protein, 501 aa, Desulfotalea psychrophila LSv54
MKKIIRDILTSRVYEAAVETPLEQAVQLSHQLGNKILLKREDQQPVFSFKIRGAYNKIAHLSEEERARGVITASAGNHAQGVAYSAKKLGISALIVMPTTTPKIKVDAVRRMGGQVILHGDNYSEAATHTEQIMAETGRYYIPPFDDELVIAGQGTIADEILRQNPGKIDAIFIPVGGGGLIAGIAAYMKNLRPEIRIIGVEPTDSNAMHCSLKAGKRVELSTVGIFADGVAVRKVGEQTFALCQEYVDEIIEISSDELCSGIKAIYQATRSIVEPAGGLGMAGLLKYIRETGCKDKTLIAINSGANMNFERLRYVAERTLIGEEQEALFAVTMPEEAGSLKTFCQRIVEKRNITEFNYRHISPEKAHIFVGISIEQAKERQEFSQQLTAAGYENIDLTDNDLAKNHIRYMVGGKPASVQEERLFRFWFPETPGALVRFLDATRGALSISLFHYRMQGGNYSRVLVGFNSCRDDDELLERLDILGYRFKEETDNPAYKMFL

SEQ ID NO: 31555 - DNA, 1002 bp, Rickettsia typhi str. Wilmington
  CDS (1)..(1002): transl_table=11
atgaatttattactacaatctcctcaaaatgtagcaatcgcacataatagaataaaacaatatataaatttaacaccgataattcactctgaaagcttaaatgagatgctaggtcatgagattttttttaaggttgaatcattacaaaaaactggagcatttaaagttagaggagtattaaataatttgttagaattaaaagaacaagaaaaattaccgaataaaatagtttgttatagtagtggtaatcatggcattggccttgcttattcaagtaaattatttggtattaaaacaagaatttatttaccgttaaatacttcaaaagtaaaactgcaagcagctctttattacggatgtgaagttatatacacaaatactcggcaagaagcagaatcaagagcaaaggaagatgaagaacaaggattctactatatgcacccttctgatagtgattctataatagcaggagcaggcacgttatgctatgaagcattacagcaattagattttattcctgatgctatttttgcatcttgcggcggcggaggtttaatttctggctcatatcttgctaaagaattaatatcacctacaagcttattaataggttcagaaccagctgcagctaatgatgcttatttatcgattaaaaataataatatatatagatttaatgacacaccaataaccattgcagatggtcttaaaactttaagtgtatcagctcgtacatttgaatatttaaaaaaacttgaccatttttatttagcagaagaatatgaaatatattactggacagcgtggcttattcatttactgaaagttatatgcgagccatcaagtagtataaatatggtttcagtaataagttggttaaaaacacaaaccagaacacagaaactactagtattaatctcaggcggcaatatcgaccctactctttataatgagttatggcaagatgattatttaactgttccaccaagcattagtaactaa

SEQ ID NO: 31556 - protein, 333 aa, Rickettsia typhi str. Wilmington
MNLLLQSPQNVAIAHNRIKQYINLTPIIHSESLNEMLGHEIFFKVESLQKTGAFKVRGVLNNLLELKEQEKLPNKIVCYSSGNHGIGLAYSSKLFGIKTRIYLPLNTSKVKLQAALYYGCEVIYTNTRQEAESRAKEDEEQGFYYMHPSDSDSIIAGAGTLCYEALQQLDFIPDAIFASCGGGGLISGSYLAKELISPTSLLIGSEPAAANDAYLSIKNNNIYRFNDTPITIADGLKTLSVSARTFEYLKKLDHFYLAEEYEIYYWTAWLIHLLKVICEPSSSINMVSVISWLKTQTRTQKLLVLISGGNIDPTLYNELWQDDYLTVPPSISN

SEQ ID NO: 31557 - DNA, 963 bp, Yersinia pseudotuberculosis IP 32953
  CDS (1)..(963): transl_table=11
atgaatacgttgtttgatgccatcagagaggcccaccagatattacgcccacaagtgagagtcacgccgttggagcatagcccactgctatctcaacacagcggttgtgagatctatcttaaatgtgagcacctgcagcacaccggttcttttaaatttcgtggggccagtaacaagttacgtttactcaatgaggcacaacgccagcaaggtgtgatcaccgcctccaccggtaaccatgggcaaggtgtggcgctggccgcaaaactggcggggattaaatccactatttacgccccagaacaggcggcagccatcaagctggatgtgatccgtgcactgggggggcaaattgaattagtctccggagatgccttaaatgctgaactggccgccggtatcgccgctgagcaacaaggtaaagtgtatatctcaccgtataacgacccgcaggtcattgccgggcaaggcacctgtggcatggagatggtcgaacagcagcccgagcttgatgcggtgtttgttgccgttggtggtggtggcctgatttcaggtattgcgaccgtattgaaaacattatcggataaaacgcaggtgattggttgctggccagccaatgccaccagcctgtatacctgtctggagaaaggacagattcaggaggtggcagagcaagaaacgctgtctgacggaaccgccggtggtatcgaaccgggagcgatcacctttgcactgtgccaacagttaatcgatcagaaggtgctggtgagtgagcaagaaatcaaagaggccatgggtttgattgcccgtactgaccgctggatgattgaaggtgccgccggtgtggcactggctgcggcactgaaattggctccgcaatggcaaggtaagaaagtggcggtggtgttgtgcggtaaaaatatcgtgctggagaaatatctgggagctgtcagcggatgctaa

SEQ ID NO: 31558 - protein, 320 aa, Yersinia pseudotuberculosis IP 32953
MNTLFDAIREAHQILRPQVRVTPLEHSPLLSQHSGCEIYLKCEHLQHTGSFKFRGASNKLRLLNEAQRQQGVITASTGNHGQGVALAAKLAGIKSTIYAPEQAAAIKLDVIRALGGQIELVSGDALNAELAAGIAAEQQGKVYISPYNDPQVIAGQGTCGMEMVEQQPELDAVFVAVGGGGLISGIATVLKTLSDKTQVIGCWPANATSLYTCLEKGQIQEVAEQETLSDGTAGGIEPGAITFALCQQLIDQKVLVSEQEIKEAMGLIARTDRWMIEGAAGVALAAALKLAPQWQGKKVAVVLCGKNIVLEKYLGAVSGC

SEQ ID NO: 31559 - DNA, 1200 bp, Symbiobacterium thermophilum IAM 14863
  CDS (1)..(1200): transl_table=11
atggcccgctggcacggtgtcatccggcagtaccaacgttttctgcccgtgagcgagaggaccccggtggtgacgctgctggagggcaacaccccgctggtgccggcgccccggctgggggcggagctggggctcgatctctacctgaagttcgaggggctgaaccccaccggctccttcaaggaccgggggatgaccctcgccatgtccaaggcggtcgaggcgggggcgaaggcggtgatctgcgcctccaccggcaacaccagcgcctccgcggcggcctacgccgcccgggcggggctgccctgctacgtcgtcatccccgacggcgcggtcgccatgggcaagctcgcccaggcgctgatgtacggcgcccgcacgattcagatcgagggcaacttcgacgacgggctccggctggtgcgccgcctgacccaggagcacccggagatcgcgctggtcaactcggtcaacccgtaccggctccaggggcagaagaccgccgccttcgaggtggtggacgccctggggggctaccccgatttcctggcgatcccggtgggcaacgccggcaacatcaccgcctactggatgggcttccaggagtacgccgccgccggcgtgggcgccgtcgagtcctgtagctccagcggggcgcctgcgggggccctcctgccccgcatgctgggcttccaggcggcaggggcggcgccgctggtgcacggcggcgaggtggaggacccgcagacggtgggcacggccatcaggatcggccgcccagccagccgcgccggggcgctggccgcggcccgggagtcgggcggggcgttctgggcggtgacggacgaggagatgctggcggcctaccgccggctggcggcgaccgagggcatcttcgctgagcccgcctcctgcgcctccgtggccgggctgatcaagctgtgccggctcgggtacttcgaggggcgcaccggcagtgccggcgatgtgtccggggtcggcggtttcatcgacggcgtgcccgccccggtgccgacccaccggcccttcactggccggggcggccggcccaaggtcgtcgccgtactgaccggacacgggctcaaggaccccgacacggccatccgggtttcgccgctgcctgagaagctgcccgccgactacggccggctggagcggctgatcctctccgggagctga

SEQ ID NO: 31560 - protein, 399 aa, Symbiobacterium thermophilum IAM 14863
MARWHGVIRQYQRFLPVSERTPVVTLLEGNTPLVPAPRLGAELGLDLYLKFEGLNPTGSFKDRGMTLAMSKAVEAGAKAVICASTGNTSASAAAYAARAGLPCYVVIPDGAVAMGKLAQALMYGARTIQIEGNFDDGLRLVRRLTQEHPEIALVNSVNPYRLQGQKTAAFEVVDALGGYPDFLAIPVGNAGNITAYWMGFQEYAAAGVGAVESCSSSGAPAGALLPRMLGFQAAGAAPLVHGGEVEDPQTVGTAIRIGRPASRAGALAAARESGGAFWAVTDEEMLAAYRRLAATEGIFAEPASCASVAGLIKLCRLGYFEGRTGSAGDVSGVGGFIDGVPAPVPTHRPFTGRGGRPKVVAVLTGHGLKDPDTAIRVSPLPEKLPADYGRLERLILSGS

SEQ ID NO: 31561 - DNA, 1233 bp, Symbiobacterium thermophilum IAM 14863
  CDS (1)..(1233): transl_table=11
gtgacggtaacctttgcggacatcgagaaggcgcgcattctgctgagcggacacatcaagcggacacccatgcttcagagccctggcatcaccgagcacctgggacttccggtctacctgaaggccgagaacctgcagcgggccgggtcgttcaaggtgcggggagcgctcaacaagatccactcgctgactgaggaagagaaggcgcgcggcgtcatcgcggcgtcggccggcaaccacgcgcagggcgtggccctggcggcgtccagtctcggcatccggtcggtcatctgcatgccggagggcgccccgatcgccaagctggaggcgacccagggctacggcgcccaggtggtcctgcacggcgagacctacgacgacgcctaccagaaggcgcgggcgctgcaggcggagcacgggtacacgttcatccacggcttcgatgacccgtacaccatcgccggccaggggacggtcgggctggagatcgtggaggacctgcccgacatcgcgacggtggtggtgccgatcggcggcggcggcctcatggcgggcgttgccctggcggtcaagtccctgaagcccggcgtacgggtggtgggggtccaggccgcgggcgcgccggcggtcttcctcagccggcagcagggcaagctggtggcgaccgactcggtccacaccatcgcggacggcattgccatcaagaagccgggggcgctgtgctgggagattatccgggaacacgtggacgacatcgtgctggtggacgaggaggagatcgcacagtcgatcctcttcctgctggagcgtgcgaaggtcatcgtcgagggcgccggcgccgtgggcatggccgcgctcctcggcgacaagatcccggatctgcagggaccggtctgcgtcgtgctctcgggcggcaacattgacgtgaacatcatctcccgcatcatcgagcgcggtctggtgaaggcggggcggtacatccggatctccacgttcgtgcccgaccggcccggcgggctgcagcagctcctcgcgaccgtggcccaggccggggccaacgtgatcgacgtgcgtcatgagcgctggctgaacaaggtgaccatcggcgaggtggagatcaccctggcgctggagactcgcaacgcccgccatgtcgatgagattctcgccaccctcaaggcgaaggggtatcatgtctggatcattccgccgtatcgtcccaacgactggtag

SEQ ID NO: 31562 - protein, 410 aa, Symbiobacterium thermophilum IAM 14863
MTVTFADIEKARILLSGHIKRTPMLQSPGITEHLGLPVYLKAENLQRAGSFKVRGALNKIHSLTEEEKARGVIAASAGNHAQGVALAASSLGIRSVICMPEGAPIAKLEATQGYGAQVVLHGETYDDAYQKARALQAEHGYTFIHGFDDPYTIAGQGTVGLEIVEDLPDIATVVVPIGGGGLMAGVALAVKSLKPGVRVVGVQAAGAPAVFLSRQQGKLVATDSVHTIADGIAIKKPGALCWEIIREHVDDIVLVDEEEIAQSILFLLERAKVIVEGAGAVGMAALLGDKIPDLQGPVCVVLSGGNIDVNIISRIIERGLVKAGRYIRISTFVPDRPGGLQQLLATVAQAGANVIDVRHERWLNKVTIGEVEITLALETRNARHVDEILATLKAKGYHVWIIPPYRPNDW

SEQ ID NO: 31563 - DNA, 1263 bp, Bacillus cereus ZK
  CDS (1)..(1263): transl_table=11
atggtgcagaaggtaaaggagagagtgaaaattgaagatatcttaatggcccataattgcatgaaagatatcgttatgaaaacaccgttacaacgtgatacagttttatctgagaaatatgattgtgatgtttatgtaaaacgagaagatttacaattgattcgctctttcaaaattcgtggtgcgtataatttaattcaaagcttaccgaaagaacaattacaaaacggtgttgtttgcgcaagcgctggtaatcacgcacaaggggtagcttatacgtgtaatttattgaaaattccatcaaaaattttcatgccaacaacaacacctaagcaaaaagtagcacaagttcaatttttcggtggtgatttcgcagagattgtattggttggtgatacattcgatagctcttttcaagaagcacagcgttattgtgaagaaaatagaatgacgtttgttcatccgtttgatgatccgtatgtagttgctggtcaagggacagtggcagttgaaattatgcatgatatggagaaaccggttgattatatctttacagcaattggcggtggcggattagcatcaggtgttggtacatatgtgaaaggtgttagtcctgctacacaggtcattggggtagagccaatgggagctgcatctatgaaagaggcttttcttcaaaatgataatgtggcattggagaaaatagatagttttgttgatggggcagcggttaaaaaggtaggaaagttaacatttgaaacttgtaaagatgtaattgatgacattgttttagtaccagagggaaaggtttgtacgacgattttagaactgtataagaaaaatgcgattgtagctgaaccagctggtgcactctctattgcagcgcttgatttatacagagatgaaattaaaggtaaaaccgttgtatgcacattaagtggtggaaataatgatattgatagaatgcaagaaatgaaagaacgttctctcatttatgaaggattaaagcattatttcatcattgaattcccgcaacgttcaggtgcgctaagagaatttcttgataaaggattaggaccagaagatgatattacgcgctttgagtatattaagaaacataataaagaaaatggtccagcattagtcggagtagagttaaaacataaagaagattacgagcagttaattatccgttttaaagaaaataatattcaatttatggagcttaataaaaatcctgttttgtttgatttgcttatttaa

SEQ ID NO: 31564 - protein, 420 aa, Bacillus cereus ZK
MVQKVKERVKIEDILMAHNCMKDIVMKTPLQRDTVLSEKYDCDVYVKREDLQLIRSFKIRGAYNLIQSLPKEQLQNGVVCASAGNHAQGVAYTCNLLKIPSKIFMPTTTPKQKVAQVQFFGGDFAEIVLVGDTFDSSFQEAQRYCEENRMTFVHPFDDPYVVAGQGTVAVEIMHDMEKPVDYIFTAIGGGGLASGVGTYVKGVSPATQVIGVEPMGAASMKEAFLQNDNVALEKIDSFVDGAAVKKVGKLTFETCKDVIDDIVLVPEGKVCTTILELYKKNAIVAEPAGALSIAALDLYRDEIKGKTVVCTLSGGNNDIDRMQEMKERSLIYEGLKHYFIIEFPQRSGALREFLDKGLGPEDDITRFEYIKKHNKENGPALVGVELKHKEDYEQLIIRFKENNIQFMELNKNPVLFDLLI

SEQ ID NO: 31565 - DNA, 1539 bp, Mannheimia succiniciproducens MBEL55E
  CDS (1)..(1539): transl_table=11
atggttaataatttatcgaacgccccgaccggggcggagtatttaagagcgatcttaatttctaaagtttatgaggcggcaaaagttactccgttgcaattaatgccgaaattgtcggaacgtttaggcaatcggatttatgttaaacgtgaagatcatcaacccgtacatagctttaaattacgcggcgcctacgccatgatttcaggtttaacccaggcgcagaaagaggccggcgtcattaccgcatcggcgggaaatcacgcgcaaggcgtagccctttcggcaaaaaatgccggtattcgtgcgctgattgtaatgccgcaaaatacgccttccattaaagtggatgcggtacgcggacacggcggcgaagtacttttacacggcgcgaatttcgatgaggccaaagccaaagcgattgaactttcgcaaacggagcaaatgacctttatcccgccttttgatcatcctgcggtgattgcggggcagggctccatcggtatggaattattgcagcaaaacggtcacatcaaccgcatttttgtaccggtaggtggcggcggtttgcttgcgggcgttgccgtgctgattaaacaattaatgccggaaattaaggtgatcggcgtagaagcgaaggattccgcctgtttatattatgcactgaaagcgggtcgtcccgttgatttagaacgcgtcggactttttgccgacggtgtggcggtaaaacgaatcggtgacgaaactttccgcatttgtcagcaatatgtggatgatgtgattctggtggatggtgatgaaatctgtgcggcgatgaaagatatgtttgaaaacgttcgtgcggtaccggaaccttcgggcgcattatcgctcgccggcttgaaaaaatatgctaaacagcataatttgcaaggcgaaaccttagtaaatctgctgtccggcgcgaatttaaatttccatacgctgcgttatgtttccgaacgttgtgaaatcggtgaaaaacatgaagccttatttgcggtaacgattccggaacaacggggcagcttcttaaaattctgtcagattttaggacaaaatgcggtgacggaattcaactatcgctatgctgatgaaaaacaggcttgtatttttgtcggtgtgcgcattaccggcgaacaggaaaaacaagttattatccagcaattaaaacagggcgggtatgacgtgcaggatttgtctgacgacgatattgctaaaactcatattcgttatatggtcggcggccgctcatccagtgatttaaacgaacgtctatatagctttgaatttccggaacaaaaaggcgcattgctgaagttcctggaaaccctcggcaccacggatgcgaatatttccctgttccattaccgcggacacggtgcggattacggcgatgtgttggcaggtttccaaattaatgacgcggatttaccggcatttaaacaacatttggaaaaattaggctatgcttatcaggatgttaccgacagcccgtcttatcggtatttcttaggatag

SEQ ID NO: 31566 - protein, 512 aa, Mannheimia succiniciproducens MBEL55E
MVNNLSNAPTGAEYLRAILISKVYEAAKVTPLQLMPKLSERLGNRIYVKREDHQPVHSFKLRGAYAMISGLTQAQKEAGVITASAGNHAQGVALSAKNAGIRALIVMPQNTPSIKVDAVRGHGGEVLLHGANFDEAKAKAIELSQTEQMTFIPPFDHPAVIAGQGSIGMELLQQNGHINRIFVPVGGGGLLAGVAVLIKQLMPEIKVIGVEAKDSACLYYALKAGRPVDLERVGLFADGVAVKRIGDETFRICQQYVDDVILVDGDEICAAMKDMFENVRAVPEPSGALSLAGLKKYAKQHNLQGETLVNLLSGANLNFHTLRYVSERCEIGEKHEALFAVTIPEQRGSFLKFCQILGQNAVTEFNYRYADEKQACIFVGVRITGEQEKQVIIQQLKQGGYDVQDLSDDDIAKTHIRYMVGGRSSSDLNERLYSFEFPEQKGALLKFLETLGTTDANISLFHYRGHGADYGDVLAGFQINDADLPAFKQHLEKLGYAYQDVTDSPSYRYFLG

SEQ ID NO: 31567 - DNA, 1269 bp, Bacillus licheniformis ATCC 14580
  CDS (1)..(1269): transl_table=11
atgaaaccgttgcttaaagaaaactctctcatccaagtcaaagacattttaaaagcccaccaaaatgtaaaagatgttgttattcatacccctctccaaaaaaatgagaggctgtccgagaggtacgattgcaacgtatatttaaaaagagaagacctgcaggttgtccgctcttttaaactgagaggcgcctattataaaatgaagcagctttcaaaagaaacgacgaaaaacggggtggtctgcgccagtgcaggaaaccatgcgcagggagtcgctttttcctgcaaacatctcggtattcacggaaagatttttatgccgtcgacgaccccgaggcaaaaaatttcccaagtcgaattgttcggcaaggaatacgtcgagatcatcctgacaggcgacacgtttgatgatgcttatcaaagcgcagtcgcctgctgcgaggaagaaaagcgcgcatttatccacccgtttgacgatcctgccgtcatggctggccagggtacggtcgcggtcgaaatcttaaacgatatcgaaacggaaccccattatttattcgcaagcgtaggcggagggggtctgctttcaggagtgggaacctatatgaaaaacgtgtccccggatacaaagctgatcgcggttgagcctaaaggcgcgccggctctttttgaatcaaacaaaaaaggcgaagtcgtcatccttgagaaaatcgataaatttgtcgatggagccgctgtgcagaaaatcggcgaagagacatttaaaacgcttgaaaccgttgtcgatgatattttgctcgttcctgaaggaaaggtgtgcaccgcgattcttgagctgtacaaccaatgcgcgattgtcgccgaacctgcgggagcgctgccgatcgccgctttagatctttacagggatgaaattaaagggaaaaatgtcgtatgcattgtgagcggaggaaacaacgatatcggcagaatgcaggaaatcaaagacagatcgatgatgtatgaaggactccagcattatttcatcgtgaacttcccgcaaagggcgggagctttgcgcgaatttttagatgaagtgctcgggccgaccgacgatatcacccggtttgaatatacgaagaaaaataataaaagcagcggccctgcgctcgtcggcatcgaattgaagcagcgcgaagattacgagccgctgatcgcaagaatggacaggaaaggcttccgctatgtcgaagtcaataaagatgaagggctctttcatttgctgatttaa

SEQ ID NO: 31568 - protein, 422 aa, Bacillus licheniformis ATCC 14580
MKPLLKENSLIQVKDILKAHQNVKDVVIHTPLQKNERLSERYDCNVYLKREDLQVVRSFKLRGAYYKMKQLSKETTKNGVVCASAGNHAQGVAFSCKHLGIHGKIFMPSTTPRQKISQVELFGKEYVEIILTGDTFDDAYQSAVACCEEEKRAFIHPFDDPAVMAGQGTVAVEILNDIETEPHYLFASVGGGGLLSGVGTYMKNVSPDTKLIAVEPKGAPALFESNKKGEVVILEKIDKFVDGAAVQKIGEETFKTLETVVDDILLVPEGKVCTAILELYNQCAIVAEPAGALPIAALDLYRDEIKGKNVVCIVSGGNNDIGRMQEIKDRSMMYEGLQHYFIVNFPQRAGALREFLDEVLGPTDDITRFEYTKKNNKSSGPALVGIELKQREDYEPLIARMDRKGFRYVEVNKDEGLFHLLI

SEQ ID NO: 31569 - DNA, 1056 bp, Burkholderia mallei ATCC 23344
  CDS (1)..(1056): transl_table=11
gtggctgcgcgcggcgcgcgaagctgggacaatggccgcttccttgtccaacgcgttttcgcactcgccgccatgtccgttcaatccgcctccgaccttattttgccgaccttcgacgacgtgaccgacgcagccgcccggctcgccggcgtcgcgcatcgcacgcccgtcctcacgtcgagcaccgccgacgcgcgcgcgggcgcgacgatcttcttcaaatgcgagaacttccagcggatgggcgcgttcaagtttcgcggcgcatacaacgcgatttcgcacttcgacgccgagcagcgccgcgcgggcgtgctcacgtattcgtcgggcaaccatgcgcaggcgatcgcgctcgccgcgcgtctcgcgggcatccgcgcgacgatcgtgatgccgcacgacgcgccggccgcgaaggtcgcggcgacgaagggctacggcggcgaagtcatcacctacgatcgctacacggaaagccgggaggagatcggcgcgcggctcgcgcaggagcgcggcatgacgctcgtgccgccgtacgatcacccgcacgtgatcgccggccaggggacggccgcgaaagagctgatcgacgaagtcggcgagctcgacatgctcgtcgcgccgctcggcggcggcgggctgatcgcgggcaccgcgctgtcggccgccgcgctgtcggcgggctgcgcggtgatcggcgtcgagccggaggcgggcaacgacgcgcagcagtcgctcgagcgcggcgaggtcgtgcgcattccggtgccgcggacgatcgcggacggcgcggcgtcgacgcacgtcggcgcgtacaactttccggtcatccagcggctcgtcaagcggatcgtcacggcgagcgacgcgcagctcgtcgatacgatgcgttttttcgcggagcggatgaaactcgtcgtcgagccgaccggctgcctcggcgcggccgcggtgcttgacggcgtgctgcccgtcgcgggcaggcgcatcggcgtgatcctgagcggcggcaacgtcgatctcgcgcgctacggcgagttcctgcgcgggtga

SEQ ID NO: 31570 - protein, 351 aa, Burkholderia mallei ATCC 23344
MAARGARSWDNGRFLVQRVFALAAMSVQSASDLILPTFDDVTDAAARLAGVAHRTPVLTSSTADARAGATIFFKCENFQRMGAFKFRGAYNAISHFDAEQRRAGVLTYSSGNHAQAIALAARLAGIRATIVMPHDAPAAKVAATKGYGGEVITYDRYTESREEIGARLAQERGMTLVPPYDHPHVIAGQGTAAKELIDEVGELDMLVAPLGGGGLIAGTALSAAALSAGCAVIGVEPEAGNDAQQSLERGEVVRIPVPRTIADGAASTHVGAYNFPVIQRLVKRIVTASDAQLVDTMRFFAERMKLVVEPTGCLGAAAVLDGVLPVAGRRIGVILSGGNVDLARYGEFLRG

SEQ ID NO: 31571 - DNA, 1524 bp, Burkholderia pseudomallei K96243
  CDS (1)..(1524): transl_table=11
atggcctcccacgattatctgaagaaaatcctgaccgcccgggtgtacgacgtcgcgctcgaaaccgagctcgaacgcgcgcgcaacctgtccgcgcggctgggcaacgccgtctacctgaagcgcgaggacaaccagccggtgttctcgttcaagctgcgcggcgcgtacaacaagatggcgcacatcccggccgacgcgctcgcgcgcggggtgatcaccgcgtcggcgggcaaccatgcgcagggcgtcgcgttctcggccgcgcggatgaacgtgaaggcggtgatcgtcgtgccggtgacgacgccgcaggtgaaggtcgacgcggtgcgcgcgcacggcgggccgaccgtcgaggtgatccaggcgggcgaatcgtacagcgacgcgtacgcgcacgcggtgaaggtgcaggccgagcgcggcctcacgttcgtccatccgttcgacgatccgtacgtgatcgcgggccagggcacggtcgcgatggagatcctgcgtcagcatcaggggccgattcacgcgatcttcgtgccgatcggcggcggcgggctcgcggcgggcgtggccgcgtacgtgaaggcggtgcgcccggagatcaaggtgatcggcgtgcagaccgacgattcgtgcgcgatgaagcaatcgctcgcggcgggccggcgcatcgagctcaccgaggtggggctcttctccgacggcaccgcggtcaagctcgtcggcgaggagacgttccgcctctgcgcggcgtatctcgacgaggtcgtgaccgtcgataccgacgcgctttgcgcggcgatcaaggacgtgttccaggacacgcgcagcgtgctcgagccggccggctcgctcgcggtggcgggcgcgaagcggtatgcggagcaggcgggcatcgagggcgagacgctcgtggcggttacctccggcgcgaacatgaatttcgaccggatgcgcttcgtcgccgagcgcgccgaggtgggcgaggcgcgcgaggcggtgttcgcggtgacgattcccgaggagcgcggcagcttcaagcgcttctgcgcgctcgtcggcgagcgcaacgtgaccgagttcaactaccggatcgccgatgcgcgatcggcgcatctcttcgtcggtgtgcagatccggcggcgcgacgaatcggacgagatcgccgccaacttcgccgcgcacggtttcacgagcgtcgacctgtcgggcgacgagctatcgaagcagcatatccgctacatggtgggcgggcgctcgccgctcgcgcacgacgagcggctgttccgcttcgagtttcccgagcggcccggcgcgctgatgaagttcctgtcgtcgatggcgcccgactggaacatcagcctgttccactaccggaaccagggcgccgactacagctcgatcctcgtcggcctgcaggtgccgcaggccgaccacgcggcgttcgatcgcttcctcgcggcgctcggctatccgttctgggaagaaagcggcaatccggcgtatcgtctcttcctgtcgtaa

SEQ ID NO: 31572 - protein, 507 aa, Burkholderia pseudomallei K96243
MASHDYLKKILTARVYDVALETELERARNLSARLGNAVYLKREDNQPVFSFKLRGAYNKMAHIPADALARGVITASAGNHAQGVAFSAARMNVKAVIVVPVTTPQVKVDAVRAHGGPTVEVIQAGESYSDAYAHAVKVQAERGLTFVHPFDDPYVIAGQGTVAMEILRQHQGPIHAIFVPIGGGGLAAGVAAYVKAVRPEIKVIGVQTDDSCAMKQSLAAGRRIELTEVGLFSDGTAVKLVGEETFRLCAAYLDEVVTVDTDALCAAIKDVFQDTRSVLEPAGSLAVAGAKRYAEQAGIEGETLVAVTSGANMNFDRMRFVAERAEVGEAREAVFAVTIPEERGSFKRFCALVGERNVTEFNYRIADARSAHLFVGVQIRRRDESDEIAANFAAHGFTSVDLSGDELSKQHIRYMVGGRSPLAHDERLFRFEFPERPGALMKFLSSMAPDWNISLFHYRNQGADYSSILVGLQVPQADHAAFDRFLAALGYPFWEESGNPAYRLFLS

SEQ ID NO: 31573 - DNA, 984 bp, Burkholderia pseudomallei K96243
  CDS (1)..(984): transl_table=11
atgtccgttcaatccgcctccgaccttattttgccgaccttcgacgacgtgaccgacgcagccgcccggctcgccggcgtcgcgcatcgcacgcccgtcctcacgtcgagcaccgccgacgcgcgcgcgggcgcgacgatcttcttcaaatgcgagaacttccagcggatgggcgcgttcaagtttcgcggcgcatacaacgcgatttcgcacttcgacgccgagcagcgccgcgcgggcgtgctcacgtattcgtcgggcaaccatgcgcaggcgatcgcgctcgccgcgcgtctcgcgggcatccgcgcgacgatcgtgatgccgcacgacgcgccggccgcgaaggtcgcggcgacgaagggctacggcggcgaagtcatcacctacgatcgctacacggaaagccgggaggagatcggcgcgcggctcgcgcaggagcgcggcatgacgctcgtgccgccgtacgatcacccgcacgtgatcgccggccaggggacggccgcgaaagagctgatcgacgaagtcggcgagctcgacatgctcgtcgcgccgctcggcggcggcgggctgatcgcgggcaccgcgctgtcggccgccgcgctgtcggcgggctgcgcggtgatcggcgtcgagccggaggcgggcaacgacgcgcagcagtcgctcgagcgcggcgaggtcgtgcgcattccggtgccgcggacgatcgcggacggcgcggcgtcgacgcacgtcggcgcgtacaactttccggtcatccagcggctcgtcaagcggatcgtcacggcgagcgacgcgcagctcgtcgatacgatgcgttttttcgcggagcggatgaaactcgtcgtcgagccgaccggctgcctcggcgcggccgcggtgcttgacggcgtgctgcccgtcgcgggcaggcgcatcggcgtgatcctgagcggcggcaacgtcgatctcgcgcgctacggcgagttcctgcgcgggtga

SEQ ID NO: 31574 - protein, 327 aa, Burkholderia pseudomallei K96243
MSVQSASDLILPTFDDVTDAAARLAGVAHRTPVLTSSTADARAGATIFFKCENFQRMGAFKFRGAYNAISHFDAEQRRAGVLTYSSGNHAQAIALAARLAGIRATIVMPHDAPAAKVAATKGYGGEVITYDRYTESREEIGARLAQERGMTLVPPYDHPHVIAGQGTAAKELIDEVGELDMLVAPLGGGGLIAGTALSAAALSAGCAVIGVEPEAGNDAQQSLERGEVVRIPVPRTIADGAASTHVGAYNFPVIQRLVKRIVTASDAQLVDTMRFFAERMKLVVEPTGCLGAAAVLDGVLPVAGRRIGVILSGGNVDLARYGEFLRG

SEQ ID NO: 31575 - DNA, 1530 bp, Methylococcus capsulatus str. Bath
  CDS (1)..(1530): transl_table=11
atgctgcaaaaatacatagagaagattctgcgcgcccgtgtctacgacgttgcccaggagaccccgctggacccggcgcccggcctgtcgcggcggctggacaacacggtgctgatcaagcgcgaggacctgcagccggtgttctcgttcaagctgcgcggcgcctacaacaagatcgcctcgctcacacccgaggcgcgcgcggccggcgtgatcgcggcctccgccggcaaccacgcccagggcgtggcactggcggcgcagcggctgggcatccgcgccgtgatcgtgatgccttgcaccaccccgcatatcaaggtcgatgcggtgcgcaaccgaggcggtgaggtcgtactgcatggcgacgcctatgacgaagcctacgaacatgcgctggaactggcccgcgaccagtgcctgaccttcgtccacccctacgacgatccggaagtcatcgccgggcaaggcaccatcggcatggaaatcctgcgccagcaccaggacgccatccacgccatcttcgtgcctgtgggcggcggcggattgatcgccggcatcgccgcctacgtcaagttcgtgcgcccggacatccgcgtcatcggcgtggaaccagtggactccgactgcctgcaccgggcgctgaaagccaagcggcgggtgatcctgaagcaggtgggcctgttcgccgacggcgtcgcggtgaagcaggtcggcaaggaaccgttccatctcgcccaccagtgggtggacgaggtcgtgaccgtcgacaccgacgaaatctgcgccgccatcaaggacatcttcgacgacacccgctccatcgccgagccggcgggcgcgctgggcatcgccgggctcaagaaatacgtggccgaaacaggaatcaagaacgcgtgcctggtggcgatcgaaagcggcgccaacatcaacttcgaccggctgcgccacgtcgctgagcgcgccgagatcggcgaaaagcgcgaactgctgctggcagtgacgatccccgagcggcccggcagcttcctcgaattctgccgggtgctgggccgccgcaacatcaccgaattcaactaccgcttcttcgacgaaaaggccgcccaggtgttcgtcggcctcccggtggcgagcggcgcgatcgaccgcgaaagcctggtccgcgaattcgaacgccagggtttcggcgtgctcgacctgaccggcaacgaactcgccatcgaacacatccgctacatggtcggcggccacgcgccgaaactgctggacgaacaggtctacagcttcgaattccccgagcgacccggcgcgctgctgcgcttcctgtccatcatgggcgggcgctggaacatcagcctgttccattaccgcaaccacggcgccgccttcggccgggtactgatgggcatccaggtgccgaaaccggaacgcaaggccttccgggaattcctcgaagccatcggctacgccttcaaggaggaaacccaaaatcccgcctaccggctgttcgcggggggcagcgagcgggggtga

SEQ ID NO: 31576 - protein, 509 aa, Methylococcus capsulatus str. Bath
MLQKYIEKILRARVYDVAQETPLDPAPGLSRRLDNTVLIKREDLQPVFSFKLRGAYNKIASLTPEARAAGVIAASAGNHAQGVALAAQRLGIRAVIVMPCTTPHIKVDAVRNRGGEVVLHGDAYDEAYEHALELARDQCLTFVHPYDDPEVIAGQGTIGMEILRQHQDAIHAIFVPVGGGGLIAGIAAYVKFVRPDIRVIGVEPVDSDCLHRALKAKRRVILKQVGLFADGVAVKQVGKEPFHLAHQWVDEVVTVDTDEICAAIKDIFDDTRSIAEPAGALGIAGLKKYVAETGIKNACLVAIESGANINFDRLRHVAERAEIGEKRELLLAVTIPERPGSFLEFCRVLGRRNITEFNYRFFDEKAAQVFVGLPVASGAIDRESLVREFERQGFGVLDLTGNELAIEHIRYMVGGHAPKLLDEQVYSFEFPERPGALLRFLSIMGGRWNISLFHYRNHGAAFGRVLMGIQVPKPERKAFREFLEAIGYAFKEETQNPAYRLFAGGSERG

SEQ ID NO: 31577 - DNA, 963 bp, Nocardia farcinica IFM 10152
  CDS (1)..(963): transl_table=11
ttgaccgatcgggacggcgcgctggtcgcgggggagcacgcccggctgtatcgatccgatgtccgcctcgcgcggcgcaggctcgccgggcggatccggaagacgcccgtcttccacacgagcgtggccgggcccgccgggccggtcccggtgacgttgaaactcgagcatctccagcacgcgggcaccttcaaggtgcgcggcaccctcaacgcgctgctcgccgccgacccggaggaccacgtggtgatcgcctcggcgggcaattccggcatcgccgcggcgctggcggcggcctggctgggcaagacgtgcacggtggtggtgcccgagtcggcgccgcacaccaaggtggccgcgatgtggtcgcacggcgccgaggtgctgtggcacggcaccacctaccgcgaggccgaacggtacgccgccgagctggcggccgaccgcggcgcactggtgctgcacgcctacgaccagctcgacgtgatcgccggtgcgggcgtgctcgcgctcgagctggaggagcaggtgcgcggcaggccgccggtgctggtctcggtgggtggcggcggcctgctggcgggcgtggccgccgcgttcgggcgcaggcagcgggtgatcggggtggagccggtcggcatgcccgcgctgcgcgccgcactgacggccgaacgcccggtggacgtgggcccggcccggccggtgctgcatccgctgggcgccacccgggtcggcgaactcgcgttgcgcctggcgcgccgctacgacgtgcccgcgctgctggtcaccgaggaggcgatcacgaccgcgcgcgagtacctgtggcgtgagttccggatcgtggtggaactggccggcgcgaccgcgctggccgcgatcctcagcggcgcctacgtcccggccccgggtgagcggccggtggtggtgctgtgcggggcgaacaccgacgcgaccggtctctga

SEQ ID NO: 31578 - protein, 320 aa, Nocardia farcinica IFM 10152
MTDRDGALVAGEHARLYRSDVRLARRRLAGRIRKTPVFHTSVAGPAGPVPVTLKLEHLQHAGTFKVRGTLNALLAADPEDHVVIASAGNSGIAAALAAAWLGKTCTVVVPESAPHTKVAAMWSHGAEVLWHGTTYREAERYAAELAADRGALVLHAYDQLDVIAGAGVLALELEEQVRGRPPVLVSVGGGGLLAGVAAAFGRRQRVIGVEPVGMPALRAALTAERPVDVGPARPVLHPLGATRVGELALRLARRYDVPALLVTEEAITTAREYLWREFRIVVELAGATALAAILSGAYVPAPGERPVVVLCGANTDATGL

SEQ ID NO: 31579 - DNA, 1356 bp, Nocardia farcinica IFM 10152
  CDS (1)..(1356): transl_table=11
gtggccaatccgctggaactgatcgatgacctgtccccgtctcgtcgcgcgctcaacgccgacgagatcgacgccgcggccaagcgaatttccgacatcatcgagcccacccccctccagctcagcccccgcctgtccgccgccaccggcgcccgcgtctacctcaagcgcgaggacctcaccgccgtgcgctcctacaagctgcgcggggcctacaacctgatcgtgcagctcgacgagcgcgagcgcgcggcgggcgtggtcgcggccagtgccggcaatcacgcccagggcgtggcgttcgcctgccaggcgatgggcatccagggacgcatctacgtgccgaccacgacgccgaagcagaagcgcgaccggatccgggtacacggcgggcagttcgtggagctgatcgccgtcggcgacacctacgacgccgccgcggccgccgcggccgccgacgtggaacgcaccggcgcgacgatggtcgctcccttcgacgacccgcgcaccgccgccggtcagggcaccatcgcggtggagatcctcgaacagctcggcgcggcacccgatttggtcgtggtgccggtgggcggcggcggctgcctggccggtatcggcacctacctgcgcgaccgctcccccgccaccggcatcctggcggccgagcccgccggggcggcctccatgacggcggcgctgatcgcgggcgggccggtgaccctgcccgagatcgatcccttcgtcgacggcgcggcggtgcgccgcgtcggcgcgctgccctatgccgcggcggtcggcttcggcggccgggtggtcacgcacgcctcgctgccgctgctcaccgccgtcgactcaccgcagggacacggcgcgttccggttgctccaggtcgacgagggcgccatctgcacgacgatgctcgagctctaccagaacgagggcatcatcgccgagcctgcgggcgcgctggcggtggccgccctggccgaggtcgacgtcgaacccggttcgacggtggtgtgcctgatctccggcggcaacaacgacgtctcccgctacggcgagatcatcgagcgctccctggtgcaccagggtctcaagcactacttcctggtcgatttcccgcaggagccgggcgcgctgcgccggttcctggacgaggtgctcggcccggacgacgacatcaccctgttcgagtacgtcaagcgcaacaaccgggagaccggggcggcgctggtcggcatcgaactcggcgcggccgacgggctggacgcgctgctcgaacgcatcgcggcctcgcccatccaatgcgaacggctggagccgggctcgcccgcctaccgctacctgacctga

SEQ ID NO: 31580 - protein, 451 aa, Nocardia farcinica IFM 10152
MANPLELIDDLSPSRRALNADEIDAAAKRISDIIEPTPLQLSPRLSAATGARVYLKREDLTAVRSYKLRGAYNLIVQLDERERAAGVVAASAGNHAQGVAFACQAMGIQGRIYVPTTTPKQKRDRIRVHGGQFVELIAVGDTYDAAAAAAAADVERTGATMVAPFDDPRTAAGQGTIAVEILEQLGAAPDLVVVPVGGGGCLAGIGTYLRDRSPATGILAAEPAGAASMTAALIAGGPVTLPEIDPFVDGAAVRRVGALPYAAAVGFGGRVVTHASLPLLTAVDSPQGHGAFRLLQVDEGAICTTMLELYQNEGIIAEPAGALAVAALAEVDVEPGSTVVCLISGGNNDVSRYGEIIERSLVHQGLKHYFLVDFPQEPGALRRFLDEVLGPDDDITLFEYVKRNNRETGAALVGIELGAADGLDALLERIAASPIQCERLEPGSPAYRYLT

SEQ ID NO: 31581 - DNA, 936 bp, Nocardia farcinica IFM 10152
  CDS (1)..(936): transl_table=11
gtgccgatcgaaccgaccgttatcgacgtcgacgccgccgccgaacggatcgccgggctgatccgtccggtcaccgtcgccccggccgaaccgccgggtgagtgctggctggcgctggagttcctccagcacaccggctcgttcaaggcgcgcggcgcgcagaatttcgtggaggcccaccggctcgcgggcaccatgcccgccgccggggtgaccatcgcctcgggcgggaacgccggactggcctgcgcgtgggctgcggcgagccggggcgtgcccgcgacggtgttcctgccgcgcaccgcgcccacggtgaaggtgcagcggctgcgcggctacggcgccgaggtgcggctggtcggcgcggaatacgccgacgcgctggcggcctgccgtgacttcgccgccgagtccggcgcgttgatgtcccacgcctacgacgatccactgatcgcggccggcgccggcacgctgctcaccgaaatccaccgggcgataccgaaactggacacggtggtgctcgccgtcggcggcggtgggctgttcgccggcatcgccaccgcggccgcgcagctcggggtgcggacggtggcggtggagcccgagcgctgccgcgccctcgacgccgcgctggccgcgggcgaaccggtggacgtggaggtgaactcgatcgccgccgacgcgctgggcgcccggcgggtcaccgagctggcgctggccgccgcccggcaggccgacacggtgtcggtgctggtgcccgacgagcagatcgtcgcggcgcggcgcggcctgtgggccgaacggcgtctcgcggtcgagcatgccgccgcgaccgcgctcgcggccctggaatcgggcgcctaccggccggcgccgggcgaacgcgtctgtgtcgtgttgtgcggggccaacaccgacccggccgatctgggctga

SEQ ID NO: 31582 - protein, 311 aa, Nocardia farcinica IFM 10152
MPIEPTVIDVDAAAERIAGLIRPVTVAPAEPPGECWLALEFLQHTGSFKARGAQNFVEAHRLAGTMPAAGVTIASGGNAGLACAWAAASRGVPATVFLPRTAPTVKVQRLRGYGAEVRLVGAEYADALAACRDFAAESGALMSHAYDDPLIAAGAGTLLTEIHRAIPKLDTVVLAVGGGGLFAGIATAAAQLGVRTVAVEPERCRALDAALAAGEPVDVEVNSIAADALGARRVTELALAAARQADTVSVLVPDEQIVAARRGLWAERRLAVEHAAATALAALESGAYRPAPGERVCVVLCGANTDPADLG

SEQ ID NO: 31583 - DNA, 1554 bp, Photobacterium profundum SS9
  CDS (1)..(1554): transl_table=11
atgagcgaagtaacacaggccaaggatgcagagctattaagcggagccgattaccttcgcaatattcttcgagcacctatctatgaagtggcgcaagtgacgcccctccaagatatggatcgattgtcagcaaggatcggcaatcgcatccagttaaaacgagaagatcgccagccggttcactcgtttaaactgcgtggtgcttacaacatgatgtctcagctaaccccagcgcaacgtaaagcgggggctattgcagcctctgcgggcaatcatgctcaagggttagcattatccggtcataagcttgatgttagtgcaaccatcgttatgccactgaccacacctgcgattaaagtcgatgcggtgagaagctttggtggcaaagtggttttgcacggcaataattttgatgaagccaaagcccacgctgaagaattagcgcaacaatatggttataccttcattccaccctttgatcacccatcagtgattgcaggacagggcaccatcggtatggaactgctccaacaaaatgggcatcttgattatgtttttgttcctgttgggggcggcggtttagcggctggaatatcggtattacttaaacagttaatgccgaatattaaaatcatcggtgtggaagctgaagattcagcctgcttgaaagccgcgctcgatgcgggttgtccggttacactcgaccaagttggcatgtttgctgacggtgtcgcggtaaaacgcattggtgaagaaacattccgtttatgccagcagtatcttgatgatgttattaccgttagcagcgatgaaatttgctctgccgttaaagatatttttgaagatacccgggccattgcagaaccatctggtgcactctctttagcaggactcaaaaaatacgttgaggtacaccagctacaagataagcagctagcatccattttatcgggggctaacctcaactttcatggtctacgctatgtatcagagcgttgtgaattaggtgagaaacgagaaggtctcttagcggtaacagtgccagaacggcctggggcttttcttgatttttgccatatcttaggtggccgaacagtgactgagtttaactatcgctacaacgacgatgcactggctaatgtctttgtgggggtgcgcttaatgcaagggcaagaagagctggacggcatcattcacgatcttcgaaaagggggctaccccgttgtcgatttatctgatgatgaaatggcaaaagttcacgtgcgctatatgattggtgggcgtccatcaaagccactaaaagaacgtttatatagttttgaatttccagagtaccctggcgcactattaaagtttcttaatacgctaggtacacactggaatattagcctatttaattaccgtaatcatggtgcagattttggtcgagtattatgtggttttgaattggaagacaaagatctgctgtcttttactagtcacttacacgaattaggctaccaatggaaagatgaaacggaaaacctagcatataagttttttctagcccaataa

SEQ ID NO: 31584 - protein, 517 aa, Photobacterium profundum SS9
MSEVTQAKDAELLSGADYLRNILRAPIYEVAQVTPLQDMDRLSARIGNRIQLKREDRQPVHSFKLRGAYNMMSQLTPAQRKAGAIAASAGNHAQGLALSGHKLDVSATIVMPLTTPAIKVDAVRSFGGKVVLHGNNFDEAKAHAEELAQQYGYTFIPPFDHPSVIAGQGTIGMELLQQNGHLDYVFVPVGGGGLAAGISVLLKQLMPNIKIIGVEAEDSACLKAALDAGCPVTLDQVGMFADGVAVKRIGEETFRLCQQYLDDVITVSSDEICSAVKDIFEDTRAIAEPSGALSLAGLKKYVEVHQLQDKQLASILSGANLNFHGLRYVSERCELGEKREGLLAVTVPERPGAFLDFCHILGGRTVTEFNYRYNDDALANVFVGVRLMQGQEELDGIIHDLRKGGYPVVDLSDDEMAKVHVRYMIGGRPSKPLKERLYSFEFPEYPGALLKFLNTLGTHWNISLFNYRNHGADFGRVLCGFELEDKDLLSFTSHLHELGYQWKDETENLAYKFFLAQ

SEQ ID NO: 31585 - DNA, 1260 bp, Haloarcula marismortui ATCC 43049
  CDS (1)..(1260): transl_table=11
atgggcatgacgcaagtcacaaccctcgagtgtacactctgtggggcagagtacgacccgaaccggatcatctacacctgtcccgaacacgagggcgtgaagggaattctcgaggtgacgtacgactacgatgctatcgatgatgcgtttgacggcgacctcggcgggccgatcgcaagtcaatggaagtacgaggcgtttctgccagtcgcagcggacgccgatatcgtgacgctcaacgagggcgggacggacctcttcgacgcgccgaatctcagcgctgcgctgggcgtggagacactggtcaaagacgacggacggaacccgaccggctgcttcaaggaccgcgccagcgctatcgcggtcacgaaagcaaaacacgccgggcgcgatatcatcacctgcgcctccaccgggaacgccgccgcgtcactgtcgggctatgccgcccgcggggggatggactgccgtattttcgtccccggtgacgccccgacggggaaactcgcacagccgctcgtctacggcgcggatgtccttgctgtcaacggcaactacgacgaagcctacgacctcagcgtcgaggtcaccgagaagtacggctggtacaaccgcaacgcggctatcaatccgttccaggtcgagggcaagcgcaccgtcggccacgagctcgcagaccagtctatcgcccgcggacacgtcccggactgggtcgtgttttcgatgggcgacggctgtacgattgccggggcctggaaggggttcaaggagttctacgacctcggctacgtcgatgaccaccccaaaatgctaggggttcaggccgaaggggcgtcggcgatccacgacgccttccacaaccacgaggatatcgacgatatcgccgaaacgctggccgattcaatcgcagtcggacggccgcggaacacgattaaggcttgccgcgcgctggaacagagcggtggcaccagcgtgctggtctccgatgaagagattctggaagccgaaacgctacttggcagcaccgaaggaatctactccgagccggcgggagcagcgcctatcgcgggcgttcagacggcgctcgaccggggaatcatcgaacaggacgaaacggtcgtcgtggtgtccaccggcttcggcctgaaggacacgaaaagcgccgagaaggcgaccggcggggtggatcgaatcgaccccgaaatcgcagaggtcgaaggtctgtacggcacggccgaagaagccgcagccgacgactga

SEQ ID NO: 31586 - protein, 419 aa, Haloarcula marismortui ATCC 43049
MGMTQVTTLECTLCGAEYDPNRIIYTCPEHEGVKGILEVTYDYDAIDDAFDGDLGGPIASQWKYEAFLPVAADADIVTLNEGGTDLFDAPNLSAALGVETLVKDDGRNPTGCFKDRASAIAVTKAKHAGRDIITCASTGNAAASLSGYAARGGMDCRIFVPGDAPTGKLAQPLVYGADVLAVNGNYDEAYDLSVEVTEKYGWYNRNAAINPFQVEGKRTVGHELADQSIARGHVPDWVVFSMGDGCTIAGAWKGFKEFYDLGYVDDHPKMLGVQAEGASAIHDAFHNHEDIDDIAETLADSIAVGRPRNTIKACRALEQSGGTSVLVSDEEILEAETLLGSTEGIYSEPAGAAPIAGVQTALDRGIIEQDETVVVVSTGFGLKDTKSAEKATGGVDRIDPEIAEVEGLYGTAEEAAADD

SEQ ID NO: 31587 - DNA, 1263 bp, Haloarcula marismortui ATCC 43049
  CDS (1)..(1263): transl_table=11
atgacacataccgaatcggacacgctacccgtcacatacgcagacatcgaacgagcccgcgaacgtctggacgacgacacagttgtaaagaagacgccagtcgaacggagctcgtcccttggtgggttcgtcgacgccgaggtgtacctgaagatggagcacctccagtggacagggtcgttcaaaaccagaggcgcgtacaacaagatctcgcaggacgttgccgatgacgtggagtccttcgtcgccgccagcgccgggaaccacgcccagggtgtcgctctcgccgcgacgaaatgtggggcagagtcaacgattttcatgccggagaacgcgccacaggccaagatcgacgccacgagggcctacggcggaagcgtcgaactggtcggcaacgactttcaggagacgatgtcccacgccaaagctgtcgtcgaggagaccgacgccgagttcgttcacgcctatgacgatctggacatcattgctggacaggggaccctcggaacggaaatgtaccacgactgccccgatgtcgacacagtcatcgtccccattggcggcggcggacttatcagcggtgtctcgaccgcaatcaagcacctctcgcccgagacgcgcgtcatcggtgtgcaggcgaccggcgctgagacggtgcatgaaagcctcgacaaagggattccggtcgtgcttgatgaagtcgacaccatcgccgacggtatcgctacgggcggtatctcggagacgacgctcgacatcatcgaggcgaacgtcgacgaagtcgtgacggtttcggacaccgatatcgcacaggcgattctcctgttgatggaacgagccaaacaggtcgtggaaggtgccggggccgcctccgtggctgccatactgagtgacagcctcgacgtgtcgggtgaaacggtgatgccgctgctctgtggcgggaacctcgatatgacacagatgcgagaagttctcattcatgcactcacggagcgccagcagctcctccagctccgggttcggatcgatgaccagccgggtgtgatggaggagatatctggcgtcatcgccagacagggagccaacatccacgacgttcggcacgaacggtccgtcgagaatctcgaaatcggggaggcgtatctcgtattcaacgtcgaaacgagtggtgccgagcacgcacagagtattatcacggcgatacgtgatgcgggctatcccgtcgataacgttgcacgggaggccaaaagtggcgcactgtga

SEQ ID NO: 31588 - protein, 420 aa, Haloarcula marismortui ATCC 43049
MTHTESDTLPVTYADIERARERLDDDTVVKKTPVERSSSLGGFVDAEVYLKMEHLQWTGSFKTRGAYNKISQDVADDVESFVAASAGNHAQGVALAATKCGAESTIFMPENAPQAKIDATRAYGGSVELVGNDFQETMSHAKAVVEETDAEFVHAYDDLDIIAGQGTLGTEMYHDCPDVDTVIVPIGGGGLISGVSTAIKHLSPETRVIGVQATGAETVHESLDKGIPVVLDEVDTIADGIATGGISETTLDIIEANVDEVVTVSDTDIAQAILLLMERAKQVVEGAGAASVAAILSDSLDVSGETVMPLLCGGNLDMTQMREVLIHALTERQQLLQLRVRIDDQPGVMEEISGVIARQGANIHDVRHERSVENLEIGEAYLVFNVETSGAEHAQSIITAIRDAGYPVDNVAREAKSGAL

SEQ ID NO: 31589 - DNA, 1029 bp, Haloarcula marismortui ATCC 43049
  CDS (1)..(1029): transl_table=11
atggccggtcgctacgaaccgatcgactccccggacgagacgaccctctttccgtaccacgacctgacgccgccgacagttgcaacggtcgctcgcgcccggcaacgcatccgacagcacctcccggagacgcccctggtccgaagcgaagccctctccgaagccctcgacgcggatgtcttgctcaagcgagaagatacgctcccgaccggcgcgttcaaagtccgcggcggggtgaacctcgtcgcgtccctcgacgaggagttccacgacgccggactgctcgccgcgagcacgggaaaccacggccagtctatcgcctgggccgggcgtgagttcgacgtacccgttactatcggcgtccccgaagaagccaacgccggaaaggtcggcgcgctggagcaactcggcgcagaagtcatccagtacggcgaggactacgacgaggcccgcgaacacatcgaggacttggcgacccagcgcgaggcgcgctacgtccactcgggcaacgaaccgaagctgctcgccggcgtcggcacggcggggctcgaaatccttgacgagcgccccgacgtcgaccgtgtgttctgccccgtcggcggcggcaccgccgcggccgggtactgcactacgctcggggcgatgaccgacgccgatgtcgtcggcgtgcaggctgcgggcgcgcccgcggtgtaccgcgcttggcaggacgagacgctggacgccctcgacagcgtcgacactatcgccgagggtgtcgcaacccgggttccgttcgcgctcccgaccgaaatcctgcaggcgggactcgccgatttccgactcgtgtccgaagacgccattaccgatgccgtggcgcgcctgttcgaaacagaccgcatcgtcatggaaggggcctgtgcgacggctgtcgccgcagcgattcaggctggtgacgaactacggggcgagacggtcgtccttcccatttcgggacggaacatcgaccgagagaagtttgaccgactgctggccgaaagcgagtactag

SEQ ID NO: 31590 - protein, 342 aa, Haloarcula marismortui ATCC 43049
MAGRYEPIDSPDETTLFPYHDLTPPTVATVARARQRIRQHLPETPLVRSEALSEALDADVLLKREDTLPTGAFKVRGGVNLVASLDEEFHDAGLLAASTGNHGQSIAWAGREFDVPVTIGVPEEANAGKVGALEQLGAEVIQYGEDYDEAREHIEDLATQREARYVHSGNEPKLLAGVGTAGLEILDERPDVDRVFCPVGGGTAAAGYCTTLGAMTDADVVGVQAAGAPAVYRAWQDETLDALDSVDTIAEGVATRVPFALPTEILQAGLADFRLVSEDAITDAVARLFETDRIVMEGACATAVAAAIQAGDELRGETVVLPISGRNIDREKFDRLLAESEY

SEQ ID NO: 31591 - DNA, 1212 bp, Haloarcula marismortui ATCC 43049
  CDS (1)..(1212): transl_table=11
atgctctcatttgaggatgtcctcgcggcacaggacaccgtctccgagacggccagacacacaccgcttgattactcgcacacgttttcggcgatgacgggcgcggatatccatctcaaactcgaactgttccagcgtacggggtcgttcaagatacggggtgcgaccaaccgtatcgcgtcgctttcagatgctgaacgggaggctggcgtcgtcacagcgagcgccggcaaccacgctcagggggtcgcgctggccgccacgcgaatcggcgtcgactcgaagattgtgatgccggagcgggccccggtatcgaaagtgaaggccacccggagctacggcggtaacgtggtccttcacggtcgggactacgacgcggccgccgaacacgcccacgaactcgaacgcgaggaaggccggacatacgtccatgccttcgacgacgagaaagtgatggcagggcaggggaccatcggactggagatctacgaggacctccccggcgttgatacggtcgtcgtccctatcggcggcggcggacttattagtggcatcgccacggcgctcaaaggcaaggacgaacgtatccgcgtcatcggcgtgcaggccgagggagcgtccagcgtggccgaatccctggagaagggccaccgcatcgagcgtgacagcgtcgaaactatcgccgacggtatcgccacccgcactgtcggcgagcagacgttcgaggtcatcagcgaccgcgtcgacgaggtcgtgacggtgtcggactcggaaatcgcagtcgcgctgacgacactgttagagcgctcgaaaacgcttgccgagggcgcgggtgccgtcgcgctggctgccgtcatggaagagaagttcgacttcgaggacgacgagacgatcgttcccgcgctgtgtggcgggaacatcgacctgaacaccctgaccaacgtcatcatgcgcggcctcgttgagactggccggtatctcaaaatccggaccgtccttcaggaccggcccggcgcgctggaagagctcgtcgaggtcctgtcacgcgagcaggtcaacatctacggcatcgagcacgaccggaccagtcgcgacgtggcgatgagttcggccgaggtcgaactggacctggagacccgcggccacgaccacgtcgccgaactcatcgacgcgctcaccgacgaggggtatgaggtcgacgtgctcgtctga

SEQ ID NO: 31592 - protein, 403 aa, Haloarcula marismortui ATCC 43049
MLSFEDVLAAQDTVSETARHTPLDYSHTFSAMTGADIHLKLELFQRTGSFKIRGATNRIASLSDAEREAGVVTASAGNHAQGVALAATRIGVDSKIVMPERAPVSKVKATRSYGGNVVLHGRDYDAAAEHAHELEREEGRTYVHAFDDEKVMAGQGTIGLEIYEDLPGVDTVVVPIGGGGLISGIATALKGKDERIRVIGVQAEGASSVAESLEKGHRIERDSVETIADGIATRTVGEQTFEVISDRVDEVVTVSDSEIAVALTTLLERSKTLAEGAGAVALAAVMEEKFDFEDDETIVPALCGGNIDLNTLTNVIMRGLVETGRYLKIRTVLQDRPGALEELVEVLSREQVNIYGIEHDRTSRDVAMSSAEVELDLETRGHDHVAELIDALTDEGYEVDVLV

SEQ ID NO: 31593 - DNA, 1251 bp, Streptococcus thermophilus CNRZ1066
  CDS (1)..(1251): transl_table=11
atgattactgcaaatgatatcgtaaaggctaatgaagtcttaaaaaacgtggtggagcgtaccccactagattttgatcgctacttatctgaaaaatatggagcgactatttatattaaaaaagaaaatatgcaaaaggtacgttcctttaaattacgtggtgcctactatgcgatccatcagttaagtgatgaagacaaggaacatggtgtggtctgtgcatcagccggaaaccatgcccaaggtgttgcttatacttgtaatgaaatgaagattcctgcaactatctttatgccagtaacaactcctctccaaaaaattggtcaagtacgtttctttggtggcaagtttgtaacaattaaattggttggagatacctttgatgaatctgctaaagcggcacaagagtatacgaagtcggaagggatgactttcattgatccattcgatgattataatgtccaagcgggtcaaggaactgttgcttatgaaatttatgagcaagctcaagaggaaggtgtttcctttgatagtatcttagtgccggtaggtgggggtggactcatctctggtgtggctacctatatcaaggatgtggcaccctctatagaggttgtaggtgttgaggctagtggtgctcgtagtatgcgtgcagcctttgaccatggttatcctgtaaaacttgaaaagattgataagtttgcagatgggattgctgtccaaaaggtaggtgcaaaaacttacgaagttgctcgtaaatatgtagatcgtctcttgggagttgatgaaggattaatctcagaaaccttaattgatatgtactcgaaggttggtactatcgcagaacctgcaggggcagcatcagttgcggcacttgaagtgattaaagatgaaatcaaaggaaaaactatcgtttgcatcatttcaggcggtaataatgatatcaaccgtatgccagagatggaagaacgtgcccttatctatgatgggatcaagcactattttgtggttaatttcccacaacgtccaggagcccttcgtgagtttgtaaatgatatcttagggccaaatgatgacattactcgttttgagtacatcaaacgtgccaataaaggaaaaggtccagttctcattggtatagctcttagtgataagaatgattatgatggccttcttgagcgtctttctgaatttgatccaagttacattaatcttaacggaaatgaaacactttacaacatgcttgtctga

SEQ ID NO: 31594 - protein, 416 aa, Streptococcus thermophilus CNRZ1066
MITANDIVKANEVLKNVVERTPLDFDRYLSEKYGATIYIKKENMQKVRSFKLRGAYYAIHQLSDEDKEHGVVCASAGNHAQGVAYTCNEMKIPATIFMPVTTPLQKIGQVRFFGGKFVTIKLVGDTFDESAKAAQEYTKSEGMTFIDPFDDYNVQAGQGTVAYEIYEQAQEEGVSFDSILVPVGGGGLISGVATYIKDVAPSIEVVGVEASGARSMRAAFDHGYPVKLEKIDKFADGIAVQKVGAKTYEVARKYVDRLLGVDEGLISETLIDMYSKVGTIAEPAGAASVAALEVIKDEIKGKTIVCIISGGNNDINRMPEMEERALIYDGIKHYFVVNFPQRPGALREFVNDILGPNDDITRFEYIKRANKGKGPVLIGIALSDKNDYDGLLERLSEFDPSYINLNGNETLYNMLV

SEQ ID NO: 31595 - DNA, 936 bp, Thermus thermophilus HB8
  CDS (1)..(936): transl_table=11
atgccttccctccaagacctctacgccgccttccgccgcatcgccccctacacccaccgcacccccctcctcacctcccgcctcctggacgggctcctgggaaagcgcctcctcctcaaggccgagcacctgcagaagacggggagcttcaaggcccggggggcgctttccaaggccctcgccctggaaaaccccaaggggctcctcgccgtctccagcggcaaccacgcccagggggtggcctacgccgcccaggtgctcggggtaaaggccctggtggtcatgcccgaggacgcgagcccctacaagaaggcctgcgcccgggcctacggggccgaggtggtggaccggggggtgacggcaaagaaccgggaggaggtggcccgggcccttcaggaggagacgggctacgccctgatccacccctttgacgaccccctggtcatcgccgggcaggggacggcggggcttgagcttctggcccaggcggggcggatgggggtcttccccggggccgtcctcgcccccgtggggggcggggggctcctcgcgggcctggccacggcggtgaaggccctctcccccacaaccctcgtcctcggggtggagcctgaggccgcggacgacgccaagagaagcctggaggcgggaaggatcctccgcctggaagcgccccccaggacccgggcggatggggtgcggacgctaagcctgggggagcgcaccttccccatcctgcgggaaagggtggacgggatccttacggtgagcgaggaggccctcctcgaggcggagcgcctcctcttcacccgcaccaagcaggtggtggagcccacgggggcccttcccctggccgcggtgctggagcacggggcgaggcttccccaaaccctcgccctcctcctctccgggggcaaccgggacttctctccctag

SEQ ID NO: 31596 - protein, 311 aa, Thermus thermophilus HB8
MPSLQDLYAAFRRIAPYTHRTPLLTSRLLDGLLGKRLLLKAEHLQKTGSFKARGALSKALALENPKGLLAVSSGNHAQGVAYAAQVLGVKALVVMPEDASPYKKACARAYGAEVVDRGVTAKNREEVARALQEETGYALIHPFDDPLVIAGQGTAGLELLAQAGRMGVFPGAVLAPVGGGGLLAGLATAVKALSPTTLVLGVEPEAADDAKRSLEAGRILRLEAPPRTRADGVRTLSLGERTFPILRERVDGILTVSEEALLEAERLLFTRTKQVVEPTGALPLAAVLEHGARLPQTLALLLSGGNRDFSP

SEQ ID NO: 31597 - DNA, 1209 bp, Geobacillus kaustophilus HTA426
  CDS (1)..(1209): transl_table=11
atgttgacattagcagacattgaacaagcgcgagcgaaaatgaaaggcatcgtccatcaaacgccgcttgagcattcgcaaacgttcagccggctgtctggcaatgatgtatatatgaaactcgaaaatttgcaaaaaacgggctcgtttaaagtaagaggttcattcaataaaattatgtcgctcacggaagaagagagggcgcgcggcgtcatcgccgcttcggccggcaaccacgcccaaggggtcgcctatgcgagcggcatgcttcatattccgtgcacgatcgtcatgccaaaaggcgcgccgctcagcaaaattgaagcgacgaaaagctacggggcggaagtcgtgctgtacggcgatgtgtttgacgagtctttggaatatgcgttagagttgcagcgtgaacgggggatgacgtttgttcatccgtttgacgacttggcggtgatggccggccaagggacgatcggcttagagctgatcgagcagcttcccgacgtcgatgtcgttctttgtccagtcggcggcggcgggttgcttgcgggggtggcgcttacgttaaaacagctgaagccgtcggttgaagtgtacggcgttgagtcatcggcttgccccggcatgacggcggccatacgccataaacagcccgtctccattgccgcatcgaatacgatcgccgatgggattgccgtgaaaaagccgggcaatattacgtaccaatacattgagcaatacgtcgatggcgttgtatgcgtggaagaggcggaaatttcgcggacgatgctgtatgtgctcgagcggaacaagctgttgatcgaaggggcggcagcttgtccgctggcggcattgttgtatcaaaagctgccgtttcgcggcaaaaaagtcgccgccattttaagcggcggcaacgtcgatgtgacgctcatttcccgcatcatcgagcgggggctcgtcgaagccgggcgattcgttacgtttacaacggtcatctccgacaagccgggccagttgaacaagctgctgcgcattattgcggagcttgaggcaaacgtgatgtcgattcatcatcagcgcatcggcgccaaagtgctgccaggtcaggcggaaattcacttttcgctcgagacaaaaaacgaagaccacattcagcaaatctaccaagtgttgttgaaagaaggctacgatgtacagttttaccgatga

SEQ ID NO: 31598 - protein, 402 aa, Geobacillus kaustophilus HTA426
MLTLADIEQARAKMKGIVHQTPLEHSQTFSRLSGNDVYMKLENLQKTGSFKVRGSFNKIMSLTEEERARGVIAASAGNHAQGVAYASGMLHIPCTIVMPKGAPLSKIEATKSYGAEVVLYGDVFDESLEYALELQRERGMTFVHPFDDLAVMAGQGTIGLELIEQLPDVDVVLCPVGGGGLLAGVALTLKQLKPSVEVYGVESSACPGMTAAIRHKQPVSIAASNTIADGIAVKKPGNITYQYIEQYVDGVVCVEEAEISRTMLYVLERNKLLIEGAAACPLAALLYQKLPFRGKKVAAILSGGNVDVTLISRIIERGLVEAGRFVTFTTVISDKPGQLNKLLRIIAELEANVMSIHHQRIGAKVLPGQAEIHFSLETKNEDHIQQIYQVLLKEGYDVQFYR

SEQ ID NO: 31599 - DNA, 1272 bp, Geobacillus kaustophilus HTA426
  CDS (1)..(1272): transl_table=11
atggaacaacagctgaaacggaagcaaggggcggtatacgtcgaggacattttgatcgcgtatcatacgctgaaggatgttgttttccatacgccgctgcaaaaaaatccgctgttatccgagcgctacgagtgcaatgtctacttaaagcgcgaggatttgcaagtcgtgcgttcgtttaagttgcgcggggcgtacaaccggatgaagcatttaaccgatgaggagcggagaaacggggtggtatgcgccagcgccggcaaccatgcccaaggggtggcctattcatgccgggcgcttggcgtgcacgggaaaatttatatgccggcgacgacgcctcggcaaaaagtgtcgcaagtgcagctgtttggcaaagacatggtcgagatcgtgcttgtcggcgacacgtttgacgattcctacaacgaagcggtgaagtgcgccgaggcggaagggcggacgttcatccatccgtttgatgatgaatacgtcattgccggacaggggacgattggcgtcgaggtgttaaacgactgtgatgaaccgatcgactttttgttcgccagcatcggcggcgggggattgatggccggactagggacgtatgtgaaaagcatttctccgtccaccaaagtcatcggggtcgagccggctggcgccccatcgatgaaagcggcgctcgagcgcggacatgtggtgacgctcgatgaaatcgacaagttcgttgacggcgctgccgtcaagacggtcggggaaaagacattcgccttatgccgcggggtgcttgatgacatcgtcgtcgttccggaaggaaaagtatgcacgacgattttggagctgtacaacgaaaacgccattgtcgctgaaccggcaggggcgctgccgatcgccgcgcttgatttttacaaggaacaaatccgaggcaaaacagtcgtctgcgtcataagcggcggcaacaacgacatcgaccggatgcaggaaatcaaagagcgttcgatgatttacgaaggactgcagcactatttcatcgtcaacttcccgcagcgggctggggcgttgcgtgagtttttggatgaagtgcttgggccgaccgatgacatcacccggtttgaatacacgaagaaaaacaacaaagaaagcggaccggcgcttgtgggcatcgaactgaaacggcgcgaagactacgcgccgctcatcgagcggatgaagaaaaaaggcttcccgttccaagaagtgaacaaagacccgaacttgttccatttattgatctaa

SEQ ID NO: 31600 - protein, 423 aa, Geobacillus kaustophilus HTA426
MEQQLKRKQGAVYVEDILIAYHTLKDVVFHTPLQKNPLLSERYECNVYLKREDLQVVRSFKLRGAYNRMKHLTDEERRNGVVCASAGNHAQGVAYSCRALGVHGKIYMPATTPRQKVSQVQLFGKDMVEIVLVGDTFDDSYNEAVKCAEAEGRTFIHPFDDEYVIAGQGTIGVEVLNDCDEPIDFLFASIGGGGLMAGLGTYVKSISPSTKVIGVEPAGAPSMKAALERGHVVTLDEIDKFVDGAAVKTVGEKTFALCRGVLDDIVVVPEGKVCTTILELYNENAIVAEPAGALPIAALDFYKEQIRGKTVVCVISGGNNDIDRMQEIKERSMIYEGLQHYFIVNFPQRAGALREFLDEVLGPTDDITRFEYTKKNNKESGPALVGIELKRREDYAPLIERMKKKGFPFQEVNKDPNLFHLLI

SEQ ID NO: 31601 - DNA, 960 bp, Idiomarina loihiensis L2TR
  CDS (1)..(960): transl_table=11
atgccgaagttatcgctcccctgccatgccgatgtcgtacaagcgcagcaaagaattaatagctataccgtcaagacccctgtgctgacaaaccctgcgttaaatcagcaattgggctgcgaattatttttcaaatgcgagaatttgcaacgtaccggggcctttaagttccgtggtgccactaacgcgctacttaagcttagcccggagcagcgccagcaaggggttatcaccgtgtcttccggcaatcatggtgcggcattagcccatgcaggtaaagctttgggtgtaaaagtaaaagtgggtgtacccattaatgctcccgcaataaaacggcaaaatattgaagccggtggtgcggaaactaccgacatagaacccggtatggcagcgcgtgaagccattgtggccaagtggcaaaaggaaggtaaaagtcactttataccgccttatgatcatgccgacattattgccggtcagggcacagcaacacttgagttactggagcaaactgacgcactggatgctgtaatcacgccactgggtggtgggggcttgctttcaggagcttgtcttgcctgcgacggtaccgaaatacaagtgttcggtgcggagccggaattagcgaatgatgctttcttgtcattaaaagccggagagcggcaaccggcgttacccgcgaaaagcctgtgcgatggcttactgactcaaatcggtgaattgccgtttgccattattcagcaacgtatctgcggtatcttagtcttgaaggatgaagacaccctaagcgccatgaagctgatttggcatcatctgaaaattattgtggaaccgtcgtctgctatcgctttagctgcggttatacaaaataagtcgctatttgaaggtaaacgagtggggttggtgctgagcggtggtaatgttgcagcgcagccggaagatataaagctgcgccagtag

SEQ ID NO: 31602 - protein, 319 aa, Idiomarina loihiensis L2TR
MPKLSLPCHADVVQAQQRINSYTVKTPVLTNPALNQQLGCELFFKCENLQRTGAFKFRGATNALLKLSPEQRQQGVITVSSGNHGAALAHAGKALGVKVKVGVPINAPAIKRQNIEAGGAETTDIEPGMAAREAIVAKWQKEGKSHFIPPYDHADIIAGQGTATLELLEQTDALDAVITPLGGGGLLSGACLACDGTEIQVFGAEPELANDAFLSLKAGERQPALPAKSLCDGLLTQIGELPFAIIQQRICGILVLKDEDTLSAMKLIWHHLKIIVEPSSAIALAAVIQNKSLFEGKRVGLVLSGGNVAAQPEDIKLRQ

SEQ ID NO: 31603 - DNA, 1521 bp, Azoarcus sp. EbN1
  CDS (1)..(1521): transl_table=11
atgactgccgcaatcccggattatctggaaaaaaccctcaacgcccgcgtctatgacgtcgcggaagaaactccgctcgacctcgccccgaacctgtccgcacgcatccacaaccgcatctacctcaagcgcgaggacatgcagccggtattcagcttcaagctgcgcggggcctacaacaagatggcgcacctgccgccgcaggcgctcaagcggggggtgatctgcgcctcggccggcaatcatgcacaaggcgtcgcgctgtcggcgcagaagctcggggtgcgcgcggtgatcgtgatgccgacttcgacgccgcagatcaaggtcgacgcggtcagggcgcggggcggcgaggtggtgctcgccggtgactcctactcggacgcctacgcccactcgctggaactggaaaaggtggacaagctcactttcgtccatccttatgacgacccggacgtcatcgccggacagggcacgatcggcatggagatcctgcgcgcgcaccccgatccgatccacgcgattttctgcgccgttggcggcggcggactgatcgccggcgttgccgcctacgtgaagcggctgcggcccgaaatcaggatcgtcggcgtcgagacggtggacgccgacgcgatgacgcgctcgctcgcagcgggcgaacgggtcgttctcgaccaggtcggcctgttcgccgacggcaccgcggtcaagcagatcggcgaagagactttccggctgtgccgggagtatgtcgacgagatggtcctcgtcgacaacgacgcgatctgcgccgccctgaaagacgtcttcgaggacacgcgctcgatcctcgagccttccggcgcgctggcgatcgccggggcgaaggaatacgcgaagcgccacaatctgcatggcaagtgcctggtagcggtggcgtccggcgcgaacatgaatttcgatcgcctgcgtttcgttgccgaacgcgccgaagtgggcgagcaacgcgaggcggtgttcgccgtgacgatcccggaacgccccggctcgttccgcaaattctgcagcctcgtcggcgatcgccacatcaccgagttcaactatcgctacgccgacgccgaacaggcgcacatcttcgtcggcgtgtcggtgcacaaccgcgccgaggcgtcccgcctcatcgagatgctcgggcgccacgaactgccggcagtcgacctcaccgacgacgaaatggcgaagagccacgtccgctacatggtcggcggacacgcgccgcacatcgacaacgagctggtgtaccgcttcgaattccccgagcgccccggtgccctgatgaatttcctcacgaatctgcactcggactggaacatcagcctgttccactaccgcaaccacggctcggattcgggtcgcgtgctggtcggcatgcaggtgcctcccggcgacaagacggcattcagcgcgtttctcgaccggctcggctatgaatccgccgatgagtccgggaacccggcataccgcatgttcctcggctga

SEQ ID NO: 31604 - protein, 506 aa, Azoarcus sp. EbN1
MTAAIPDYLEKTLNARVYDVAEETPLDLAPNLSARIHNRIYLKREDMQPVFSFKLRGAYNKMAHLPPQALKRGVICASAGNHAQGVALSAQKLGVRAVIVMPTSTPQIKVDAVRARGGEVVLAGDSYSDAYAHSLELEKVDKLTFVHPYDDPDVIAGQGTIGMEILRAHPDPIHAIFCAVGGGGLIAGVAAYVKRLRPEIRIVGVETVDADAMTRSLAAGERVVLDQVGLFADGTAVKQIGEETFRLCREYVDEMVLVDNDAICAALKDVFEDTRSILEPSGALAIAGAKEYAKRHNLHGKCLVAVASGANMNFDRLRFVAERAEVGEQREAVFAVTIPERPGSFRKFCSLVGDRHITEFNYRYADAEQAHIFVGVSVHNRAEASRLIEMLGRHELPAVDLTDDEMAKSHVRYMVGGHAPHIDNELVYRFEFPERPGALMNFLTNLHSDWNISLFHYRNHGSDSGRVLVGMQVPPGDKTAFSAFLDRLGYESADESGNPAYRMFLG

SEQ ID NO: 31605 - DNA, 1242 bp, Azoarcus sp. EbN1
  CDS (1)..(1242): transl_table=11
atgtcgtccatcccggtgccgctcacattgcccgatctcgtcgccgcgcgcgaacgcatccgcgatgcggtcgtccgtaccggccagtggcagaatgacgcgctgtccgacgaactcggcgtgccgctgcaactgaagctcgaaaacatgcagcgcaccggctcgttcaagctgcgcggcgcgacgcacaagatcggccgcctgctggaagccggtgctcggcccgccggcgtcgtcgcggcgtcggccggcaaccacgcgcagggcgttgcgcgcgcggctgcgcgggtcggcctcggggcggtcgtcgtgatgccggcgaacgcgccgctgacgaagatccaggcgtgtcgcaagctcggtgccgacgtgcgcctcgtcggcgacacgctcgaagccgccagcgacgaagcgcgccggctggccgacggcgaagggctcgcgctgatccatccctacgacgactgggacgtgatcgccggccaggcgagctgcggcctggagatgctcgaagacgcgccggacatgaccgtcgcgatcgtgccgctcggcggcggcgggctgctctccggcgtcgcgctggcgctgaagctgcagaatccggcgatccgcgtcatcggcgtgcagaccgacgcggtcgcgccgtggcggcatttcttgcgcgacggcaccctcgaggcggtgcggccggacgcccacacgatcgccgacggcatcaaggtgaaacggccgggaatgctgacgcggcaggtgatcgcgcgccacgtcgacgacatcgtcaccgtcgacgacaacgcgatcgccgaggcgatcgtcacgctgctcgaacgcacgcgcacgatcggcgaaggtgcgggcgtggtcgggctcgcggcgctgctgcagcgcaaggtccgcctcgggcccgacgaccgcgcggtggtcgtgatttcgggcggcaacgtcgatatgacgctcgtcgggcgttcgatcgactacggcctcgcgtcgagcgggcggctgatgagcgtcgcggtgatgatttccgatgcgccgggccagttgctcgcgctgctggcgacagtcgccgaactcggcatgaacgtgcgccatgtcgagcaccgccgcggcgaactgcacgtcgcggtcggcatgaccgaagtgatcctgcagatcgagacgcgcgatgccgagcaccagcacgcgctgctgacgcactttgccgcccagggccttgccgtgcgcaacctgctcgcgggatga

SEQ ID NO: 31606 - protein, 413 aa, Azoarcus sp. EbN1
MSSIPVPLTLPDLVAARERIRDAVVRTGQWQNDALSDELGVPLQLKLENMQRTGSFKLRGATHKIGRLLEAGARPAGVVAASAGNHAQGVARAAARVGLGAVVVMPANAPLTKIQACRKLGADVRLVGDTLEAASDEARRLADGEGLALIHPYDDWDVIAGQASCGLEMLEDAPDMTVAIVPLGGGGLLSGVALALKLQNPAIRVIGVQTDAVAPWRHFLRDGTLEAVRPDAHTIADGIKVKRPGMLTRQVIARHVDDIVTVDDNAIAEAIVTLLERTRTIGEGAGVVGLAALLQRKVRLGPDDRAVVVISGGNVDMTLVGRSIDYGLASSGRLMSVAVMISDAPGQLLALLATVAELGMNVRHVEHRRGELHVAVGMTEVILQIETRDAEHQHALLTHFAAQGLAVRNLLAG

SEQ ID NO: 31607 - DNA, 1239 bp, Zymomonas mobilis subsp. mobilis ZM4
  CDS (1)..(1239): transl_table=11
atggtaagcttggataatccagagactcttcccgtttcacttgatgatatcaaacaggcgcatcaacgcattaagaatgccattattagaaccccgaccctttacagtcggactttgtctgacttgattggtgccggtgtctggctgaaatttgaaaatttccagtttaccgccgcctataaagaacggggtgcgttaaataaattattgtcgctggacaaggttgcccgcgaaagaggggttattgccgcttcggccggaaatcatgcccaaggtctcgcctatcacgggaatcgtttggatattccggtcacgatcgtgatgcctgtccataccccgacggtaaaagtcgagcagacccgtggacatggtgcgaatatcgtcctttatggcgaacaattcgatgaatcccttgcccatgcgttagaattggctgaaaaagacaatctgacctttgtccatcctttcaatgatccagctattattgccggtcagggcacggttgcccttgaaatgttggaagatgccccagcgattgacactctggttgtgccagtgggtggcggcggcctgatttcaggctgtgctgtggttgccaaaaacgcagatcggcctttggatgttattggtgccgaagccgagctttatccttcgatgtatgattatatcaaagggaaaaatctgccttgcggtggggatactctggcagaagggatcgcggttcaggttcccgggcagttaactcgccgttttgttgaagccttggtcgatgatattttgctggtcagtgaaagcaatatcgaacatgctttgtctttgattgttcagattgaaaagacgattgttgaaggggctggcgcggctggtttgggggcgttgctatcgcatcccgaacgattccaaggcagacaggtaggcattatcttttctggcggtaatatcgacacccgcttgttagccaatgttctattgcgtgatttggcacgctctggtcgtctggcgcggttgcgggtcagaatgaaagatcaagcaggtcagctttacaaagtagcgcgtgttttccacgatcagcaggcgaatattgtcgaaatttcttatcagcgcatctttacaaccctgcccgctaagggattatgtgccgatattgaatgtgaaacgcgcgatcaggctcatttgcggcatttaatcgatgctttacgtgaagcgggttatggtgtgaccttgattgaaccggcctga

SEQ ID NO: 31608 - protein, 412 aa, Zymomonas mobilis subsp. mobilis ZM4
MVSLDNPETLPVSLDDIKQAHQRIKNAIIRTPTLYSRTLSDLIGAGVWLKFENFQFTAAYKERGALNKLLSLDKVARERGVIAASAGNHAQGLAYHGNRLDIPVTIVMPVHTPTVKVEQTRGHGANIVLYGEQFDESLAHALELAEKDNLTFVHPFNDPAIIAGQGTVALEMLEDAPAIDTLVVPVGGGGLISGCAVVAKNADRPLDVIGAEAELYPSMYDYIKGKNLPCGGDTLAEGIAVQVPGQLTRRFVEALVDDILLVSESNIEHALSLIVQIEKTIVEGAGAAGLGALLSHPERFQGRQVGIIFSGGNIDTRLLANVLLRDLARSGRLARLRVRMKDQAGQLYKVARVFHDQQANIVEISYQRIFTTLPAKGLCADIECETRDQAHLRHLIDALREAGYGVTLIEPA

SEQ ID NO: 31609 - DNA, 954 bp, Silicibacter pomeroyi DSS-3
  CDS (1)..(954): transl_table=11
atgtatataccgacctttgaggacatgcttgccgcgcatgcgcggatcgaaccccatatccgccgcacgccggttcgggtctcggattacctcaacgagctgaccggtgcgcagctgttcttcaaatgcgagaactttcaggagccgggcgcgttcaagatacgcggcgctaccaacgcggtgtttggcctggacgatgcccaggccgcaaagggggtcgccacgcattcatcgggcaatcatgcctcgtgtctgagctatgccgcgatgctgcgcggtatcccctgcaacgtggtgatgccaagcaccgcgccgcaggccaagaaggacacggtgcgccgttatggcggggtcatcaccgaatgcgccccctcgaccagcgcgcgcgaagagacctttgcccgggtgcaggcgcaaaccgggggcgatttcgtgcatccctataacgacccccgggtgatcgcggggcaggggacatgcgcgcgcgaactgatggaacagaccgatggtctggatatcgtggtggcaccgatcggcggtggcggcatgatctctggcacctgcctgaccctgtcgacactggcgcccgagacccgagtgatcgcggccgaaccggaacaggccgatgacgcctatcgcagcttcaaggcgggccatatcatcgccgatgacgcacccaagaccattgccgatggtctgctggtaccgctcaaggatctgacctggcatttcgtcagcaaccatgtggccgaaatctacacggcctccgagcaggagatcatcgaggcgatgaagctgacatggaaacacctgcgcgtggtgatggaaccctccagcgcggtgccgctggcgacgatcctgaagaaccgcaaggcatttgcgggcaagcgcgtgggcgtaatcattaccggcggcaacgtcgatctggacaaacttccttggatgaacgggtga

SEQ ID NO: 31610 - protein, 317 aa, Silicibacter pomeroyi DSS-3
MYIPTFEDMLAAHARIEPHIRRTPVRVSDYLNELTGAQLFFKCENFQEPGAFKIRGATNAVFGLDDAQAAKGVATHSSGNHASCLSYAAMLRGIPCNVVMPSTAPQAKKDTVRRYGGVITECAPSTSAREETFARVQAQTGGDFVHPYNDPRVIAGQGTCARELMEQTDGLDIVVAPIGGGGMISGTCLTLSTLAPETRVIAAEPEQADDAYRSFKAGHIIADDAPKTIADGLLVPLKDLTWHFVSNHVAEIYTASEQEIIEAMKLTWKHLRVVMEPSSAVPLATILKNRKAFAGKRVGVIITGGNVDLDKLPWMNG

SEQ ID NO: 31611 - DNA, 975 bp, Silicibacter pomeroyi DSS-3
  CDS (1)..(975): transl_table=11
atgagcacccttgaactgatcgaagccgctgccgagcggctgtcgggccatgtccgccgcacaccgctgctctcctcgccctttctggacgagatcgccgggcgccgggtactggtgaaacccgaatgcctgcaacataccggcagcttcaagtttcgcggcgcatggtcggccatttccgcgctggaccccgaggcgcgcgcgcgcggggtcatcgccttttcctcgggcaaccatgcgcaaggggtcgcccatgcggccacgctgcatggcatcgcctcggtcatcgtgatgccctcggacgcgccccggctcaagatcgacaacacaagagcgctgggggccgaggtggtgctgtatgaccggggccgcgaaagccgcgaagagatcggcaccgcgctggccggtgaacgcgggctgacgctgatccggccctatgacgaaccgcaggtgatcgccggtcaggccagcgtcgggctggaactggccgaacaggcgggcgaactgggggtcgagagcggcgatgtgctggtctgttgcggcggtggcgggttgacctcgggcgtggcactggcgctggaggcgcgggcgccgggcctgagggcgcgcccggtcgagcccgaggggtttgacgatgtgaaacgctcgcttgccggcgggaccatcagccgcaacaattcggaaaccggcaatatttgcgacgcgatcctgacgccggaaccgggcaggattacctttccgatcctcagccggctctgtggccccggcctggccgttaccgaggacgaagccctgcgcgccatggcgctagcctttctgcgcctcaagatcgtgctggaaccgggcggggcggtctcgctggcggcggccctgtttcacccggaccaggtcgaaggcgacaccgtgctggccgtggcctcgggcggcaatgtcgacgcggccctgttccgcaccgcgctggagctccacgcgtga

SEQ ID NO: 31612 - protein, 324 aa, Silicibacter pomeroyi DSS-3
MSTLELIEAAAERLSGHVRRTPLLSSPFLDEIAGRRVLVKPECLQHTGSFKFRGAWSAISALDPEARARGVIAFSSGNHAQGVAHAATLHGIASVIVMPSDAPRLKIDNTRALGAEVVLYDRGRESREEIGTALAGERGLTLIRPYDEPQVIAGQASVGLELAEQAGELGVESGDVLVCCGGGGLTSGVALALEARAPGLRARPVEPEGFDDVKRSLAGGTISRNNSETGNICDAILTPEPGRITFPILSRLCGPGLAVTEDEALRAMALAFLRLKIVLEPGGAVSLAAALFHPDQVEGDTVLAVASGGNVDAALFRTALELHA

SEQ ID NO: 31613 - DNA, 1227 bp, Silicibacter pomeroyi DSS-3
  CDS (1)..(1227): transl_table=11
atgagcgatttcatgacccgagcccgcgccgccgaacaggcgatgcgcgaagttttccccgccacgccgttgcagcgaaacgaccatctgtcggcgcgttatggcgccgatatctggcttaagcgcgaggatctgagcccggtccgctcctacaagatccgaggtgcgttcaacgcgatgcgcaagcagccggggcaggggctgttcgtctgtgcaagtgccggcaatcatgcccagggcgtggcctttatgtgtcggcacatgggggtacggggcgtgatcttcatgccggtgaccacgccgcagcagaagatccagaagacccgcatgttcggcggcgatcaggtcgaaattcacctgaccggcgactatttcgaccagacgctggccgccgcacaggcctggtgcgcgcaggagggtgggcatttcctgtcgcccttcgacgatgccgatgtgatcgaggggcaggcctcgctggccgtcgagatcgaggaacagctgggcggcgtgcccgatcatgtggtgctgccggtgggtggcggcggcatgtcggcgggggtggcgacctggttcggggatcgcagccattgcatctttgtcgaacccgagggcggcgcctgcctgcgcgcggcgctggcggcggggcatccggtaaagctggatcatgtggacaatttcgtcgatggcgcggcggtgggccggatcggggaaaagacattcgaactgctgaaatcgcggcacatgtccgatgtgctggtgatgcccgaagatcgcatctgcaccaccatcatcgagatgctgaatgtcgaggggatcgtgctggaacccgccggcgcgctgtcggtcgaggcggtggccgatgtgcaaagctttgtccggggcaagacggtggtctgcgtcacctcgggcggcaatttcgatttcgaacgcctgcccgaggtcaaggagcgcgcgcagcgctatttgggggtcaagaaatacttcctgctgcgcctgccacagcgaccgggcgcgctgaaggaatttctgaacattctggggcccgatgacgatatcgcccggttcgaatacatgaagaaatcggcgcgcaatttcggctcggtcctgatcgggatcgaaaccgcgaggcccgagaacttcgaacgcctttacgcccgtctggacgaggccgggtttacctataccgatatcacccgcaacgagacgctggcgcaattcgtgatctga

SEQ ID NO: 31614 - protein, 408 aa, Silicibacter pomeroyi DSS-3
MSDFMTRARAAEQAMREVFPATPLQRNDHLSARYGADIWLKREDLSPVRSYKIRGAFNAMRKQPGQGLFVCASAGNHAQGVAFMCRHMGVRGVIFMPVTTPQQKIQKTRMFGGDQVEIHLTGDYFDQTLAAAQAWCAQEGGHFLSPFDDADVIEGQASLAVEIEEQLGGVPDHVVLPVGGGGMSAGVATWFGDRSHCIFVEPEGGACLRAALAAGHPVKLDHVDNFVDGAAVGRIGEKTFELLKSRHMSDVLVMPEDRICTTIIEMLNVEGIVLEPAGALSVEAVADVQSFVRGKTVVCVTSGGNFDFERLPEVKERAQRYLGVKKYFLLRLPQRPGALKEFLNILGPDDDIARFEYMKKSARNFGSVLIGIETARPENFERLYARLDEAGFTYTDITRNETLAQFVI

SEQ ID NO: 31615 - DNA, 1008 bp, Silicibacter pomeroyi DSS-3
  CDS (1)..(1008): transl_table=11
atgacgacgaaaatcactcttcaggacagcatcagggcgcgggcgcggattgccgggcgtatccgcgaaacccctttggtggaatcgccctctctcagcagtctgagcggcaggcaagtcctgctaaagctggaaagcaggcagatcaccggcagcttcaagctgcgcggcgccaccaatgcggtcttgtcgctgacggatacgcagcgcgcggcgggcgtggttggggtatctaccggcaaccacgggcgcggactggcctatgcggcggcagaggccgaggtgcgttgcatcatctgcatgtcggaactggtgccgcagaacaaggttgacggcatcagatcccatggcgccgaggtgcgtatcctgggccggtctcaggacgatgcgcagcaggaagtcgaccggctggtcagagatggcatgaccatgctgcccccctttgaccatccggatatcattgccggccagggcaccgtcgcgctggaaatgctggatcaggcgccagaccttgaaaccgtgttggttcccctgtcgggtggcgggctgatttccggtgtcggcatggttctgaaagcggcgaacccggatatccgggtgatcggcgtcagcatggaacgcggcgccgcgatgtatgaatgcctgcaggcgggcaggcccgttcaggttgcggaactgcccacattggccgactctctgggcggggggatcgggctggacaatgcctatacattcgaaatgaccaaggcgtttgtcgatgaggtggtgctggtgtccgaggctgaaatcgccgccgccatccgccatgcctatttcgaggaacgcgaggtgatcgaagggtccggcagcgtcggcatcgcggcgctgctggccggcaagatcggcaatcccggccgttgtgtgtcgctggtgagcggtcagaacatcgctatggacctgcacaaacgcatcatcgacggtgaagacgtggatgtggaagccgacatcaaaggaggcgcagatgcctga

SEQ ID NO: 31616 - protein, 335 aa, Silicibacter pomeroyi DSS-3
MTTKITLQDSIRARARIAGRIRETPLVESPSLSSLSGRQVLLKLESRQITGSFKLRGATNAVLSLTDTQRAAGVVGVSTGNHGRGLAYAAAEAEVRCIICMSELVPQNKVDGIRSHGAEVRILGRSQDDAQQEVDRLVRDGMTMLPPFDHPDIIAGQGTVALEMLDQAPDLETVLVPLSGGGLISGVGMVLKAANPDIRVIGVSMERGAAMYECLQAGRPVQVAELPTLADSLGGGIGLDNAYTFEMTKAFVDEVVLVSEAEIAAAIRHAYFEEREVIEGSGSVGIAALLAGKIGNPGRCVSLVSGQNIAMDLHKRIIDGEDVDVEADIKGGADA

SEQ ID NO: 31617 - DNA, 921 bp, Silicibacter pomeroyi DSS-3
  CDS (1)..(921): transl_table=11
atggattggaaagcggatatcgcggcggcggcggatcggatcgccgggcatgtgcaagtgaccccggtgatggagacgcgcggatttggcctgtccgacccgctttccctgaagctggaacagatgcagcataccggcagtttcaaggcgcgcggggcctttaataccctgctgtccagcgacgtgcccgctgcgggtgtggtggccgcatcgggtggcaatcatggtgcggcggtggcctatgcggcccgcgctctgggccatcgcgccaagatcttcgtgccggaaatggctggccccgccaagatcgcgctgatccgggataccggcgccgatcttgaggtggtgccgggcgaatatgccaatgcgctggccctggcgcaggcgcatgaggccgccaccggcgcgatgcagatccatgcctatgacgcgcccgcgaccgttgccgggcagggcacctgctttgccgaatgggatgcgcaggggctagaggccgatacggtggtgatcgcggtcggcggtggcggtctggtcgccggggcgctggcctggtggcagggtgcgcgcaaggtggtcgcggtcgagccggaaacctcctgcgcgctgaatgccgcgctgaccaacggtgggccggtcgatgtcgaggtgtcgggcatcgccgccaatgcgctgggcgcgcggcggatcggcgagatctgtttcggtctggcgcaggggggtgcccggtcggttctggttccggacgcggcgattgccgcggcccagcgcgcgctctgggccgagcgccgggttctggtcgagcccgcgggtgcaaccgcgctggcggcgctgatgtgcggcgcctatcgtcccgagccggacgagcgggtggcggtactggtttgcggtggcaatatcgccccggatccctttgccgggtga

SEQ ID NO: 31618 - protein, 306 aa, Silicibacter pomeroyi DSS-3
MDWKADIAAAADRIAGHVQVTPVMETRGFGLSDPLSLKLEQMQHTGSFKARGAFNTLLSSDVPAAGVVAASGGNHGAAVAYAARALGHRAKIFVPEMAGPAKIALIRDTGADLEVVPGEYANALALAQAHEAATGAMQIHAYDAPATVAGQGTCFAEWDAQGLEADTVVIAVGGGGLVAGALAWWQGARKVVAVEPETSCALNAALTNGGPVDVEVSGIAANALGARRIGEICFGLAQGGARSVLVPDAAIAAAQRALWAERRVLVEPAGATALAALMCGAYRPEPDERVAVLVCGGNIAPDPFAG

SEQ ID NO: 31619 - DNA, 969 bp, Bacillus clausii KSM-K16
  CDS (1)..(969): transl_table=11
atggacacgattcctgtcaaagcggtatggcaagcacgcaaacggctttttccttatctgccaaaaacgcccctcgtttatagcgctcccttatcgggtcatttccgaacgcctgtttggttgaaattagaaacattacagccgagcggctcatttaagctccgcggggcgatgaacgtgctcttgtctatgtcagctgagtcaagacaaaaaggcgttgctgctttttccacgggaaaccatggccttgcggtcgcctatgccgccaaacaggctaaaacgcaggcgacgatttttgtatcggaagcagtaccgactgctaagcaagctgcacttcaagccagcggggcaacgctaactgtgacagggcgcagccaagatgaagcaggagccgcctgtatccgccattgccagcaaacagggcagacgctcgtccctccatttgacgacgacaggattatcgctggccaaggcacactcgctttagagctgctagacgatttgcctgaacttgaaacggtgatcgctggattatcaggaggagggttgcttagcggtattgggctagtaatgaaacataccgatccgacgattcaagttgccggggcaagcatcgtcaacggagccgctatggaagccagtttggcagcgggccatccagtagaagtagccgaacagccgactgtggccgatagccttcttggcggaatcgctctggacaaccgttggacgtttaaggcggtgcaacgttatgtcgacacccgtgtacaagttccagaagaagacattgccaaggcgatggcgtatttatatgagcatcaccatttaatcgtggaaggagcagctgccataggagcagccgcactgttaaataatagcattcgccctaaagggcgtaccgctgttgtcattactggcgccagcattcacccaaaagagcatcaccgcattattcgcccttacctctag

SEQ ID NO: 31620 - protein, 322 aa, Bacillus clausii KSM-K16
MDTIPVKAVWQARKRLFPYLPKTPLVYSAPLSGHFRTPVWLKLETLQPSGSFKLRGAMNVLLSMSAESRQKGVAAFSTGNHGLAVAYAAKQAKTQATIFVSEAVPTAKQAALQASGATLTVTGRSQDEAGAACIRHCQQTGQTLVPPFDDDRIIAGQGTLALELLDDLPELETVIAGLSGGGLLSGIGLVMKHTDPTIQVAGASIVNGAAMEASLAAGHPVEVAEQPTVADSLLGGIALDNRWTFKAVQRYVDTRVQVPEEDIAKAMAYLYEHHHLIVEGAAAIGAAALLNNSIRPKGRTAVVITGASIHPKEHHRIIRPYL

SEQ ID NO: 31621 - DNA, 1245 bp, Bacillus clausii KSM-K16
  CDS (1)..(1245): transl_table=11
atgaccacgcatttacaggatattattcgagcaaatcaacaaattaaagatgtcgtgacgcatacacctttgcaaaaagatcaggttttgtctgaacgatatgattgcacagtttatttaaaacgagaagacatgcaagttgtcagatcttttaaaattcgcggcgcctattaccaaatttcttctctttcaaaagaagaacttgccgctggggttgtatgcgcaagcgctggaaaccatgcacaaggggttgcctactcatgccgcgctttaaaagtcaaaggtgttattttcatgccgactaccacgccaaagcaaaaagtcgcacaagtgaaattttttggcagggactatgtggacgttagattaattggcgatacgtttgatgattcttatgcggacgccattcaatactgcgaagagcaggaaatgacgttcatccacccatttaaccaagacaaagtgattgctgggcaaggaacagtcgggcttgaaattatgaatgacattgaggaaacgccagactttgtgttttcatcaatcggcggtggtgggcttattagtgggatggcaacgtatataaaaagcgttagcccgtctacgaaaatgattggctgtgaaccagccggtgctgcatcgatgacagaatcaattaagcaaggcaacgttgttgagttagacgaaatcgataaatttgtcgatggggcagctgtgaagaaagtcggcgacaaaacatttgaaatttgcaaagagctgctagatgacattattgttgttccagaaggaaaaatttgcacaacgattttaaacctttacaatgagaatgcgctagtcgctgaaccggcaggggctatgcctattgctgctcttgatttgtatacggaacaaattaagggaaaagtcgttgtctgtattgttagtggcggcaacaacgacatcgggcgcatggaggaaatccgggaacgttcgctcatttatgaaggattgcagcattactttatcgttgaatttccacagcgagctggggcgctacgtgagtttattaccgatgtgctcggcccggaagacgacattactcgctttgaatatacaaagaaaaacaataaatcgaacggtccagtattaattgggattgaactgaaatgcagcaaagattatgatgggttaatcgaaagaatggaaaagattggatttgcctataatgaagtcaacaaggatgaaaatttgttttctttgctgatttga

SEQ ID NO: 31622 - protein, 414 aa, Bacillus clausii KSM-K16
MTTHLQDIIRANQQIKDVVTHTPLQKDQVLSERYDCTVYLKREDMQVVRSFKIRGAYYQISSLSKEELAAGVVCASAGNHAQGVAYSCRALKVKGVIFMPTTTPKQKVAQVKFFGRDYVDVRLIGDTFDDSYADAIQYCEEQEMTFIHPFNQDKVIAGQGTVGLEIMNDIEETPDFVFSSIGGGGLISGMATYIKSVSPSTKMIGCEPAGAASMTESIKQGNVVELDEIDKFVDGAAVKKVGDKTFEICKELLDDIIVVPEGKICTTILNLYNENALVAEPAGAMPIAALDLYTEQIKGKVVVCIVSGGNNDIGRMEEIRERSLIYEGLQHYFIVEFPQRAGALREFITDVLGPEDDITRFEYTKKNNKSNGPVLIGIELKCSKDYDGLIERMEKIGFAYNEVNKDENLFSLLI

SEQ ID NO: 31623 - DNA, 1071 bp, Bacillus clausii KSM-K16
  CDS (1)..(1071): transl_table=11
atggctgcttgggcaggacttttaaaagaatacggctcgtatttgccgattacggaaaacacgccggcattgacgcttggcgagggcaatacgcctttaattaaactcgaacatttatcagaagagtggggcgtagagctttatgtgaagtatgaaggggcaaacccgactggctcgtttaaagacagaggaatggttgttgctgtcgcaaaagcaaaagaagaaggggcgcaggcgcttatttgcgcctcaacaggcaatacgtctgcggcagcttccgcctacggggcccgcgcggggcttcgttcaattgtcgtcattccaaaaggcaaaacggcacttgggaaagtagcccaagcggcgatgtacggagcagaaatcattgaaattgaaggaaactttgaccgcgctcttgcgctcgtaagagaattatgtgaaacggagccaattgcccttgtcaactcggtcaacccatataggctccacggccaaaagacagcagcttttgaaatttgtgatgcgctaggggctgctccagatgtattggcgatccctgtcggaaatgccggaaacatctctgcttattggatgggctttaaagaatacgatgagttgcaccaaacgggccggccgcgtatgcatggatttgaagcggaaggggcggcagcgattgtgaagcaacatgtcattgagcacccagagacgattgccactgccattcgcatcggcaatccggcgagttggaaattggctgtacaagctgcgaatgagtcaaaaggcgaaatcgacttagtgacggacgaagaaattgtcgaggcgtaccgggaaatagcgaaaaaagaaggcatatttgctgaaccaggttcatgtgcatcattggctggcttaaaaaaacacattcaagcagggaaagtagcaaagggctccaaaattgtcgccgttctaactggcaatggcttgaaggacccgacaacagctatagatctttccaatgtgcaaacgacaacggttgaagattcaaaaacagcgttggccgattacttaatggccacaaagccggcggtcaagtaa

SEQ ID NO: 31624 - protein, 356 aa, Bacillus clausii KSM-K16
MAAWAGLLKEYGSYLPITENTPALTLGEGNTPLIKLEHLSEEWGVELYVKYEGANPTGSFKDRGMVVAVAKAKEEGAQALICASTGNTSAAASAYGARAGLRSIVVIPKGKTALGKVAQAAMYGAEIIEIEGNFDRALALVRELCETEPIALVNSVNPYRLHGQKTAAFEICDALGAAPDVLAIPVGNAGNISAYWMGFKEYDELHQTGRPRMHGFEAEGAAAIVKQHVIEHPETIATAIRIGNPASWKLAVQAANESKGEIDLVTDEEIVEAYREIAKKEGIFAEPGSCASLAGLKKHIQAGKVAKGSKIVAVLTGNGLKDPTTAIDLSNVQTTTVEDSKTALADYLMATKPAVK

SEQ ID NO: 31625 - DNA, 978 bp, Rhodobacter sphaeroides 2.4.1
  CDS (1)..(978)
atgagcgacatcgcgatgatcgaggctgcagcggcccggcttgcgggccatgcccggcggacgccgcttctctcctcgccctttctcgacgagatcgcggggcggcgggtgctggtgaaggccgagtgcctgcagcacacgggctcgttcaagttccgcggcggctggtcggcgctctcggcgctggagccggcccggcgcgcgcagggcgtgatggcctattcctcgggcaaccatgcgcagggcgtggcgctggccgcggcccgccacggcgcgcccgccgtgatcgtcatgcccgccgatgcgccgcagctgaagatcgagaacacccgcgcgctcggcgccgaggtggtgctctacgaccgcgcgaccgaggaccgcgatgcgatcggcgcgcggctggccgacgagcggggtctcaccctgatccgccccttcgacgagcccctcgtgatcgccggtcagggcacgaccgggctcgagatcgccgagcaggcggccgaggagggcgtgacctctgccgatgtcctcacctgctgcggcggcggcgggctcaccgcgggcatcgcgctggcgctcgaggcgcgcgcgcccggcctccgggtccgcccggtcgagccggtggggttcgacgatacggcacgcagcctcgccgccggcgagatccggtcgaacgcggcgctctcgggctcgatctgcgatgcgatcgtgacgccccagccgggccggatcacctttccgatcctcgcgcggctctgcgggccgggcctcgccgtcaccgacgcggaggcgctccgcgccatggcgctggccttcctgcggctcaagatcgtgctcgagcccggcggggcggtggcgctggccgcggcgctcttccggcccgacgcgctcgagggcgacgccgtgatctgcaccgcctcgggcggcaatgtggatccgcccctctttgcccgcgccctcgcggaggccgccgactga

SEQ ID NO: 31626 - protein, 325 aa, Rhodobacter sphaeroides 2.4.1
MSDIAMIEAAAARLAGHARRTPLLSSPFLDEIAGRRVLVKAECLQHTGSFKFRGGWSALSALEPARRAQGVMAYSSGNHAQGVALAAARHGAPAVIVMPADAPQLKIENTRALGAEVVLYDRATEDRDAIGARLADERGLTLIRPFDEPLVIAGQGTTGLEIAEQAAEEGVTSADVLTCCGGGGLTAGIALALEARAPGLRVRPVEPVGFDDTARSLAAGEIRSNAALSGSICDAIVTPQPGRITFPILARLCGPGLAVTDAEALRAMALAFLRLKIVLEPGGAVALAAALFRPDALEGDAVICTASGGNVDPPLFARALAEAAD

SEQ ID NO: 31627 - DNA, 1053 bp, Xylella fastidiosa Dixon
  CDS (1)..(1053)
atggatatacctgatgtaggtcacaccgttgtcaagcaatccaatgcaagtaacgtcaataccgtgagtgtggccgatgtgttggctgcacaagcccgcttacgtcgttatctaatgcctaccccaattcactatgccgagcgtttcggagtgatgctgaagttagaaaatctgcaacgcaccggatcctataaagtgcgcggcgcactgaacgcaatgttagttgcgctggaacgcggcgataaccgcccagtcatttgcgcatcagccggtaaccacgcccaaggcgtagcttggtcagcttaccggctgggtatacaagcaatcactgtcatgcctcacggtgctccggccacaaaggttgcaggtgtttcacattggggggcaacggtacgccaacacggccaaagctatgacgaggcctatacgttcgcatgtgagttggctgagcaaaacgattaccgctttctatcagcattcgatgatccggatgtgattgccggtcagggaactgttggcatagagatcaccgcgcatgaaccggatgtagtcattgtgccgatcggcggcggcggccttgcttcaggcattgctttggtgctgcgctcacagggagtacgtgtcattggcgctcaggtcgagggcgtggatgcgatggcgcgtgcaatccgtggcgacacacgcgagatcgctccagtttcgaccttagctgacggggtgaaagtcaagattcctggtttcattacccgccatctgtgtgccaacttgttagacgatgtagtaatcgtgcgtgaggctgaactgcgcgaaacattggtgcgtttactattggaagaacacctgatcgccgaaggggcaggcgcactggcattggccgctggccgccgcgtttcaggtaagcgcaagtgtgcagtggtctccggaggtaatattgacgctgcagtactggccaaactgttgtcagaagtaagaccacggccaccacgcaaaccacgcagacgtagtgcagatcgccccaacaattccggcaatttaccgctcccttttaactga

SEQ ID NO: 31628 - protein, 350 aa, Xylella fastidiosa Dixon
MDIPDVGHTVVKQSNASNVNTVSVADVLAAQARLRRYLMPTPIHYAERFGVMLKLENLQRTGSYKVRGALNAMLVALERGDNRPVICASAGNHAQGVAWSAYRLGIQAITVMPHGAPATKVAGVSHWGATVRQHGQSYDEAYTFACELAEQNDYRFLSAFDDPDVIAGQGTVGIEITAHEPDVVIVPIGGGGLASGIALVLRSQGVRVIGAQVEGVDAMARAIRGDTREIAPVSTLADGVKVKIPGFITRHLCANLLDDVVIVREAELRETLVRLLLEEHLIAEGAGALALAAGRRVSGKRKCAVVSGGNIDAAVLAKLLSEVRPRPPRKPRRRSADRPNNSGNLPLPFN

SEQ ID NO: 31629 - DNA, 1266 bp, Leuconostoc mesenteroides subsp. mesenteroides ATCC 8293
  CDS (1)..(1266)
atgacgactgagggaaagctaacggctgaagaaatagatgaggcgcatcgagtcttgtcaaaggtagtaacgcatacgccattggcatatgatgactatctatcaaaaaaatatagagctaatgtgtatcttaaacgagaagatatgcaacgggttcgttcgttcaaaattcgtggtgcctactacaatatcattaaggcagagaaagaaaaactcaataatggggttgttgctgcttcagctggaaaccacgcgcaaggcgtagccgatacatgtcataatttaaagatacaagcaactatttttatgccagtcattacaccaaatcaaaaagtagaagcggttaaacgttttggtggtcaatatgttacggtaatcctagtcggtgatacctttgacgaagcacaaagtgcagcgtttgaatacactgaaaaacataatatgttctttgtagcaccatttgatgatcggcgtaccatggctgggcaaggcacggtggcggttgaggtatttgaagatgctgtagagcaaaatattaatgttgattatttgattgcttctgttggtggtggcggtttaatcggtggtctgtcgacctattctaaaaaggtatcaccacaaaccacagtagtaggtgtcgaaccagaaacggcacagtcaatgaaagcggcttttcaagctcaaaaacctaccaccgtcgagaatatcgatcactttgttgatggtgctgccgttgcgcgtgtcagtcagtttacctataatcaagcacagcagtatgttgacaaactgctggctatccctgaaggaaaggttgctcaagcagtattagacttgtacacttatgaggcgatagttgccgaaccagctggagcgatgcctatcgctagtttggattttatggccagtgatatcgtagggaaaaacgtcgttctagttgtttctggtggaaacaatgatatcggccgtatgcaagaaatggaacaaaaggcattaatgtataagggtcgccaacagttttacttagttgagtttccgcaacgacccggggcattacggcaatttgtaaatgatgttttaggaccaaacgacgatattactcgttttgaatatactaaaaaaataaactctgaaacaggctctgtcatggttggtattctgctggatcctgttacgaaagtagatgacttaacagcccgtttagcagctttttttccaaaatatatcaatttgcaagaaaatactgtgcttttcaatatgttagtttag

SEQ ID NO: 31630 - protein, 421 aa, Leuconostoc mesenteroides subsp. mesenteroides ATCC 8293
MTTEGKLTAEEIDEAHRVLSKVVTHTPLAYDDYLSKKYRANVYLKREDMQRVRSFKIRGAYYNIIKAEKEKLNNGVVAASAGNHAQGVADTCHNLKIQATIFMPVITPNQKVEAVKRFGGQYVTVILVGDTFDEAQSAAFEYTEKHNMFFVAPFDDRRTMAGQGTVAVEVFEDAVEQNINVDYLIASVGGGGLIGGLSTYSKKVSPQTTVVGVEPETAQSMKAAFQAQKPTTVENIDHFVDGAAVARVSQFTYNQAQQYVDKLLAIPEGKVAQAVLDLYTYEAIVAEPAGAMPIASLDFMASDIVGKNVVLVVSGGNNDIGRMQEMEQKALMYKGRQQFYLVEFPQRPGALRQFVNDVLGPNDDITRFEYTKKINSETGSVMVGILLDPVTKVDDLTARLAAFFPKYINLQENTVLFNMLV

SEQ ID NO: 31631 - DNA, 1515 bp, Azotobacter vinelandii
  CDS (1)..(1515)
atgctcgaacagtacgtcaagaagatccttacctcgcgcgtctacgacgtcgccgtcgaaactcccctgcagcctgcccgccagctctccgaacgtctcggcaaccagatcctgctcaagcgcgaggatctgcagccggtgttctccttcaagatccgcggcgcctacaacaaggcggcccggctgagcgaggccgagctggcgcgcggcgtggtcaccgcctcggccggcaaccatgcccagggcgtggccctggcggccaggcacctgggcatcaaggcggtcatcgtgatgccgaggaccaccccggagatcaaggtccaggcggtgcgcgcgcgcggcgccaaggtggtgctgcatggcgacgcctttcccgatgcgctggcccattcgctgaagctggtcgaggagaagggctacgtctacatccacccctacgacgatcccgacgtgatcgccgggcagggcacggtggccatggagattctccgccagcagccgggccggctggacgccgtgttcgtgccggtcggcggcggcggactgatcgcgggtatcgccgcctatgtgaaatacctgcgtcccgaggtccgggtgatcggtgtcgaaccggaggactccaactgcctgcagatggccatggccgccggcgagcgggtggtgctgccgcaggtcgggctgttcgccgacggggtggcggtggcgcagatcggcgcctgcaccttcgacatctgccgccatcacgtggacgaggtggtcactgtcagtaccgacgagatctgcgcggcgatcaaggacatctacgacgacacccgctcgatcaccgagccggccggtgccctggcggtggccgggatcaagcgctacgtcgagcgcgaaggggcgagcgggcagaccctggtggccatcgattccggtgccaacatcaacttcgaccgcctgcgccatgtggccgagcgctccgaactgggcgagaagcgcgaggcgatcatcgccgtgaccatccccgagcagccgggcagcttcaaggcgttctgccaggccatcggcaagcggcagatcaccgagttcaactaccgctacaaccgcccggaccatgcgcacatcttcgtcggcgtgcaaacccacccggagaacgatccgcgcgagcaactggtggccagcctgcgcgagcagggctttcccgtactcgacctgaccgacgacgagatggccaagctgcatatccgccacatggtcggcggccatgcggcgggcgtcagcgacgaggtggtgttgcgcttcgagtttcccgagcggcccggcgcgttgttcaacttcctcagcaagctcggcggacgctggaacatctcgatgttccactaccgcaaccatggcgccgccgacggccgcgtggtggccggcctgcaggtgccggcgggcgagcgccacctgttgccggcggctttggacgccatcggctatccgtactgggacgaaaccgacaacccggcctaccggttgttcctcggctga

SEQ ID NO: 31632 - protein, 504 aa, Azotobacter vinelandii
MLEQYVKKILTSRVYDVAVETPLQPARQLSERLGNQILLKREDLQPVFSFKIRGAYNKAARLSEAELARGVVTASAGNHAQGVALAARHLGIKAVIVMPRTTPEIKVQAVRARGAKVVLHGDAFPDALAHSLKLVEEKGYVYIHPYDDPDVIAGQGTVAMEILRQQPGRLDAVFVPVGGGGLIAGIAAYVKYLRPEVRVIGVEPEDSNCLQMAMAAGERVVLPQVGLFADGVAVAQIGACTFDICRHHVDEVVTVSTDEICAAIKDIYDDTRSITEPAGALAVAGIKRYVEREGASGQTLVAIDSGANINFDRLRHVAERSELGEKREAIIAVTIPEQPGSFKAFCQAIGKRQITEFNYRYNRPDHAHIFVGVQTHPENDPREQLVASLREQGFPVLDLTDDEMAKLHIRHMVGGHAAGVSDEVVLRFEFPERPGALFNFLSKLGGRWNISMFHYRNHGAADGRVVAGLQVPAGERHLLPAALDAIGYPYWDETDNPAYRLFLG

SEQ ID NO: 31633 - DNA, 1110 bp, Desulfitobacterium hafniense DCB-2
  CDS (1)..(1110)
ctggctgggacggagatctacctcaagctggaaaatctgcagaagaccggttcctttaaagttcggggggctatgaataaagccttgaagctttctgaagaggagaagaaaaaaggaatcctggccgcttccgccggcaatcatgcccaaggggtagccatggcggctgcccgtatcggtattcccgccacgattgtcatgccggaaaatgcccccctagccaaagtgtccgctacggaagggtacggagcccaggtcattctgtccggagcggtttttgatgatgcttatcagaaggcagtagagatccaaaaggaaacaggagccacgtttatccatgcttttgatgatctggaagttatggccgggcagggaaccatcggcttggaagtttttgaggagctgcctgaagtggatacggttcttgtccctatcgggggaggagggctgatcgcagggattgctgtggctttgaaatccctgaagccttccgtgcgcgtgatcggtgtccaagcggccggagcggcaagcatggctcacgcgctgagcataggcaggcccgagccattagggcaggccagtactttggcagatggcattgcggtgaaaagggcaggtgatctaaccttcgcagcagtccgccattatgtggatgagatggtgacggttgaagaagaagagattagtcaagctattctcctgttgatggagcgcaccaaaacccttgctgaaggagccggggcggttgccgtagcggcggcgcttcagggtaagctggatcttaaggagcagaaaacggttctcatcctgagcgggggaaatattgacgtgaatttcctggcccagattatcgaacggggactgaggcgttccgggcgtaccatggcctgccagcttcttttgccggatcaacccggcaacttagaaaaggtgatcgagcttatagcccaggaacgggccaatatcatcaacgtcgaacactcccgctatgatttagccgttcctctgcgttcagcccgtgttcatatgctgctggaaacccaaagttttgaacatcaaaagcgcattattcagcgtttagaaggtgccggatatcccctgacccgttaa

SEQ ID NO: 31634 - protein, 369 aa, Desulfitobacterium hafniense DCB-2
MAGTEIYLKLENLQKTGSFKVRGAMNKALKLSEEEKKKGILAASAGNHAQGVAMAAARIGIPATIVMPENAPLAKVSATEGYGAQVILSGAVFDDAYQKAVEIQKETGATFIHAFDDLEVMAGQGTIGLEVFEELPEVDTVLVPIGGGGLIAGIAVALKSLKPSVRVIGVQAAGAASMAHALSIGRPEPLGQASTLADGIAVKRAGDLTFAAVRHYVDEMVTVEEEEISQAILLLMERTKTLAEGAGAVAVAAALQGKLDLKEQKTVLILSGGNIDVNFLAQIIERGLRRSGRTMACQLLLPDQPGNLEKVIELIAQERANIINVEHSRYDLAVPLRSARVHMLLETQSFEHQKRIIQRLEGAGYPLTR

SEQ ID NO: 31635 - DNA, 975 bp, Nostoc punctiforme PCC 73102
  CDS (1)..(975)
atgtcacaaactaattccgttactataactgatgtgcaagcagcacaagagcgaattttgggaattgcccatcgcacgccggtgctaacttctagaatggttaacgatcgcaccaatagccaagtattctttaaatgcgagaactttcaacgcaccggggcatttaaatttagaggggcgtataatgccttagcgcaactatcggtagcccaaaaacaaacaggcgttatcacctattcatcaggaaatcatgctcaagcgatcgctctagctggtaaactcctcaatatccctaccactattgtcatgcctgatgatgcacccactgtcaaacaaactgcgactcgtggttatggtgcagagataattttatacaatcgccaggaggcaaaccgagaagaattagcccaaagtttagcaagcgatcgctctttgacactcatccctccttacgatcatccccatgtagtcgccggacagggaacaactgctttagaactgattcaagaagttggtgaattggacttgctattagtttgttgtggcggtggcggattactttcaggatgtgcgatcgcagctaaagcacttttacccaattgtaaagtaatcggggtagaaccagcacttgccgacgatgctacccgctcttttcacaccaaaaccctgcaaactgtcaagaatcctgataccatcgccgatggtgcgcggactcctagccttggtaaaattactttccccttagtgctgcattacgtcgatgatatggtgacggtatctgaagaagcaattcttcgcaccatgtttttcttgtgggaacgtctgaaaattgtagttgaacccaccggagtacttgcagccgcagccttactcgaaggtgtggtgacagcaccagagtcgaggattggtgtgatcatcagtggtggaaatgtcgatttggcgcaagttggtaaattgttttctggtggattttga

SEQ ID NO: 31636 - protein, 324 aa, Nostoc punctiforme PCC 73102
MSQTNSVTITDVQAAQERILGIAHRTPVLTSRMVNDRTNSQVFFKCENFQRTGAFKFRGAYNALAQLSVAQKQTGVITYSSGNHAQAIALAGKLLNIPTTIVMPDDAPTVKQTATRGYGAEIILYNRQEANREELAQSLASDRSLTLIPPYDHPHVVAGQGTTALELIQEVGELDLLLVCCGGGGLLSGCAIAAKALLPNCKVIGVEPALADDATRSFHTKTLQTVKNPDTIADGARTPSLGKITFPLVLHYVDDMVTVSEEAILRTMFFLWERLKIVVEPTGVLAAAALLEGVVTAPESRIGVIISGGNVDLAQVGKLFSGGF

SEQ ID NO: 31637 - DNA, 1338 bp, Nostoc punctiforme PCC 73102
  CDS (1)..(1338)
atggtgcaactaccaccagatatcttggcacagggtgtaattgcagcgtctgcgggcaaccatgctcaaggagtcgcccttgcagccaatcgtttgggaaccaaagcaattatcgtcatgccaataaccacacctcaagtcaaggtggacgcagtgagaatgaggggcggagcagtcgtgttacatggaaacacctacgacgatgcttatagctatgcccgtgaattagaagtggaaaaaggtttgacctttattcatccctttgacgatcctcatgtaattgctggacagggaaccattgggatggaaattttacggcaatatcagcaacccatccatgcaatttttgttgcaattggaggtggtggattgatttctgggattggggcttatgtaaaacgattgcgtcctgaaatcaagattattggagttgaaccagtagatgctgatgcgatgtctcaatcgctcaaagccgggcatcgggtgcgtttgtctcaagtggggttatttgctgatggtgtggcggtgcgagaagtaggtgaagaaaccttccgtttatgtcagcagtatgtagatgaaatcattttggtggatactgatgatacttgtgctgcgattaaagacgtgtttgaggatacgcgatcaattttagagccagccggtgcattagcgatcgcagctgccaaagcctacgcagaacgagaacaaattgagggacaaaccttaattgccgtagcctgtggtgcaaacatgaattttgatcgtctccgattcgtggcagaacgggcccagttaggcgaacgtcgggaagcaatctttgcagtcacaattcctgaagaacggggaagtattcgccagttttgtgaatgtattggcaaccgtaatcttactgagtttaattatcgcattgctgatgaaaaaacagcccatatttttgtaggtgtgcaaattcaaaaccgtgctgatgctgcaaagatggtagaaacctttgaagctcaaggatttgaaactcttgatttaacagacgacgaactaactaaattacatctgcggcacatggtgggtgggcactctcccctggctcaaaatgaattactctaccgttttgagtttcccgaacgtcccggcgcattgatgaaatttgtgacttctatgagtccagcctggaatattagtctttttcactaccgtaacaacggtgcagactacggacgaattgtagttggtatccaagttcctcctcacgagatggaagagtggcaagcttttctcgataacttgggctatcgctattgggatgaaaacaagaatcccgcatacaagctgtttttgggatag

SEQ ID NO: 31638 - protein, 445 aa, Nostoc punctiforme PCC 73102
MVQLPPDILAQGVIAASAGNHAQGVALAANRLGTKAIIVMPITTPQVKVDAVRMRGGAVVLHGNTYDDAYSYARELEVEKGLTFIHPFDDPHVIAGQGTIGMEILRQYQQPIHAIFVAIGGGGLISGIGAYVKRLRPEIKIIGVEPVDADAMSQSLKAGHRVRLSQVGLFADGVAVREVGEETFRLCQQYVDEIILVDTDDTCAAIKDVFEDTRSILEPAGALAIAAAKAYAEREQIEGQTLIAVACGANMNFDRLRFVAERAQLGERREAIFAVTIPEERGSIRQFCECIGNRNLTEFNYRIADEKTAHIFVGVQIQNRADAAKMVETFEAQGFETLDLTDDELTKLHLRHMVGGHSPLAQNELLYRFEFPERPGALMKFVTSMSPAWNISLFHYRNNGADYGRIVVGIQVPPHEMEEWQAFLDNLGYRYWDENKNPAYKLFLG

SEQ ID NO: 31639 - DNA, 1266 bp, Bifidobacterium longum DJO10A
  CDS (1)..(1266)
atggaacaaaaggatgttttgaaggcgctgcaacgtgatcatgcagccgaactgaagctggccgccgaacgactcaaaggcactgcccgccacacggagatcattccttctccggtgctgagcgagatgaccggccatgagattctcctgaagccggaaaacctgcaggtcaccggatccttcaagatccgcggtgcctataacaagattgcttcgctcaccgaagagcagatcgctcacggcatcgtcaccgcgtctgccggcaaccatgcccagggtgtggcctatgcggcccgcgagcgtggagccaaggccaccatctgcatgccgcagatcaccccgccgctgaaggtcgatgccaccaaggcctacggtgccgacgtggtgctgtacggcgatgtgttcgatgaatccgccgcccacgctgctgagctcgccgacaaggaaggcatgatttacgtgccgccattcgacgattacgaagtcatctgcggccaaggcaccatcggtctggagatccttgaagacgtgccgaacgtcactgacgtggtcgtgccgctcggtggtggtggcctgggtgccggcgtggcgctcgccatcaagacattcaagcctgaagtgcgcgtaatcggtgcgattccggagggctcaccggcctggaaggactcgctggccgcgggtcgtgtgtctccggctgaccatgtggttacctccgccgaaggtgttgcggtcaagcaccccggcgacctgcccttcgctctgattaacgagttcctggacgatctggtcaccgtcaccgagcgcgacatcaacgaaatgattctgctcatgctcgagaagcataagctggtggtcgaggcggccggcgccgtttcgctggctgcgctggaacacctgaacctgcgttcgcgcaagttcgccgccgccaccggcccgcacgtggtggttccgattatgtccggcggcaatatcgacaccgtgaccatgggtgcggtgattcagaaaggtatgatcgcccgcggccgcatcatgaacttcgaggtcgagctgccggatactccgggccagctcgtcaaggtggccaccctgcttgccgagcagcgcgccaacgtcattcagcttgatcacgaccagttcaaggcatccggccactacaccaacgcggtgtctctcggcgtcacggtcgagaccaacggccccgagcacatcgaccgcatcctcgcggcactcagggaagccggattccagcccaagcgcatctactga

SEQ ID NO: 31640 - protein, 421 aa, Bifidobacterium longum DJO10A
MEQKDVLKALQRDHAAELKLAAERLKGTARHTEIIPSPVLSEMTGHEILLKPENLQVTGSFKIRGAYNKIASLTEEQIAHGIVTASAGNHAQGVAYAARERGAKATICMPQITPPLKVDATKAYGADVVLYGDVFDESAAHAAELADKEGMIYVPPFDDYEVICGQGTIGLEILEDVPNVTDVVVPLGGGGLGAGVALAIKTFKPEVRVIGAIPEGSPAWKDSLAAGRVSPADHVVTSAEGVAVKHPGDLPFALINEFLDDLVTVTERDINEMILLMLEKHKLVVEAAGAVSLAALEHLNLRSRKFAAATGPHVVVPIMSGGNIDTVTMGAVIQKGMIARGRIMNFEVELPDTPGQLVKVATLLAEQRANVIQLDHDQFKASGHYTNAVSLGVTVETNGPEHIDRILAALREAGFQPKRIY

SEQ ID NO: 31641 - DNA, 1548 bp, Haemophilus somnus 2336
  CDS (1)..(1548)
atggtgaagaatatgataagtaatttaaccgaacagccttctggtgctgagtaccttaaagcaattttaagttcaaaaatttacgaacttgcacaggttacacccttacaacctatgctcaaactttctgagcgtttaagtaataccgttttagttaaacgtgaagatcgccaattagttcatagctttaaattgcgtggtgcttatgccatgattgccggtcttagccaaccgcaaaaaaatgccggtgtgattaccgcttccgcaggaaatcatgctcaaggtgtcgcactgtcagcgaaaaatctgggattaaacgcattgattgttatgccgcaaaataccccccgcattaaagtagatgcagtgcgtggttatggtggcgaagtgcttttatatggtgcaaactttgatgaggcaaaagcaaaagcgatagagctttctgaaagtaaaagtatgacatttattccgccttttgatcacccggcagttattgcaggtcaaggttctttagccatggaattattgcagcaaaacagtcatattgatcgtatttttgttcctgttggcggcggcggattagcagctggcgtggctgttttaattaaacaattaatgcctgacattaaagtgattgcggtagaaagtaaagattcagcttgtttacacgccgctttgaaagttggtcaaccggtagatttagagcgtgtcgggttgtttgctgacggtgtggcggtaaaacgtatcggtaatgaaactttccgtgtatgtcaacaatatattgatgatgttgtacttgttgacagcgatgaagtgtgtgcggcaatgaaagatatgtttgaaaatgtgcgtgctattgcagagccatccggtgccgtatcattagccggcttaaaaaaatatgtgaaagaacataatattcaaggtgaaacgttggttaatattttgtccggtgcaaatttaaattttcatacattgcgttatgtgtcagaacgctgtgaaatcggtgaaaaacacgaagcaatttttgctgtaactatccctgaagaaaaaggtagtttcctacgtttttgccatctgttaggtgatcgtcctgttaccgaatttaactatcgttatgctgataaagaacaagcctgtatttttgttggggttcgtattagtagtgaaaaagaaaaattagaaattattcaacaacttgaacaaaatgattataaagttatggatctctctgatgatgaaatagcgaaaacccatattcgctatatgattggaggacgaacaaccagcaatagcaaagagcggttatatagcttcgagtttcccgagcaaaaaggcgcattattaaaattcttgatgatgttaggtacgcattggaatatttctcttttccattatcgtgcttatggtgcagactatggtaacgttttggcaggctttcagttagatgaacatgatgaaattcggttcaatggtcatttagaagaacttgcttatacttatcaagatgtaacggacagccccgcttacaaatatttcttagcttga

SEQ ID NO: 31642 - protein, 515 aa, Haemophilus somnus 2336
MVKNMISNLTEQPSGAEYLKAILSSKIYELAQVTPLQPMLKLSERLSNTVLVKREDRQLVHSFKLRGAYAMIAGLSQPQKNAGVITASAGNHAQGVALSAKNLGLNALIVMPQNTPRIKVDAVRGYGGEVLLYGANFDEAKAKAIELSESKSMTFIPPFDHPAVIAGQGSLAMELLQQNSHIDRIFVPVGGGGLAAGVAVLIKQLMPDIKVIAVESKDSACLHAALKVGQPVDLERVGLFADGVAVKRIGNETFRVCQQYIDDVVLVDSDEVCAAMKDMFENVRAIAEPSGAVSLAGLKKYVKEHNIQGETLVNILSGANLNFHTLRYVSERCEIGEKHEAIFAVTIPEEKGSFLRFCHLLGDRPVTEFNYRYADKEQACIFVGVRISSEKEKLEIIQQLEQNDYKVMDLSDDEIAKTHIRYMIGGRTTSNSKERLYSFEFPEQKGALLKFLMMLGTHWNISLFHYRAYGADYGNVLAGFQLDEHDEIRFNGHLEELAYTYQDVTDSPAYKYFLA

SEQ ID NO: 31643 - DNA, 1527 bp, Actinobacillus pleuropneumoniae serovar 1 str. 4074
  CDS (1)..(1527)
atgagcaatccgacaattcaatccggcaccgattatctgcgtgtaatcctcagttcaaatatctacgacctagcgcaagttaccccgcttcaaaaaatggaaaaactctccgagcgtttaggcaaccaaattcttatcaaacgtgaagatcgccaaccggtacatagtttcaaactgcgtggtgcatttgccatgatttccaatctctcggcaagccaaaaagccgccggtgtgattaccgcttcggcaggaaaccacgctcaaggcgtggcgctttcatcaaaacacttaggacttcgtgcattaatcgttatgccgcaaaatacgccggcaattaaagtcgatgcggtgcgagggttcggtggagaagtcttactattcggtgccaattttgatgaggcgaaagccaaagcattagaactttctacagagttggggatgactttcgtaccaccgttcgatcacccgatggtgattgccggacaaggtacgatcggtatggaattagtacagcaaagatcagatttagattatgtattcgtaccggtcggtggcggcggtttagccgccggtattgcggtattaattaagcaaattctaccgaatgtaaaagtgattggcgttgaatcaaaagattccgcttgtttgcaacatgccttaaaagtcggcaaaccggataacttggaacgtgtcggcttattcgcagacggtattgcggtaaaaagaatcggtgacgaaactttccgtttatgccagaaatatatcgatgaagtggtactggtcgataacgatcagatttgtgcggcaatgaaagatatttttgaaaacgtacgtgcgattgcagaaccttccggtgcgacttcattagccggcttaaaaaaatatgtgaaagaacaccaacttgaaggcaaaaacttagcttgtgtgctttccggtgcgaacttgaatttccatacgttacgttatgtttcggaacgttgtgaaatcggcgaaaaacatgaagccttattagcggtaaccattccggaacaaaaaggcagttttttaaaattctgtgagattttaggcaatagagcggtcaccgaatttaactatcgacacgcagatgacaataaagcgtgtattttcgttggggttcgtattaccggcaatgcggaaaaagcggatatcattcgcgatctacaacagcacaattataacgtagtggatctttcggatgatgacattgctaaaacgcatattcgttatatggtcggcggtcgtcctaacagcattagcagcgagcaactttatagcttcgaattccctgagcaaaaaggcgcattattaaaattcctccaaacactgaccgattgggatatttcattattccattatcgtgcgcacggggcggattacggcgatattctcgctgcgtttactttagatgaaagcgataagcatcgccttaatcagcatttggatcaacttggttatcgttatcaaaacgtaacggatagccttgcatatcaatactttttaaaataa

SEQ ID NO: 31644 - protein, 508 aa, Actinobacillus pleuropneumoniae serovar 1 str. 4074
MSNPTIQSGTDYLRVILSSNIYDLAQVTPLQKMEKLSERLGNQILIKREDRQPVHSFKLRGAFAMISNLSASQKAAGVITASAGNHAQGVALSSKHLGLRALIVMPQNTPAIKVDAVRGFGGEVLLFGANFDEAKAKALELSTELGMTFVPPFDHPMVIAGQGTIGMELVQQRSDLDYVFVPVGGGGLAAGIAVLIKQILPNVKVIGVESKDSACLQHALKVGKPDNLERVGLFADGIAVKRIGDETFRLCQKYIDEVVLVDNDQICAAMKDIFENVRAIAEPSGATSLAGLKKYVKEHQLEGKNLACVLSGANLNFHTLRYVSERCEIGEKHEALLAVTIPEQKGSFLKFCEILGNRAVTEFNYRHADDNKACIFVGVRITGNAEKADIIRDLQQHNYNVVDLSDDDIAKTHIRYMVGGRPNSISSEQLYSFEFPEQKGALLKFLQTLTDWDISLFHYRAHGADYGDILAAFTLDESDKHRLNQHLDQLGYRYQNVTDSLAYQYFLK

SEQ ID NO: 31645 - DNA, 846 bp, Pseudomonas aeruginosa UCBPP-PA14
  CDS (1)..(846)
atgaagcacgagaaccacctgccggtgggggccttcaagctgcgcggcggcctggtgtatttccaccacctggcgcaccagggtgagcggccggccggcgtgatcagcgccacccgcggcaaccacggccagtcggtggccttctcggcgagccgctacggcatccagccgatcatcgtcgtgccgcacggcaacagccgcgagaagaacgcggcgatgcgcagcctcggcgcggagctgatcgagcatggcgaggacttccaggcctcccgcgaatacgccgccgagcgcgcccggcacgaaggcctgcacctgattccggcgttccatccctggctggtggccggggtcgccagctacagcctggagttgttcgccgcgctggccgaccttgacgaagtctacgtgccgatcggtatgggttcgggcatctgcggcctgatcgccgcgcgcgacgcgctgggcctgaagacccgcatcgtcggcgtggtgtccgcccatgcgccggcctacgccctgtcgttcgaggccggcacggcgatcagccacccggtcgacacccgcctggccgacggcatggcgtgcagtacgccggacccgagcgcgctggaaatgatcctggccggcgccgatcgcctggtgcgggtcagcgacagggagatcggcgcggccatgcgcctgtgcttcaccagcacccacaacgtcgccgagggcgccggggtggcggcgctggccgccgcctggcaggagcgcgagcgcctgaaggggctgaaggtaggcctgatcctcagcggagcgaacgtcgaccgcgaggtattcgccgagcaactggccgccggcgactga

SEQ ID NO: 31646 - protein, 281 aa, Pseudomonas aeruginosa UCBPP-PA14
MKHENHLPVGAFKLRGGLVYFHHLAHQGERPAGVISATRGNHGQSVAFSASRYGIQPIIVVPHGNSREKNAAMRSLGAELIEHGEDFQASREYAAERARHEGLHLIPAFHPWLVAGVASYSLELFAALADLDEVYVPIGMGSGICGLIAARDALGLKTRIVGVVSAHAPAYALSFEAGTAISHPVDTRLADGMACSTPDPSALEMILAGADRLVRVSDREIGAAMRLCFTSTHNVAEGAGVAALAAAWQERERLKGLKVGLILSGANVDREVFAEQLAAGD

SEQ ID NO: 31647 - DNA, 1515 bp, Pseudomonas aeruginosa UCBPP-PA14
  CDS (1)..(1515)
atgctcgaacaatacgtcaagaagatcctcacctcgcgcgtctatgacgtcgcggtggaaacgcccctgcaacccgcccgccagttgtccgaacgcctcggcaaccaggtcctgctcaagcgcgaggacctgcagccggtgttttccttcaagatccgcggcgcctacaacaaggtcgcgcagctcaccgaggaggagaaggcccgcggggtgatcgccgcctcggccggcaaccacgcccagggcctggccctggcggccaagcggcaggggatcagggcggtcatcgtgatgcccaagaccacccccgagatcaaggtccaggcggtgcgcgcccacggcgccaaggcggtgctgcacggcgacgccttccccgaggcgctggcccacgcgctgaagctggtcgacgagaagggctacaccttcgtccatccctacgacgatccggacaccatcgccggccagggcaccgtggccatggagatcctccgccagcagcccggccgcctcgatgcgatcttcgtcccggtgggcggtggcggattggtcgccggcatcgccgcctacgtcaagtacctgcgtccggagatcaaggtgatcggcgtcgagccggacgagtcgaactgcctgcaggcggccatggccgccggcgagcgggtgatgctgggccaggtcgggctgttcgccgacggcgtggcggtggcgcagatcggccagcacaccttcgacatctgcaaggaccacgtcgacgaagtgatcaccgtcagcaccgacgagatctgtgcggcgatcaaggacatctacgacgacacccgctcgatcaccgagccggccggcgcgctggcggtggccgggatcaagaagtacgttgagcgcgagcgcgccgaggggcagaccctggtggcgatcgactccggcgccaacgtcaacttcgatcgcctgcggcatgtcgccgaacgcgccgaactgggcgagcgccgcgaagcgatcatcgcggtgaccattcccgagcggccgggcagcttcaaggccttctgcgaggcggtcggcaagcgccagatcaccgagttcaactatcgctaccacagcggcagcgaggcgcacatcttcgtcggcgtgcagacccacccggagaacgacccgcgcgaggcgctggtggcctatctgcgcgagaagggcttcccggtcctcgacctgaccgacaacgaactggccaagctgcacatccgccacatggttggcggccatgcagtgaaagtcagcgacgagatggtgttccgcttcgaattccccgagcggcccggcgcgctgttcaacttcctcaccaagctcggcgggcgctggaacatctcgatgttccactaccgcaaccatggcgcggccgacggccgggtggtggccgggttgcaggtgccggaagacgagcgccacctgatcccgcagaccctggaggcgatcggctatccgtactgggacgagaccgccaacccggcctaccagctgttcctcggctga

SEQ ID NO: 31648 - protein, 504 aa, Pseudomonas aeruginosa UCBPP-PA14
MLEQYVKKILTSRVYDVAVETPLQPARQLSERLGNQVLLKREDLQPVFSFKIRGAYNKVAQLTEEEKARGVIAASAGNHAQGLALAAKRQGIRAVIVMPKTTPEIKVQAVRAHGAKAVLHGDAFPEALAHALKLVDEKGYTFVHPYDDPDTIAGQGTVAMEILRQQPGRLDAIFVPVGGGGLVAGIAAYVKYLRPEIKVIGVEPDESNCLQAAMAAGERVMLGQVGLFADGVAVAQIGQHTFDICKDHVDEVITVSTDEICAAIKDIYDDTRSITEPAGALAVAGIKKYVERERAEGQTLVAIDSGANVNFDRLRHVAERAELGERREAIIAVTIPERPGSFKAFCEAVGKRQITEFNYRYHSGSEAHIFVGVQTHPENDPREALVAYLREKGFPVLDLTDNELAKLHIRHMVGGHAVKVSDEMVFRFEFPERPGALFNFLTKLGGRWNISMFHYRNHGAADGRVVAGLQVPEDERHLIPQTLEAIGYPYWDETANPAYQLFLG

SEQ ID NO: 31649 - DNA, 981 bp, Psychrobacter sp. 273-4
  CDS (1)..(981)
atgatcacaaatgatgatggattagtgattccaacccttgatgatatgctagaggcgcatgagcgcattaagccatatatccatcgcactcctgttttgacctctcgctttttaaacgaaatggcaggctgtgagatgttctttaaatgtgagaactttcaaaaagcgggtgcctttaaagtacgcggcgcatcaaacgcggtgtttggtctgtctgacgaagccgcaaaaaatggcgtctgtacacacagctcaggcaaccatgccctgtctttatcttatgcagcgggtcgacgcggcgtaccgtgtcatgtggtgatgccgcatagtgcaccagaagctaaaaaagcggcagtccgtggctatggtggtatcattactgagtgtgagccatcaaccacttcacgcgaagaagtgtttgccagagttcaagcagaaacaggcggcgactttgtccatccgtacaatgatccacgcgtaatcgccggacaagcgacttgctcacgtgaatttctagagcaaatggaagagatcggtcaaaaacctgacatggttgtggcacctattggtggtggtggcatgatttcaggcacttgcttaacgctatcgaacctagcccctgatgtcaaaatttatgctgcagagccagtaaatgctgatgatgctgcacgctcatttaaagccggttatattatcgctgatgatgcacccgatactatcgctgatggcttaaaagtaccgcttaaagatttgacctggcattttgtcagtaattatgtgactgacattttgactgcgactgaagaagaaatcgttgaagcgatgaagctgacttggactcatatgaaaattatcatcgagccaagttgtgcagtaccgcttgctgtcatcttgaagaacaaagacgtttttgcaggtaaaaaggttggcgtcatcatcactggtggtaacgttgatctagacaaattgccttggaactaa

SEQ ID NO: 31650 - protein, 326 aa, Psychrobacter sp. 273-4
MITNDDGLVIPTLDDMLEAHERIKPYIHRTPVLTSRFLNEMAGCEMFFKCENFQKAGAFKVRGASNAVFGLSDEAAKNGVCTHSSGNHALSLSYAAGRRGVPCHVVMPHSAPEAKKAAVRGYGGIITECEPSTTSREEVFARVQAETGGDFVHPYNDPRVIAGQATCSREFLEQMEEIGQKPDMVVAPIGGGGMISGTCLTLSNLAPDVKIYAAEPVNADDAARSFKAGYIIADDAPDTIADGLKVPLKDLTWHFVSNYVTDILTATEEEIVEAMKLTWTHMKIIIEPSCAVPLAVILKNKDVFAGKKVGVIITGGNVDLDKLPWN

SEQ ID NO: 31651 - DNA, 1554 bp, Psychrobacter sp. 273-4
  CDS (1)..(1554)
atgctgtcacattgggtacgagccatcttacaagccaccgtctatgacgttgctattcaaacaccacttgaagcggcacccaagctgacccaacgttttgctaatgacattcgttttaaacgtgaagacctgcaaccggtaaaatcctttaaattgcgcggcgcttataaccgcatcagccaattgaatgatgagcaaaaagcacgcggcgtgatttgcgcatcggcgggtaaccatgcccaaggcgttgcctactctgcccgtaaacttgcactgaacaatattattgttatgccaaccactacccctgatatcaaagtagatgccgtcagagcgcttggcggcaatgtcgacttgtatggtgacagttttgatgaagccaatcgctatgccattgatcgcgctgagcgtgaaggtctgacttttataccaccatacgatgacgagctggtaattgccggacaaggtacgattggacttgagctcacccagcaatggcgtaatatggattacgtttttgtagcagttggtggtggcggtctgatttctggtgtcgctgcatttttgggtgaagttgccccgcatgtcaaagtcatcgctgtagaagccgaccaatcagcatcactaaaagccgcgcttgaagccaatgagcgagtcaaacttgagcaagtaggactgttcgtcgatggtgtggcagttgcccaaatcggtgaattgccttttgatattgtccgtatgcagaagagcgataaatccggtcctgtcgtcgaacctcaagtcgttacttgtaccaatgatgaagtctgcgctgccatcaaagatatttttgaagagaaccgcagtatcgttgagcctgcaggggcgcttcctgtcgctggtatgaaaaaataccttgaggctcatgacctacaaggcaaaaactgcgtcgccattatctgcggtgccaatatgaattttgatcgcttgcgctacatcgctgagcgtactgagattggtgagaaaaaagaagctgtctttggcgtgaccatccctgaacagactggcgctttcttaagcttctgccgtagtctgcacggtcgtaatatcactgagttcaattaccgtgctgatagtaaaaaatcaccggactctatggaacctgcagcaatcttcgtcggtattgcattaaaagaaggcgataaagagcgtcaaactattcgtacacaattggcagctgatggctatacagcacatgacttgaccgatgacgatgtcgccaaatcacatatccgctatctaattggtggtcatgcgcatgttgaaaatgaacagttattgcaagtcactttcccagaacgtcccggcgctttattgacctttttagaaaaattgggtaacgattttaatatcacacttttccattatcgcaatcatggcgctgctgaaggtcgcgtattggtcggtttgcaagcttctgaaagcaactcgcgccaactacaagatgccttgctggatatcggttacgactgcaccatgctcaatgacaatattggttatcagttatttttaaagtag

SEQ ID NO: 31652 - protein, 517 aa, Psychrobacter sp. 273-4
MLSHWVRAILQATVYDVAIQTPLEAAPKLTQRFANDIRFKREDLQPVKSFKLRGAYNRISQLNDEQKARGVICASAGNHAQGVAYSARKLALNNIIVMPTTTPDIKVDAVRALGGNVDLYGDSFDEANRYAIDRAEREGLTFIPPYDDELVIAGQGTIGLELTQQWRNMDYVFVAVGGGGLISGVAAFLGEVAPHVKVIAVEADQSASLKAALEANERVKLEQVGLFVDGVAVAQIGELPFDIVRMQKSDKSGPVVEPQVVTCTNDEVCAAIKDIFEENRSIVEPAGALPVAGMKKYLEAHDLQGKNCVAIICGANMNFDRLRYIAERTEIGEKKEAVFGVTIPEQTGAFLSFCRSLHGRNITEFNYRADSKKSPDSMEPAAIFVGIALKEGDKERQTIRTQLAADGYTAHDLTDDDVAKSHIRYLIGGHAHVENEQLLQVTFPERPGALLTFLEKLGNDFNITLFHYRNHGAAEGRVLVGLQASESNSRQLQDALLDIGYDCTMLNDNIGYQLFLK

SEQ ID NO: 31653 - DNA, 1533 bp, Dechloromonas aromatica RCB
  CDS (1)..(1533)
atgcacccggattatctcgaaaaagttctcaacgcacaggtttacgacgtggcgatcgaaacgccgctcgacctggccagcaacctttccgcccgggtcggcaacaagattatcctgaagcgcgaagacatgcagcctgtcttttccttcaagctgcgtggcgcctacaacaagattgccagcctgtcggccgaaaagctgaagcgcggtgtcatctgtgcctcggccggcaaccacgcccaaggggtcgccctgtcggccagcaaactgggttgccgggcggtcatcgtcatgccgacctcgacgccgggcatcaagattaacgccgttaaatcgcggggcggcgaagtggtgctgcatggcgactccttcgacgaagcatacgcccatgcggtcgaactggaaaaaaccgaaaagctgaccttcgttcatcccttcgacgatccggaggtgatcgccggacagggcacggtcgccatggaaatcctgcgccagcattcgcgccacaacggcccgatcaccgccgtcttctgtgccatcggcggcggcgggctggctgctggcgtggccgcctacatcaagcgcctgcgtccggaaatcaaggtgatcggtgtcgaaaccttcgacgccgacgccatgaagcagtcgctggccgccggcaagcgcgttcgcgtcgatcaggtcgggttgttctccgacggcaccgccgtcaagctggtcggcgaagaaaccttccggctgtgcaaggaatacctggacgaggtcatcctggtcgacaccgatgccatctgtgccgccatcaaggatgttttcgaggatacccgctcgattctggaaccggccggggcgctggccgtcgccggcgccaaggaatatgcccgtcagcacaaactgaaggacaagaacctgatcgccatcacctccggcgccaacatgaatttcgaccgcctgcgcttcgttgccgagcgggccgaattcggcgaacagcgtgaagccgtcttcgcggtcacgctgcccgagaagccgggtgcctacaagaaattccttgggctgatcggtcaccgcaatgtgaccgaattcaactaccgcttccacaccgccagcgaagctcacgtcttcgtcggcgttcaggtggccgaccgcaaggaatcgctgaagctggtcgacagcctgcagaaacacggttacccgacgctcgacctgaccgatgacgaaatggccaagaaccatatccgtcacatggtcggcggccatgccccggcggtttgcgaaaagggcatgcgcgagttgctctatcgcttcgaattcccggaaaagccgggcgccctgatgaacttcctgacccagatgagcgccggctggaacatcagcctgttccactaccgcaaccatggcgccgactacggtcgcgtcctggtcggcatgcaggtaccgccggacgacatggggaaattcaaggaattcctgaccaatctcggctacgcccactgggacgagagccaaaacccggcatacaagctgttcctgggttaa

SEQ ID NO: 31654 - protein, 510 aa, Dechloromonas aromatica RCB
MHPDYLEKVLNAQVYDVAIETPLDLASNLSARVGNKIILKREDMQPVFSFKLRGAYNKIASLSAEKLKRGVICASAGNHAQGVALSASKLGCRAVIVMPTSTPGIKINAVKSRGGEVVLHGDSFDEAYAHAVELEKTEKLTFVHPFDDPEVIAGQGTVAMEILRQHSRHNGPITAVFCAIGGGGLAAGVAAYIKRLRPEIKVIGVETFDADAMKQSLAAGKRVRVDQVGLFSDGTAVKLVGEETFRLCKEYLDEVILVDTDAICAAIKDVFEDTRSILEPAGALAVAGAKEYARQHKLKDKNLIAITSGANMNFDRLRFVAERAEFGEQREAVFAVTLPEKPGAYKKFLGLIGHRNVTEFNYRFHTASEAHVFVGVQVADRKESLKLVDSLQKHGYPTLDLTDDEMAKNHIRHMVGGHAPAVCEKGMRELLYRFEFPEKPGALMNFLTQMSAGWNISLFHYRNHGADYGRVLVGMQVPPDDMGKFKEFLTNLGYAHWDESQNPAYKLFLG

SEQ ID NO: 31655 - DNA, 1542 bp, Haemophilus influenzae R2866
  CDS (1)..(1542)
atgaaaaacttactcaccaatcctcaaccttctcaatcagattatatcaatgccattgttaaacttggttcgcgcgtatatgaagctgcgcaagtgacccctttacaaaaaatgggaaaactttctgaacgactgcacaataatatctggattaaacgagaagaccgtcagccagtaaatagctttaaactacgcggtgcttacgcaatgatttctagcctttcagaggaacaaaaagcagcaggcgtaatagcggcatctgcaggtaaccatgcacaaggcgtggcattatcggcgaaacaattaggcttaaaagcactgatcgtcatgccacaaaacaccccaagcattaaagtggatgcagtgcgtggttttggtggcgaggtgttgttgcacggtgctaatttcgatgaagccaaagcaaaagccatcgagctttcaaaagaaaaaaacatgacatttattccaccattcgatcatccattagtgatcgctggacaaggcacgttagcgatggaaatgttacaacaagtggcagatttggattatgtgtttgtacaagttggcggtggcggtttagctgcaggtgtagcaatgttgcttaagcaatttatgccagaaattaaaatcatcggtgtagaatcaaaggattctgcatgcttaaaagcggctcttgataaaggcgaaccaacagatttaacccatgttggattatttgccgatggcgttgccgtaaaacgcattggcgacgaaacattccgcctatgccaacaatatcttgatgatatggtattggtcgatagtgacgaagtatgcgcagcaatgaaagatttgtttgagaacgttcgtgctgttgcagaaccatcaggtgcattaggtttggctggtttgaaaaaatatgcgaaacaaaaccatattgaaggcaaaaatatggcggcaattttgtctggcgcgaacttgaatttccatacattacgttatgtatctgaacgttgtgaaattggtgaaaatcgagaggctttattagccgtgaccatgcctgaacaaccaggtagtttcttaaaatttgcttatgtattaggtaacagagctgtaaccgaattcagttatcgttatgcagatgataaacgagcttgcgtgtttgttggagtaagaacgacaaatgagcaagaaaaagcagatattattgcagacctcactaaaaatggttttgatgttgaggatatgtctgatgatgatattgcgaaaacgcacgttcgctatttaatgggaggtcgagcagccaatgataatgaacgcttatatacgttcgaattcccagagcaaaaaggtgcgttattgaaatttttagaaaccttgcaaaatcgttggaatatttcattattccattatcgtgcccacggtgcggactatggaaatatccttgctggtttccaaattgaagaacacgaacaagcagaatttgaacagacacttgcccaactcaattatgtttttgaagatgtaacagaaagcaaatcttatcgttatttcttacgttaa

SEQ ID NO: 31656 - protein, 513 aa, Haemophilus influenzae R2866
MKNLLTNPQPSQSDYINAIVKLGSRVYEAAQVTPLQKMGKLSERLHNNIWIKREDRQPVNSFKLRGAYAMISSLSEEQKAAGVIAASAGNHAQGVALSAKQLGLKALIVMPQNTPSIKVDAVRGFGGEVLLHGANFDEAKAKAIELSKEKNMTFIPPFDHPLVIAGQGTLAMEMLQQVADLDYVFVQVGGGGLAAGVAMLLKQFMPEIKIIGVESKDSACLKAALDKGEPTDLTHVGLFADGVAVKRIGDETFRLCQQYLDDMVLVDSDEVCAAMKDLFENVRAVAEPSGALGLAGLKKYAKQNHIEGKNMAAILSGANLNFHTLRYVSERCEIGENREALLAVTMPEQPGSFLKFAYVLGNRAVTEFSYRYADDKRACVFVGVRTTNEQEKADIIADLTKNGFDVEDMSDDDIAKTHVRYLMGGRAANDNERLYTFEFPEQKGALLKFLETLQNRWNISLFHYRAHGADYGNILAGFQIEEHEQAEFEQTLAQLNYVFEDVTESKSYRYFLR

SEQ ID NO: 31657 - DNA, 1512 bp, Anabaena variabilis ATCC 29413
  CDS (1)..(1512)
atgctttgcgactacctggtacaaattctgactgctcgtgtgtatgatgttgcccaggaatcacctctggagtatgcccccaatctttcagccagactgaataataaactattgctgaagcgggaagatatgcagtctgtgttttcctttaagctgcggggtgcttacaacaagatggtgaatctaacacccgatttactagcacagggtgtaattgctgcttctgcggggaatcatgcccaaggtgtggcactaggtgcaaaacagctagggacaagagcaattattgttatgccggttactactccccaggtgaaagtagatgcagttaaagcacgagggggagaggtggtattgcatggggatacctatgatgatgcctatgcctacgcgcggcagttggaggcagagaaaggtttaacatttattcacccctttgatgatcctcatgtaattgcgggacagggaactattgggatggaaattctcagacaatatcagcaacctattcatgcgatttttgttgctattggcgggggcggtttgatttcggggattgcggcttatgtaaaacggttacgtccagaaattaaaattattggggttgagccggttgatgctgatgcaatgaaccaatccttgcaagctggtaaacgggtgcgattgtcacaggtgggtttatttgctgatggggtggcagtgcgggaggtgggagaagaaactttccgactgtgtcaggaatatgtagacgaaattattttggtggatacagatgacacctgtgcagccattaaggatgtatttgaagatacccgatctattttagaaccagcaggggcattggcgatcgctggcgctaaggcttatgtagaacgagaacaaatccaaggacaaactttagtcgctgtcgcctgcggtgcaaatatgaattttgaccgtttgcgctttgttgcagaacgggcagaatttggtgaacgccgcgaagctatctttgcagtgacaattcctgaaacacctgggagtctgcggaagttttgcgaatgtattggtagacgcaatttgacagagtttaactatcgcattgctgatgaaaaaattgcccatatttttattgggatgcagattcaaaaccgtgctgacaaaatccacatggtggagacttttgcagaatgtggttttgaaatccttgatttaacagatgatgaactgacaaaactgcatttgcgccacatggtgggcggacactctcccctagcccataatgaattactctaccgttttgaatttccggaacgtcctggagcgttaatgaaattcgttgcttccatgagtcccaattggaatatcagtatgttccactaccgcaacaatggctcagactacgggcgcatcgtggtaggaatgcaggttccaccgcaggaaatggaagaatggcaagcatttcttgattccctcggctaccagtattgggatgaaagccagaacccagcctataagttatttttgggataa

SEQ ID NO: 31658 - protein, 503 aa, Anabaena variabilis ATCC 29413
MLCDYLVQILTARVYDVAQESPLEYAPNLSARLNNKLLLKREDMQSVFSFKLRGAYNKMVNLTPDLLAQGVIAASAGNHAQGVALGAKQLGTRAIIVMPVTTPQVKVDAVKARGGEVVLHGDTYDDAYAYARQLEAEKGLTFIHPFDDPHVIAGQGTIGMEILRQYQQPIHAIFVAIGGGGLISGIAAYVKRLRPEIKIIGVEPVDADAMNQSLQAGKRVRLSQVGLFADGVAVREVGEETFRLCQEYVDEIILVDTDDTCAAIKDVFEDTRSILEPAGALAIAGAKAYVEREQIQGQTLVAVACGANMNFDRLRFVAERAEFGERREAIFAVTIPETPGSLRKFCECIGRRNLTEFNYRIADEKIAHIFIGMQIQNRADKIHMVETFAECGFEILDLTDDELTKLHLRHMVGGHSPLAHNELLYRFEFPERPGALMKFVASMSPNWNISMFHYRNNGSDYGRIVVGMQVPPQEMEEWQAFLDSLGYQYWDESQNPAYKLFLG

SEQ ID NO: 31659 - DNA, 969 bp, Ralstonia eutropha JMP134
  CDS (1)..(969)
atgaccgaactgaagctaccaacgtacgcagacgtccaggaagccgcgaagcgccttgatggcgttgccaaccgcacgccggtcaatacgtcgcgcacgctcaatgacatgctcggcgccgaagtcttcttcaaatgcgagaatttccagcgcatgggagcgttcaagttccgcggcgcgtacaacgcgctggcgaagttcagccccgcgcaacgccgagcgggtgtggtggcgttctcgtcgggcaaccatgcgcagggcatcgcgctgtcggcaaagctgcttggcattcccgccaccatcgtgatgccgcacgacgcaccggcggccaaggtcgcggccaccaaaggctacggcgccaatgtcgtgatctacgaccgctacaccgaggaccgcgaagccatcgggcgccgcctggccgacgaacacggcttcacgctgattccgccctatgaccatccggacgtcctgtccggccagggcacggcagcaaaggaactgttcgaggcggtcggcgcactggacgtcgtgctgacgccgctcggcggcggtggattgctatccggcaccgcactgaccacacgcgcgctgtcgccgcaatgcaagctctttggcgtcgaacctgaagccggcaacgatggacagcagtcgttccgcagcggcgccatcgtgcacatcgataccccgaagaccattgcggacggcgcccagacgcagcatctcgggcagtacacgttcagcatcatcaagcgggacgtcgacgatatcctgacggcgtccgatgcccaactggtggaagcgatgaagttctacgccacacgcatgaagatgatcgtcgagcccacgggctgcctaggcctggccgccgccatgcatatgaaggatgcgctgaagggcaagcgcatcggcatcatcatcagcggcggcaatatcgacctggagcggttctgcgaactggtgtcggcgtaa

SEQ ID NO: 31660 - protein, 322 aa, Ralstonia eutropha JMP134
MTELKLPTYADVQEAAKRLDGVANRTPVNTSRTLNDMLGAEVFFKCENFQRMGAFKFRGAYNALAKFSPAQRRAGVVAFSSGNHAQGIALSAKLLGIPATIVMPHDAPAAKVAATKGYGANVVIYDRYTEDREAIGRRLADEHGFTLIPPYDHPDVLSGQGTAAKELFEAVGALDVVLTPLGGGGLLSGTALTTRALSPQCKLFGVEPEAGNDGQQSFRSGAIVHIDTPKTIADGAQTQHLGQYTFSIIKRDVDDILTASDAQLVEAMKFYATRMKMIVEPTGCLGLAAAMHMKDALKGKRIGIIISGGNIDLERFCELVSA

SEQ ID NO: 31661 - DNA, 1512 bp, Methylobacillus flagellatus KT
  CDS (1)..(1512)
atgaaaatcgactacctgcagaaaatcaaatccgcccgcgtctacgacgtggcaagcaagaccccgctggacctgcttcccaacctttcccgacgcattcacaaccaggtgctgctcaaacgcgaggatatgcagcctgtattttcattcaagcttcgcggtgcttacaacaagatggcgcagctttccgccgaggcactgtcgcgcggggtcattaccgcatccgccggcaatcatgcacagggtgtagccctggccgccaagaacgcaggctgtcgcgcagtcatcgtcatgcccgtcaccacccctgacatcaaggtggatgcggtacgtcaccgcggcgctgaggtagtgttggctggagagtcctacacggactcctataaccacgccatgaagctcatggaagagcagcaacttacctttgttcatccgttcgacgatcccgacgtgatcgcgggacaaggcaccgtggcaatggaaatactgcaggacaaccccggcccaatcgaggcaattttctgccctgtcggcggcggcggcttgatcgcgggcgtggccgcctacatcaaggcagtacgtccggagatcaaggtcatcggtgtcgaggtcaatgatgccaacgcgatgacggtttcgctgcaacagggcgcgcgcgtcaccttggaccaggtcggcctgtttgcagacggcaaggccgtcaaattggtcggagaagagactttccgcctgtgccaacaatacgtcgacgagatgatcctggtcgacaacgacgccatctgcgcagctatcaaggatgtcttcgaggatacgcgcgccatcctcgagccgacgggcgcgctctccctggctggactcaaggcctatgcccagcagcacaatctgcaaggcaaaaccctgatagcggtcgcctcgggcgccaacatgagcttcgaccgcctgcgctttgtcgccgagcgcgcagaaattggcgaaaagcgcgaagctgtgctggccgtgaccatcccggaaaccccgggctcattcaagaagttctgccggctgatcggccaccgcaacattaccgagttcaattaccgctatgctgacgccacggccgcacatatctacgtcgggatcgccatccaggaccccagtgaatccggcaagctagtcacccggctgcaggagcacggactgccggcgttggacctgagtgagaatgaagtagcaaagctgcacctgcgccacctggttggcggccatgcgccgcaggcaaagcacgagcaggtctaccgcttcgaattcccggaaaaacccggtgcattgatgaattttctcgacaatatgcggcatgactggaacatcagcctgtttcattatcgtaaccatggtgcggatttcggcagggtcctggtcggcatgcaggtaccgcctggggaagagcaggagtttaccgatttcctgcagaatctgggctatccgtactgggacgaaagcaacaacccggcttataagctattcctcggctaa

SEQ ID NO: 31662 - protein, 503 aa, Methylobacillus flagellatus KT
MKIDYLQKIKSARVYDVASKTPLDLLPNLSRRIHNQVLLKREDMQPVFSFKLRGAYNKMAQLSAEALSRGVITASAGNHAQGVALAAKNAGCRAVIVMPVTTPDIKVDAVRHRGAEVVLAGESYTDSYNHAMKLMEEQQLTFVHPFDDPDVIAGQGTVAMEILQDNPGPIEAIFCPVGGGGLIAGVAAYIKAVRPEIKVIGVEVNDANAMTVSLQQGARVTLDQVGLFADGKAVKLVGEETFRLCQQYVDEMILVDNDAICAAIKDVFEDTRAILEPTGALSLAGLKAYAQQHNLQGKTLIAVASGANMSFDRLRFVAERAEIGEKREAVLAVTIPETPGSFKKFCRLIGHRNITEFNYRYADATAAHIYVGIAIQDPSESGKLVTRLQEHGLPALDLSENEVAKLHLRHLVGGHAPQAKHEQVYRFEFPEKPGALMNFLDNMRHDWNISLFHYRNHGADFGRVLVGMQVPPGEEQEFTDFLQNLGYPYWDESNNPAYKLFLG

SEQ ID NO: 31663 - DNA, 948 bp, Mesorhizobium sp. BNC1
  CDS (1)..(948)
atgtacattccgaatcttaccgacgtgcttgcagcacgagccttaatcgaaccccatattcatcgcacacccgttctcacatcgacattcatcaatggacttgctggcgccgaactcttcttcaagtgcgagaaccttcagaaggctggggccttcaaagcgcgcggcgcgtcgaacgcggtgtttggcctgaacgacgagcaggcgaagaagggtgttgcaacgcactcgtccggcaatcacggaacctgcctttcctatgcagctggtcggcgcggcattccctgcaccgtagtgatgccgcgcaccgcgccgcaggctaagaaggatgcggtccggggctacggcggtcgtgtcgtcgaatgcgagccgtcaacctcgtcgcgtgaggccgtctttgccgaggttgttgccgagaccggcgcggaattcgtgcatccctataacgaccatcgtgtcatcgccgggcaggcgacctgctctgccgagttgatcgagcaggtcgacggtctcgacgccgtggtcgcgccgattggcggcggcggcatggtgtcgggaagctgcctgacgctctccaatctcgcgcccggcgtaaagatctacgccgccgagcccgagcaggccaacgacgcctaccgtagcttcaaggccggccgcatcatcgccgacgacgcgccagaaacggtcgccgacggcctgaaagtgccgctgaaggaactgacctggcatttcgtgaagaacaacgtcaccgacatcctgacggcttccgagcaggagatcgtcgacgcgatgaagctgatctggaagcgcatgaagatcgtgatggagccgtccagcgccgtgccgctggcgaccatcctgaagaaccctgatgtctttgccggcaagcgcgtcggcgtgatcgtgacgggcggcaatgtggatctcgacaaattaccgtggaactga

SEQ ID NO: 31664 - protein, 315 aa, Mesorhizobium sp. BNC1
MYIPNLTDVLAARALIEPHIHRTPVLTSTFINGLAGAELFFKCENLQKAGAFKARGASNAVFGLNDEQAKKGVATHSSGNHGTCLSYAAGRRGIPCTVVMPRTAPQAKKDAVRGYGGRVVECEPSTSSREAVFAEVVAETGAEFVHPYNDHRVIAGQATCSAELIEQVDGLDAVVAPIGGGGMVSGSCLTLSNLAPGVKIYAAEPEQANDAYRSFKAGRIIADDAPETVADGLKVPLKELTWHFVKNNVTDILTASEQEIVDAMKLIWKRMKIVMEPSSAVPLATILKNPDVFAGKRVGVIVTGGNVDLDKLPWN

SEQ ID NO: 31665 - DNA, 975 bp, Mesorhizobium sp. BNC1
  CDS (1)..(975)
atgaccgacattgccatgatcgaagccgcgcggagccgcattgcgggccatgtgcgccgcacaccgctccttttctcgccgtttttcgatgaaatcgcaggccggcgtgttcttgtgaagaccgagtccctccagcttaccggctctttcaagttccgcggtgcctggtcggcgatatcggcgctggacccggacgttcgggcgaaaggcgtgctcgccttttcctcgggcaatcatgcgcaggccgtggcgctcgccgcgcgaatgcacggcatttcttccaccatagtcatgccatccgacgcgccgaagctgaagatcgaaaacacgcgggcctatggcgccgaagtggtgctctatgatcgcgcgaaagaggaccgtgatgcgatcggtgtgaagctcgcggctgaaaggggacttacgctgatcaagcccttcgacgagccgctggtcattgccggccagggcactacgggccttgagctcgcggagcaggccaaggaaataggcgtggaaagggcggaagtgcttgtcccctgtggaggtggcggactcacctccggcatagcgctagcgcttgaagcgcgtgcaccccggctcaaggcgcgcccctgcgagcccgcgggcttcgacgatgtgacccgctccctcgcttccgggaagatcgagcgcaatgcggcgatgtcaggttcgatctgcgacgccattgtcacgccgtcgcccggcacgatcacctttccgatcctgaggcggctttgcggcgcgggaatcgtcgtaaccgacgaggaggcgctgcatgcaatggcgctggccttcacccggctcaagatcgtggtagagccgggcggcgcggtggcgctcgcggcagcactgttccatggcgaggagatggcggctgacacggttatcgcggttgcctccggcggcaatgtggatgccgccttgtttcggcaggctctggaacggtttgcttag

SEQ ID NO: 31666 - protein, 324 aa, Mesorhizobium sp. BNC1
MTDIAMIEAARSRIAGHVRRTPLLFSPFFDEIAGRRVLVKTESLQLTGSFKFRGAWSAISALDPDVRAKGVLAFSSGNHAQAVALAARMHGISSTIVMPSDAPKLKIENTRAYGAEVVLYDRAKEDRDAIGVKLAAERGLTLIKPFDEPLVIAGQGTTGLELAEQAKEIGVERAEVLVPCGGGGLTSGIALALEARAPRLKARPCEPAGFDDVTRSLASGKIERNAAMSGSICDAIVTPSPGTITFPILRRLCGAGIVVTDEEALHAMALAFTRLKIVVEPGGAVALAAALFHGEEMAADTVIAVASGGNVDAALFRQALERFA

SEQ ID NO: 31667 - DNA, 1560 bp, Ralstonia eutropha JMP134
  CDS (1)..(1560)
atgaaccgcaagcccgcctcctccaaacccgactatctcaggaagatcctgaccgccaaagtgtatgacgtggcgcaggagaccgagctgacctttgcgcacaacctgtcggcgcgcaccggcaactcggtgtggttcaagcgcgaggacacgcagccggtgttctcgttcaagctgcgcggcgcatacaacaagatggcgtcgctgacgcaggaagaactcaggcgcggcgtgatcgcggcgtcggccggcaaccacgcgcagggcgtggcgctgtccgcggcgcgcctgcagtgccgcgcaatcatcgccatgccggtgaccacgccgcaggtgaagatcgacgcggtgcgcgagcgcggcggcaagtgggtggagatcgtgctgcacggcgattcgtacagcgacgcctacaaccatgcggcaatcctggagaagaagcacaagctgaccttcatccacccgttcgacgatccggaagtgatcgccggccagggcaccatcgcaatggaaatcctgcgccagcatccgggcccgatccacgcgatcttcgtcgcgatcggtggcggcgggctgatttcaggcatcgcgtcttacatcaaggccgtgcgccccgagatcaaggtgatcggcgtgcagaccgtggattccgacgcgatgaagcgctcggtcgaagcgggcaagcgcattgaactcaaggacgtgggcctgttctctgacggcaccgcggtgaagctggtcggcaaggaaacattccgcatcacgcgcgaactcgtcgatgagatcgtgctggtggacaccgatgcgatctgcgcgggagtgaaggatgtgttccaggacacgcgcagcattcttgaacccgcgggcgcgctggccgtcgccggcctcaagctgtatgccgagcgcgagaagctcaagggcgagcatctggtcgcgatcgcctgcggcgccaacatgaacttcgaccgcctgcgcttcgtcgccgagcgcgccgaagtgggcgaggcacgcgaaggcgtgttcgccgtcactattcccgaagagcgcggtagcttcaagcgcttctgcgaactggtgggcacgcgcagcgtcactgaattcaactaccgcattgccgaccggaacatcgcgcatatcttcgtcggcgtacagatcgccagccgcgccgagaacgacaagatcgccgcgaacttccgccgccatggcttcgacacgctggacctgtccaacgacgaactcgccaagcagcacatccgctacatggttggcggcgtctcgccgctcgcgcacgacgaactgctgtatcgcttcgaattccccgagcgcccgggcgcgctgatgaagttcctgtcgagcatgagcccgaactggaacatcagcctgttccattaccgcaaccagggtggcgacacgtccaacatcctggtcggcatccaggtgccgaagaacgaaaagcgcgctttccgcgcattcctttcgacgctgggttacgtacactgggacgagaccgagaacccggtctacaagctgttcctctccgaccgcggaaatcaagcatga

SEQ ID NO: 31668 - protein, 519 aa, Ralstonia eutropha JMP134
MNRKPASSKPDYLRKILTAKVYDVAQETELTFAHNLSARTGNSVWFKREDTQPVFSFKLRGAYNKMASLTQEELRRGVIAASAGNHAQGVALSAARLQCRAIIAMPVTTPQVKIDAVRERGGKWVEIVLHGDSYSDAYNHAAILEKKHKLTFIHPFDDPEVIAGQGTIAMEILRQHPGPIHAIFVAIGGGGLISGIASYIKAVRPEIKVIGVQTVDSDAMKRSVEAGKRIELKDVGLFSDGTAVKLVGKETFRITRELVDEIVLVDTDAICAGVKDVFQDTRSILEPAGALAVAGLKLYAEREKLKGEHLVAIACGANMNFDRLRFVAERAEVGEAREGVFAVTIPEERGSFKRFCELVGTRSVTEFNYRIADRNIAHIFVGVQIASRAENDKIAANFRRHGFDTLDLSNDELAKQHIRYMVGGVSPLAHDELLYRFEFPERPGALMKFLSSMSPNWNISLFHYRNQGGDTSNILVGIQVPKNEKRAFRAFLSTLGYVHWDETENPVYKLFLSDRGNQA

SEQ ID NO: 31669 - DNA, 990 bp, Anabaena variabilis ATCC 29413
  CDS (1)..(990)
atgtcacagcttaactctgtaaccataactgatgtgcaagcagcacagcagcgtcttgctggtattgcccatcgcacacctgtgttaacttccacaactgtcaacgatcgcactcataatcaagtctttttcaagtgcgaaaattttcaacgcacaggtgcttttaaatttaggggtgcttataatgccttagcacagctatcaccaacacaaaaacacaaaggtgtgttgactttttcttcggggaatcatggacaagcgatcgcccttgcaggtaagttactcaacatccccacaactattgtcatgcctgatgatgcacctgtcatcaagcaaacagctaccaaaagttacggtgcagaggtaattttatataatcgccaagaaacgaatcgggaagaattggcgcaaaatctcgcaagcgatcgcggtttaaccctaattcctccatacgatcatccccatgtgatcgctggacaaggtacagccgcattagaactggtgcaagaaattggtgaactggatttgctgttagtttgttgtggcggtgggggattaatttccggttgtgcgatcgccgctaaagctcttttacctaatttgcgcgtaattggtgtagaaccaacactcgctgatgatgctactcgttccttttacaccaaaaccctacaaaccgtcacaaatccccatactatcgctgatggtgcgcggactcctagcctgggacagatgacatttcccctagttttacaatacgttgatgatatggtgacggtatcagaggaagcaattattcgcaccatgtttttcctctgggaacggctgaaaatagtcgttgaacccacaggcgtattagccgcagccgctttacttgaaaatgtagtcaaagcacaaggaaagagaattggtgtgattatcagtggtggaaatgtagatttaaccaaagttgctagttatgtcaacttagtcactgaatttggtaatgggtga

SEQ ID NO: 31670 - protein, 329 aa, Anabaena variabilis ATCC 29413
MSQLNSVTITDVQAAQQRLAGIAHRTPVLTSTTVNDRTHNQVFFKCENFQRTGAFKFRGAYNALAQLSPTQKHKGVLTFSSGNHGQAIALAGKLLNIPTTIVMPDDAPVIKQTATKSYGAEVILYNRQETNREELAQNLASDRGLTLIPPYDHPHVIAGQGTAALELVQEIGELDLLLVCCGGGGLISGCAIAAKALLPNLRVIGVEPTLADDATRSFYTKTLQTVTNPHTIADGARTPSLGQMTFPLVLQYVDDMVTVSEEAIIRTMFFLWERLKIVVEPTGVLAAAALLENVVKAQGKRIGVIISGGNVDLTKVASYVNLVTEFGNG

SEQ ID NO: 31671 - DNA, 1524 bp, Burkholderia cepacia R18194
  CDS (1)..(1524)
atggcatcccacgattacctgaagaaaatcctcaccgcgcgcgtctacgacgtcgcgatcgagacggaactcgaatccgcccgcatcctgtcggcccggctgcgcaatgcggtctacctgaagcgcgaggacaaccagccggtgttctcgttcaagctgcgcggcgcatacaacaagatggcgcacattccggcggacgcgctcgcgcgcggcgtgattacggcatcggccggcaaccacgcgcagggtgtcgcgttctcggcggcccggatgggcgtgaaggccgtgatcgtcgtgcccgtcacgacgccgcaggtgaaggtcgatgcggtgcgtgcgcacggcggcccgagcgtcgaggtgatccaggccggcgagtcgtacagcgatgcgtatgcacacgcggtcaaggtgcaggaagagcgcggcctcacgttcgtccacccgttcgacgatccgtacgtgatcgccggccagggcacgatcgcgatggaaatcctgcgccagcaccagggcccgatccatgcgatcttcgtgccgatcggcggcggcgggctcgcgtccggcgtcgcggcctacgtgaaggcggtgcgcccggagatcaaggtgatcggcgtgcaagccgaagattcgtgcgcgatggcgcagtcgctggaagccggcaggcgtgtcgagctgagcgaggtcggcctgttcgcggacggtaccgccgtgaagctggtcggcgaggaaaccttccgcctctgcagcgaatacctcgacggcgtcgtgacggtgaacaccgacgcgctgtgcgcggcgatcaaggacgtcttccaggacacgcgcagcgtgctcgagccgtccggcgcgctcgcggtcgcgggcgcgaagctctacgcggaacgcgaaggcatcgagaaccagacgctcgtcgcggtcacgtccggcgcgaacatgaacttcgaccggatgcgcttcgtcgccgagcgcgcggaagtgggtgaagcgcgcgaagccgtgttcgcggtcacgatccccgaagagcgcggcagcttcaagcgcttctgctcgctcgtcggcgatcgcaacgtcaccgagttcaactaccggatcgccgatgcgcaggccgcgcacatcttcgtcggcgtgcagatcaagcgtcgcggcgaatcggccgagatcgccgcgaacttcgaatcgcacggcttcaagagcgtcgacctgacgcacgacgagctgtcgaaggaacacatccgctacatggtgggcggccgctcgccgctcgcgctcgacgagcgcctgttccgcttcgaattcccggagcggccgggcgcgctgatgaagttcctgtcgtcgatggcgccggactggaacatcagcctgttccactaccgcaaccagggcgcggactacagctcgatcctcgtcgggctgcaggtgccgcaggccgatcgcgccgaattcgaacgcttcctcgcggcactcggctatccgtatgtcgaggagagcgccaacccggcttaccgcctcttcctgtcgtaa

SEQ ID NO: 31672 - protein, 507 aa, Burkholderia cepacia R18194
MASHDYLKKILTARVYDVAIETELESARILSARLRNAVYLKREDNQPVFSFKLRGAYNKMAHIPADALARGVITASAGNHAQGVAFSAARMGVKAVIVVPVTTPQVKVDAVRAHGGPSVEVIQAGESYSDAYAHAVKVQEERGLTFVHPFDDPYVIAGQGTIAMEILRQHQGPIHAIFVPIGGGGLASGVAAYVKAVRPEIKVIGVQAEDSCAMAQSLEAGRRVELSEVGLFADGTAVKLVGEETFRLCSEYLDGVVTVNTDALCAAIKDVFQDTRSVLEPSGALAVAGAKLYAEREGIENQTLVAVTSGANMNFDRMRFVAERAEVGEAREAVFAVTIPEERGSFKRFCSLVGDRNVTEFNYRIADAQAAHIFVGVQIKRRGESAEIAANFESHGFKSVDLTHDELSKEHIRYMVGGRSPLALDERLFRFEFPERPGALMKFLSSMAPDWNISLFHYRNQGADYSSILVGLQVPQADRAEFERFLAALGYPYVEESANPAYRLFLS

SEQ ID NO: 31673 - DNA, 921 bp, Burkholderia cepacia R18194
  CDS (1)..(921)
atgccgcttcatatcccgaccccttatatccgctcgcaaattgcgtcccgccggctcggcaggaccatccggctgaagctcgatgcgctgcagccgtcgggctcgttcaagctgcgcggcatcggcgccgtttgtgaagcgcggcatgcggccggcgcgcggcgcttcgtgtcgtcgtcgggcggcaatgcgggcatcgcggtcgcgtattgcggccgcgaactcggcgtgccggtgctcgtcgtcgtgccggagagcgcgtcggcccgcgcccgcgagctgatccgcgtcgagggcgcggaggtggtcgtgcacggcgcgagctgggccgaggcgaacgcgtacgcgcagtcggcactcggcgagcacgatgcgttcgtgcatccgttcgacgaccgtgtgctgtggcagggccacgcgacgatgatcgacgagatggcggcggccggcccgaagcccggcgcggtcgtgctcgcggtcggcggcggcgggctgctgtgcggcgtgctcgaagggctggcgcgcaacggctggcacgacgtgccggtagtcgccgccgaaacggagggcgccgactgctatgcgcgctcgctggcgcaggggcgtgtggtcgagttgtcggcgatcacgagcatcgcgacgtcgctcggcgcgaagcggccatgcgatgcggcggtcgaatgggccgcgcgacacgagatccatccggtcgtcgtgtccgatgccgacgcggtggccgcgtcgctgcgcttcctcgatgaacaccggatcgttgtcgagcccgcatgcggtgctgcgctggccgcactcgagcgaccggtgcccgtgcttgcatcggcgacggatatcgccgtgatcgtctgcggcggcgtgacggcaaccgtcgagcagatgcagacgttgcgcgcgacgttgcggtag

SEQ ID NO: 31674 - protein, 306 aa, Burkholderia cepacia R18194
MPLHIPTPYIRSQIASRRLGRTIRLKLDALQPSGSFKLRGIGAVCEARHAAGARRFVSSSGGNAGIAVAYCGRELGVPVLVVVPESASARARELIRVEGAEVVVHGASWAEANAYAQSALGEHDAFVHPFDDRVLWQGHATMIDEMAAAGPKPGAVVLAVGGGGLLCGVLEGLARNGWHDVPVVAAETEGADCYARSLAQGRVVELSAITSIATSLGAKRPCDAAVEWAARHEIHPVVVSDADAVAASLRFLDEHRIVVEPACGAALAALERPVPVLASATDIAVIVCGGVTATVEQMQTLRATLR

SEQ ID NO: 31675 - DNA, 1044 bp, Burkholderia cepacia R1808
  misc_feature (977)..(977): n is a, c, g, or t
  CDS (1)..(1044)
atgtcgactgaatcaacgggcccggcccatacgacgatcgacggcgagccgattccgacgctcgacgaaatcgccgcgcagcatttcgcgttgtcgccctgggtcgcgcgcacgccggtattcgaacgcgccgatctgccgacgctcgaaggtacgcacgtcaacttcaagttcgagctgctgcaggcgagcggcagcttcaaggcgcgcggcgcgttcacgcacgtgctcgcgctcgacgaagcgcgcaagaacgccggcgtcacctgcgtgtcggccggcaatcatgcggcggccgtcgcatatgcggcgatgcggctcggcagcagcgccaaggtcgtgatgccccataccgcgagcccggtgcgcatcgcgcagtgccgcgcgtatcgcgcggaagtcgtgctggccggcagcgcgtcgcaggcattcgacctcgtgcggcgcgtcgaggccgaggaaggccgcttcttcatccatccgttcaacggctatcgcacgattctcggcacggcgacgctcggctacgaatgggcgacgcagacgcccgacctcgatgcggtgatcgtgccgatcggcggcggcggcctcgcggccggcatggccaccgcattgcgcctcgcgaatccgcgcgtgcacgtgtacggcgtcgagcccgaaggcgccgacgcgatgtgccgcagcttcgcggcgaaccacacgatcaagatgggcgcgatgcagagcatcgccgattcgctgatggcgccgcacaccgaggaatacagctatcagctgtgccggcgtcacgtcgaccggatcgtcacggtgtcggacgacgcgctgcgcgcggcgatgctgttcctgttctcgcatctgaagctagcggtcgagccccgcgtgcgcggccgcgctcgcggggctgctcggcccgctgcgcgaaacgctgcagggcaagcgggtcggcgtgctgctgccgggcacgaacaccgatccgnccacgctcggcatgcatctcgcgcacgcgcagatgcagcgctgaacccgctcgcgacgctcaggtag

SEQ ID NO: 31676 - protein, 347 aa, Burkholderia cepacia R1808
  misc_feature (326)..(326): Xaa can be any naturally occuring amino acid
MSTESTGPAHTTIDGEPIPTLDEIAAQHFALSPWVARTPVFERADLPTLEGTHVNFKFELLQASGSFKARGAFTHVLALDEARKNAGVTCVSAGNHAAAVAYAAMRLGSSAKVVMPHTASPVRIAQCRAYRAEVVLAGSASQAFDLVRRVEAEEGRFFIHPFNGYRTILGTATLGYEWATQTPDLDAVIVPIGGGGLAAGMATALRLANPRVHVYGVEPEGADAMCRSFAANHTIKMGAMQSIADSLMAPHTEEYSYQLCRRHVDRIVTVSDDALRAAMLFLFSHLKLAVEPRVRGRARGAARPAARNAAGQAGRRAAAGHEHRSXHARHASRARADAALNPLATLR

SEQ ID NO: 31677 - DNA, 921 bp, Burkholderia cepacia R1808
  CDS (1)..(921)
atgccgctccatattcagacgccgtacctccgctcgcacaccgcctcccgccggctcggcgccgacgtctggttgaagctcgatgcgcttcagccatccggttcgttcaaattgcgcgggatcggcgcggtgtgcgcggcgcgacaggcggccggcgcgcgtcgcttcgtgtcgtcgtcgggcggcaatgcgggcatcgcggtcgcgtattgcgggcgcgaactcggcgtgccggtgctggtggtggtgcccgagaccgcgtccgtgcgcgcacgcgaactgattcgcggcgaaggggccgaggtcatcgtgcatggcgcgagctgggtcgaggccaacgcgttcgcgctggcggccgtcggcgagcacgacgcgttcgtgcacccgttcgacgatccggtgttgtggggcggccacgcgacgatcgtcgacgagatcgcggtcgccggcccgaaacccgacgcgatcgtgctcgcggtcggtggcggcgggctgctgtgcggcgtgctggaggggctctcgcgcaacggctggcacgacgtgccggtcgtcgcggtggagacggcgggcgccgactgctatgcgcgctcggtcgcgcagcggcgtccggtggaactgccggcgatcgagagcatcgcgacgtcgctcggcgcgaagcggccgtgcgacgcggcgctcgagtgggcgagccggcatccgattcatccggtcgtcgtatcggatgcgcaggcggtggccgcctcgttgcggctggtggacgagcaccggctcgtcgtcgagcccgcgtgcggcgccgcgctggctgcgctcgaacggccggtgccggtgctggccgcggcgtcgaacatcgcggtgatcgtctgcggcggcgtgacggcgaccatcgagcaactgcagtcgtggagcgctacgttgcggtga

SEQ ID NO: 31678 - protein, 306 aa, Burkholderia cepacia R1808
MPLHIQTPYLRSHTASRRLGADVWLKLDALQPSGSFKLRGIGAVCAARQAAGARRFVSSSGGNAGIAVAYCGRELGVPVLVVVPETASVRARELIRGEGAEVIVHGASWVEANAFALAAVGEHDAFVHPFDDPVLWGGHATIVDEIAVAGPKPDAIVLAVGGGGLLCGVLEGLSRNGWHDVPVVAVETAGADCYARSVAQRRPVELPAIESIATSLGAKRPCDAALEWASRHPIHPVVVSDAQAVAASLRLVDEHRLVVEPACGAALAALERPVPVLAAASNIAVIVCGGVTATIEQLQSWSATLR

SEQ ID NO: 31679 - DNA, 978 bp, Burkholderia cepacia R1808
  CDS (1)..(978)
atgaccaacccgacccttcccacctacgacgacgtcgcggccgccgccgcgcgcctgcagggccacgcgcaccgcacgcccgtgatgacgtcgagcacgctcgacgacgcgctcggcgcgcaagtgttcttcaagtgcgagaacctgcagcgcatgggtgcgttcaagttccgcggcgcgttcaacgcgctgtcgcgcttcgacgccacgcagcgccgcaacggcgtggtcaccttctcgtcgggtaaccacgcgcaggcgatcgcgctgtcggcgcgcatgctcggcatcccggcgacgatcgtgatgccgcaggacgcgccggccgcgaagatggccgccacgcgcggctacggcggcaacgtcgtgacctacgaccgctatacggaagaccgcgagcagatcggccgcgagctggcggagaagcacgggctcacgctgatcccgccgtacgaccatgcggacgtgatcgccggccagggcacggcggcgaaggagctgttcgacgaagtcgggccgctggacgcggtgttcgcgccgctcggcggcggcggcctgctgtccggcaccgcgctcgcgacgcgggcgctgtcgccgcaagcgaagctgtacggcgtcgagcccgaagccggcaacgacggccagcaatcgttccgcagcggcgcgatcgtgcacatcgacacgccgcgcacgatcgccgacggcgcgcagacgcagcatctgggcaacctcacgttccagatcctgcgacgcgacgtcgacgacatcctgacagcgaccgacgccgaactggtcgacagcatgcggttcttcgcaacccggatgaagctcatcgtcgagccgaccggctgcctgtcgctcgcggccgcacgcaagatgaaggacgaactcgcgggcaagcgcgtcggcatcgtgatcagcggcggcaacgtcgacctcgcgaacttcgccgcactggtttccagtcccgccgcatga

SEQ ID NO: 31680 - protein, 325 aa, Burkholderia cepacia R1808
MTNPTLPTYDDVAAAAARLQGHAHRTPVMTSSTLDDALGAQVFFKCENLQRMGAFKFRGAFNALSRFDATQRRNGVVTFSSGNHAQAIALSARMLGIPATIVMPQDAPAAKMAATRGYGGNVVTYDRYTEDREQIGRELAEKHGLTLIPPYDHADVIAGQGTAAKELFDEVGPLDAVFAPLGGGGLLSGTALATRALSPQAKLYGVEPEAGNDGQQSFRSGAIVHIDTPRTIADGAQTQHLGNLTFQILRRDVDDILTATDAELVDSMRFFATRMKLIVEPTGCLSLAAARKMKDELAGKRVGIVISGGNVDLANFAALVSSPAA

SEQ ID NO: 31681 - DNA, 1056 bp, Listeria monocytogenes str. 1/2a F6854
  CDS (1)..(1056): transl_table=11
atgtataaaggtttactagaaaaatataaagaatatctaccagtaactgataaaacgccaatgatctcacttgcggaaggaaatacaccacttattccattaccgaatttgtccaaagaacttggggttactttatacggaaaatacgaaggcttaaatccaaccggttcttttaaagatcgtggaatggttatggctgttgcaaaagcgaaagaagaaggtgccgaagcggttatttgtgcatccactgggaatacttctgctgcggctgcggcatacgcaacacgtgcgggattaaaagcgtacattgttattccagaaggcaaagtcgctctaggaaaattagcgcaagcagttatgtatggcgcagatattatctcgattcaaggtaattttgatgaagcattaaaatcggttcgtgaattagctgaaacagaagcagtaacacttgtaaattccgtgaatccatatcgtttagaaggtcaaaaaacagctgcattcgaaatctgtgagcaattaggttccgcgccagatgtacttgcaattccagtcggtaatgccgggaatatttctgcatactggaaggggtttaaagaatggaatgaggctaaagcttctggactgccgcggatgcatggttttgaagcagaaggagctgcggcgattgttcaagggaaaccaattgataacccggaaacaattgcaacagcgattcgtatcggaaacccagctagttggcggcttgcagaagcagctcgcgatgaatctggcggatacatccattctgtaacagacgacgaaattgtgaatgcgtataaaaaaattgcagcacaagatggtgtctttatcgagccgggttctgccgcttcattagctggtgtcattcaacatgtagcaaatggaacaattaaaaaaggggaaacagttgtttgtgtctttactggaaatggcttaaaagatccagatactgcgatgagtgtgcatgaaattccaatttcccatgtggatgatatcgaagcaatgcgcacacatttacgttcaggagtgaaagcttaa

SEQ ID NO: 31682 - protein, 351 aa, Listeria monocytogenes str. 1/2a F6854
MYKGLLEKYKEYLPVTDKTPMISLAEGNTPLIPLPNLSKELGVTLYGKYEGLNPTGSFKDRGMVMAVAKAKEEGAEAVICASTGNTSAAAAAYATRAGLKAYIVIPEGKVALGKLAQAVMYGADIISIQGNFDEALKSVRELAETEAVTLVNSVNPYRLEGQKTAAFEICEQLGSAPDVLAIPVGNAGNISAYWKGFKEWNEAKASGLPRMHGFEAEGAAAIVQGKPIDNPETIATAIRIGNPASWRLAEAARDESGGYIHSVTDDEIVNAYKKIAAQDGVFIEPGSAASLAGVIQHVANGTIKKGETVVCVFTGNGLKDPDTAMSVHEIPISHVDDIEAMRTHLRSGVKA

SEQ ID NO: 31683 - DNA, 1581 bp, Rubrivivax gelatinosus PM1
  CDS (1)..(1581)
atggcccgcgccgcgccgcgccccgccccccgcacttccgtcgccaaacccgctctccgcaaggctggggccaagcccgactacctgcagcgcatcctgaccgcgcgggtctacgacgtggccatcgaatcggcactgcagttcgcaccgcaactgtcggagcggatgggcaaccaggtctggctcaagcgcgaggatgaacaggcggtcttcagcttcaagctgcgcggcgcctacaacaagatggcgcacctgagcccgcagcagctggggcgcggcgtgatctgcgcttccgccggcaaccacgctcagggggttgccctgtcggcccgcaagctccgctgccaagcgacggtcgtgatgccggtcaccacgccgcaactcaagatcgaggctgtgcgggcgctcggcggcaaggtcgtgttgcacggcgagagctattccgatgcctatgcccatgcactgaaactcgaacgggagcacgggcagaccttcgtgcatcctttcgacgatcccgacgtgatcgccggtcagggcaccatcgccatggagatcctgcgccagcaccaggggccgatcgacgccgtgttcgtggcagtgggcggtggcgggctgatctcgggcatcgctgcatacatcaaggcggtccggccggagatccaggtgatcggcgtccagaccaccgattccgatgcgatgctgcgttcggtgcgcgctggcaagcgcgtgacgctgcacgacgtggggctgttctccgacggcaccgccgtcaagctggtgggcgaagagacctttcgcctgacgaagcagtgggtcgacgatttcgaagtggtcgacaccgacgcggtctgcgcggcgatcaaggatgtgttccaggacacccgctcgatcctggagccggccggcgcgctgggcgtggcggccatcaaacagtacacggcacgcaccggctgcaagggcaagaccttcgtggcgatcacctgcggcgccaacatgaacttcgaccgattgcgcttcgttgccgagcgggccgaggtgggcgaggagcgcgaggcgctgttcgccgtcactatcccggaggaacggggttccttcaagcgcttctgcgagttgctcggcccgcgcagcgtcacggagttcaactaccgcatctcggacgcgcagaccgcgcaggtgttcgtgggcctgtccacgcgggaacacggcgaatcggctcgcattgccgagcggttcgagaagcagggcttcgcgacggtcgacctgacacacgacgaactggccaagacccatatccgccacatggtcggcggccgctccgagctggcccgcgaggagcgactgttccggttcgtcttcccggagcgtccgggagcgctgatgcgcttcctgacccgcatgcaccccgactggaacatcagcctgttccattaccggaatcagggtgccgattacggtcgcatccttgtcggcctgcagattccccgcggcgcgcagcgcgcactgcgagagttcctgtccacactggattacccctgcgtcgaggagaccgacaacccggtctaccagctcttcctgcgctga

SEQ ID NO: 31684 - protein, 526 aa, Rubrivivax gelatinosus PM1
MARAAPRPAPRTSVAKPALRKAGAKPDYLQRILTARVYDVAIESALQFAPQLSERMGNQVWLKREDEQAVFSFKLRGAYNKMAHLSPQQLGRGVICASAGNHAQGVALSARKLRCQATVVMPVTTPQLKIEAVRALGGKVVLHGESYSDAYAHALKLEREHGQTFVHPFDDPDVIAGQGTIAMEILRQHQGPIDAVFVAVGGGGLISGIAAYIKAVRPEIQVIGVQTTDSDAMLRSVRAGKRVTLHDVGLFSDGTAVKLVGEETFRLTKQWVDDFEVVDTDAVCAAIKDVFQDTRSILEPAGALGVAAIKQYTARTGCKGKTFVAITCGANMNFDRLRFVAERAEVGEEREALFAVTIPEERGSFKRFCELLGPRSVTEFNYRISDAQTAQVFVGLSTREHGESARIAERFEKQGFATVDLTHDELAKTHIRHMVGGRSELAREERLFRFVFPERPGALMRFLTRMHPDWNISLFHYRNQGADYGRILVGLQIPRGAQRALREFLSTLDYPCVEETDNPVYQLFLR

SEQ ID NO: 31685 - DNA, 1239 bp, Rubrivivax gelatinosus PM1
  CDS (1)..(1239)
ttgacctcagccgagtcgccggcgacggtgaccctggcggacgtcgaggccgctgcacgccggctggccggacaggtgctcgacacaccgtgtgtcgagtcgaagacgctgtccgagatcaccggcgcgcaggtcttcctgaagttcgagaacctgcagttcaccgcttccttcaaggagcgcggcgcgttgaacaagctgctggcgctggtcgccgcgcgcgacgacggcaccgccgcgttgaagggcgtgatcgccgcctccgccggcaaccatgcgcagggcgtggcgcatcacgcgcagcggctgggcctgcgcgcggtcatcgtgatgccccggcacacgccgacggtgaaggtcgagcgcacgcgcggcttcggtgccgaggtgctgctgcacggcgagagcttcgacgaggctcgcgcgcacgcgctggaggtggccgcggcgcagggcctgagcttcgtgcaccccttcgacgatccgctggtgatcgccggccagggcacgatcggcctggagatgctgcgcgcgcaaccgacgctcgacactctggtcatcgccgtcggcggcggcgggctgatctccggcatcgcgaccgtcgcccgggcgctgaagcccgggctggagatcgtcggggtgcagacggcgcgctttccggcgatggtgaacctcgtcaagggccgcacccatccgcaaggcaccagcacgatcgccgagggcattgccgtcggtgagccggggcggatcacgcgggcgatcgttcgcgacctcgtcgacgacatggtgctggtggacgaagcggacatcgagcatgccctggtgatgctgctggagatcgagaagacgctggtcgagggggccggcgccgcgggtctggctgcgctgctgaaggcgcccgggcgctacgccgggcgacgcgtgggcctggtgctgtgcggcggcaacatcgatccgctgctgctgtcggcgatcatcgagcgcggcatggtgcgggcggggcggctggcacgcatccgcgtcgacgcgcgcgacgcccccggcgcgctggcgcgcatcaccgccaccgtggccgaggccggcgcgaacatcgaggaagtgcatcaccagcgggccttcaccacgctgtcggcgcagaacgccgaggtggagttggtgttgcagacgcgcaatcacgcccatatcggcgcagtgatcgcgtccctggtggctcaggggttcgaggccaaggcctactga

SEQ ID NO: 31686 - protein, 412 aa, Rubrivivax gelatinosus PM1
MTSAESPATVTLADVEAAARRLAGQVLDTPCVESKTLSEITGAQVFLKFENLQFTASFKERGALNKLLALVAARDDGTAALKGVIAASAGNHAQGVAHHAQRLGLRAVIVMPRHTPTVKVERTRGFGAEVLLHGESFDEARAHALEVAAAQGLSFVHPFDDPLVIAGQGTIGLEMLRAQPTLDTLVIAVGGGGLISGIATVARALKPGLEIVGVQTARFPAMVNLVKGRTHPQGTSTIAEGIAVGEPGRITRAIVRDLVDDMVLVDEADIEHALVMLLEIEKTLVEGAGAAGLAALLKAPGRYAGRRVGLVLCGGNIDPLLLSAIIERGMVRAGRLARIRVDARDAPGALARITATVAEAGANIEEVHHQRAFTTLSAQNAEVELVLQTRNHAHIGAVIASLVAQGFEAKAY

SEQ ID NO: 31687 - DNA, 1515 bp, Pseudomonas fluorescens PfO-1
  CDS (1)..(1515)
atgctcgaacagtacgtcaagaagatcctcacctcgcgcgtttatgacgttgccgtagaaaccccgctgcagaacgcccgccagctctccgagcggctgggcaacgacatctggctcaagcgcgaagacttgcagccggtgttctcgttcaagattcgcggtgcctacaacaagctgacccagttgagcgacgaagagcgcgctcgcggcgtggtcaccgcgtcggcgggcaaccatgcacagggcctggccctggcggcgaaagtgttgggcgtgaaagcgaccatcgtgatgcccaagaccaccccggagatcaaggtcgaaggcgtgcgctcgcgcggtggcaaagtggtgctgcacggcgattccttcccggaagcgctggcctactcgctgaagctggtcgacgaaaaaggctacgtctacatccacccgtacgacgatccgcacaccattgccgggcagggcaccgtggcgatggaaattctgcgccagcacccgcagccgctggatgcgattttcgttccggtgggcggcggcggtctgatcgccggcatcgcggcctacgtgaaatacctgcgtccggacatcaaggtcatcggcgtcgagcccgacgactccaactgcctgcaagcggcgatggcggcaggcgaacgcgtggtgctgccgactgtaggcatcttcgccgacggcgtggcggtggcgcagatcggccagcacaccttcgatatctgcaaggattacgtcgacgaggtgatcaccgtcagcaccgacgagatttgcgcggcgatcaaggacatctacgacgacacccgttcgatcaccgaaccggccggcgccctgggcgtggccgggatcaagaagtatgtcgagcagcgcggcgtcagcggccagaccttcgtcgccatcgactccggggccaacgtcaacttcgaccgcttgcgccacgtcgccgagcgcgccgaactgggtgaaggccgcgaagcgatcatcgccgtgaccatcccggagaaggccggcagcttcaaggccttctgcgaggccatcggcaagcgccagatcaccgaattcaactaccgctataacaatggcagcgaagcgcacatcttcgtcggcgtgcagacccacccggacaacgacccgcgcagtgctttgctggcgagcctgaccgaacagggtttcccggtgctcgacctgaccgacaacgaactggccaaactgcacatccgccacatggtcggcggtcgcgccgcgcacgtggtcgatgaagtggtgctgcgcttcgagttcccggagcgtccgggcgcgctgttcaacttcctcaacaagctcggcgggcgctggaacatctcgatgttccactaccgcaaccacggtgcagcggacggtcgtgtggtggcgggtctgcaagtgccccacgacgagcgtcatctggtgcccgcagcccttgaggaaatcggctacccatactgggacgaaagcgacaacccggcctatcagctgtttcttggctga

SEQ ID NO: 31688 - protein, 504 aa, Pseudomonas fluorescens PfO-1
MLEQYVKKILTSRVYDVAVETPLQNARQLSERLGNDIWLKREDLQPVFSFKIRGAYNKLTQLSDEERARGVVTASAGNHAQGLALAAKVLGVKATIVMPKTTPEIKVEGVRSRGGKVVLHGDSFPEALAYSLKLVDEKGYVYIHPYDDPHTIAGQGTVAMEILRQHPQPLDAIFVPVGGGGLIAGIAAYVKYLRPDIKVIGVEPDDSNCLQAAMAAGERVVLPTVGIFADGVAVAQIGQHTFDICKDYVDEVITVSTDEICAAIKDIYDDTRSITEPAGALGVAGIKKYVEQRGVSGQTFVAIDSGANVNFDRLRHVAERAELGEGREAIIAVTIPEKAGSFKAFCEAIGKRQITEFNYRYNNGSEAHIFVGVQTHPDNDPRSALLASLTEQGFPVLDLTDNELAKLHIRHMVGGRAAHVVDEVVLRFEFPERPGALFNFLNKLGGRWNISMFHYRNHGAADGRVVAGLQVPHDERHLVPAALEEIGYPYWDESDNPAYQLFLG

SEQ ID NO: 31689 - DNA, 957 bp, Pseudomonas fluorescens PfO-1
  CDS (1)..(957)
atgcacgtattcactcgcgacgacatcgaaaacgccgcccgccaggtttatcaggtgatgtcggccaccgcccaataccgttggccattgctcgccgagcggttgggctgcaccgtttgggtcaagcatgaaaaccacacgccgaccggcgccttcaaagtgcgtggcggtattacctttatgcactggctgcgtcgtgagcatccgactgtcaaaggcatcgtttctgcgacacgtggcaatcacggtcagagtctggcgctggcggcgcgggccgtgggactgaaagcgttgatcgtggtgccgcagggcaactcgctggagaagaacaacgccatgcgtggctttggtggtgaagtggtcgaatacgggcgcgattttgacgaggctcgtgaagaggcggcgcgcctggcacagaagcacgacctttttctggtgccaccgtttcacgttgaactggtcaagggcgtagcgacctatgcgctggagctgttcggtgcggcgccggatctggatacggtttacgtgcccattggttgcggatcggggatctgtggtgtgatcgctgcccgcgacgccctaggactgaataccgaagtggtgggggtggtgtcgacagaggccgcggccgccaagctgtcgtttgaagcgaacgcgatttgcgaaaccgcttcggcgaatacgttcgcggatggtttggctgttcgcaagccgattgcgcaggcgttcgatatctataaagaaggggcggcgaggattctctcggtcagcgaagttgagattgccgaagccatgcgcgtgtattacaccgacacccacaatcttgcggagggcgcgggtgccgcagcgttggcggcgttgatgcaggatcgggggaggatggaggggaaaaaggtcggggtggttctgtccggagggaatattgaccgatcggtgtatgcaaaggtgattggttga

SEQ ID NO: 31690 - protein, 318 aa, Pseudomonas fluorescens PfO-1
MHVFTRDDIENAARQVYQVMSATAQYRWPLLAERLGCTVWVKHENHTPTGAFKVRGGITFMHWLRREHPTVKGIVSATRGNHGQSLALAARAVGLKALIVVPQGNSLEKNNAMRGFGGEVVEYGRDFDEAREEAARLAQKHDLFLVPPFHVELVKGVATYALELFGAAPDLDTVYVPIGCGSGICGVIAARDALGLNTEVVGVVSTEAAAAKLSFEANAICETASANTFADGLAVRKPIAQAFDIYKEGAARILSVSEVEIAEAMRVYYTDTHNLAEGAGAAALAALMQDRGRMEGKKVGVVLSGGNIDRSVYAKVIG

SEQ ID NO: 31691 - DNA, 918 bp, Pseudomonas fluorescens PfO-1
  CDS (1)..(918)
atgttgcacatccgcacgccgctgatcctccatccgaccctgtcgactgcgtcccggcgcatgtggctgaagctggaaaacctgcaaccctgtggctcgttcaagctgcgcgggatgggcttgttgtgcagtcaggcagcggcgcagggcaagcgcaaggtcgtatgcccgtccggcggcaatgccgggctggccacggcggtggcagcggtcagcctgggtttgcaagcctgcatcgtggtgccgcacaccacgcctgaagcgacccgcgcgcgtattcgccgcaccggcgcggacgtcatcgtccacggcaaagtctgggacgaggccaatcagcgagcgcgagaactggccagcgcggcggacaccgaatacgtgccggccttcgatcacccggtgttgtgggaagggcacagctcgatggtcgacgaaatcctcgacgactgcccgcaggtcgataccgtggtcacgtcggtcggcggcggtggtttgctggcgggcatcctcaccgggctgctgcgccatgaccgccgagactgccgcatcatcacctgcgaaaccacaggcgccgcctcgttcgctgcggccgtccaggctggccatccggtgcgcctgagtcggatcgacagtgtcgccacctccctcggcgccgcccaggtggcggcttggccggtagagcatatcggcgagttcgatcatgagtgtctggtgctgtcagatgacgacgcgatcatgggcgtggtgcgttatgccagtgatctgcggcaattggtggagcctgcgtgcggggtttcgctggcggtggcgtacctcgatcatccggcgttggcgggggcgaatgatgtggtggtcattgtttgcggcggggtgagtatcagtgcgcaactggtggcggggtgggcgcggttgggatcttga

SEQ ID NO: 31692 - protein, 305 aa, Pseudomonas fluorescens PfO-1
MLHIRTPLILHPTLSTASRRMWLKLENLQPCGSFKLRGMGLLCSQAAAQGKRKVVCPSGGNAGLATAVAAVSLGLQACIVVPHTTPEATRARIRRTGADVIVHGKVWDEANQRARELASAADTEYVPAFDHPVLWEGHSSMVDEILDDCPQVDTVVTSVGGGGLLAGILTGLLRHDRRDCRIITCETTGAASFAAAVQAGHPVRLSRIDSVATSLGAAQVAAWPVEHIGEFDHECLVLSDDDAIMGVVRYASDLRQLVEPACGVSLAVAYLDHPALAGANDVVVIVCGGVSISAQLVAGWARLGS

SEQ ID NO: 31693 - DNA, 993 bp, Rhodospirillum rubrum
  CDS (1)..(993)
atgacccggcccttgcccgagactcccggggtcggcgcccaggacgtggtcgatgccggccaccgcctgaagggtcttgtcgtcaccacgccgcttgtcgaaagcccggtgctcaacgccagcatcggtggccggctgctggtcaaggccgaatgcctgcagcggacgggatcgttcaagatgcgcggggcgaccaacgccctggcccagatggacgacgcggcgcgggcgcgcggcgtcatcacccattcgtcgggcaatcatggtcaggccttggcctcggccgcccgggccttcggcctgcgggcgaccgtggtgatgcccgatgacgcgcccgccctcaagatcgagctgacccgggcccatggcgccgaggtggtcttctgtccgcgccacgcccgcgagcagacggtggcccggctagccggcgaaagcggcgccgtggtgatccatccctatgagacccccgccgtcatcgccggccaggggacggtgggcctggaaatcgtcgagcaatgcgccgccatcggcgtggtgcccgatcaggtgctggtctgctgtggcggcggcggtctgaccgccggggtggccctggccatcgaccggctgctgcccggcgtgccggtgatcgccgtcgagcccgagggctgggacgataccaagcgctccctggccgccggtgctatcgtcgccaatgacggtctgacggccacggcctgcgacgccttgcaggcgatgtgtccgggcaccctcagcttctcgctcaatcgccatctgctggccggggcggtgagcgtggacgaggcgatggtgcgccacgccatgcgccaagccttcgttcatctcaagctggtggccgaacccggcggcgccgtggccctggccgccgccctggccggcaaggtcgagaccgccgatcgcctcagcgtcgtcgtgctctcgggcggcaatgtcgatcccggccgcttcgcgagcgtgctggccggggattag

SEQ ID NO: 31694 - protein, 330 aa, Rhodospirillum rubrum
MTRPLPETPGVGAQDVVDAGHRLKGLVVTTPLVESPVLNASIGGRLLVKAECLQRTGSFKMRGATNALAQMDDAARARGVITHSSGNHGQALASAARAFGLRATVVMPDDAPALKIELTRAHGAEVVFCPRHAREQTVARLAGESGAVVIHPYETPAVIAGQGTVGLEIVEQCAAIGVVPDQVLVCCGGGGLTAGVALAIDRLLPGVPVIAVEPEGWDDTKRSLAAGAIVANDGLTATACDALQAMCPGTLSFSLNRHLLAGAVSVDEAMVRHAMRQAFVHLKLVAEPGGAVALAAALAGKVETADRLSVVVLSGGNVDPGRFASVLAGD

SEQ ID NO: 31695 - DNA, 1269 bp, Rhodospirillum rubrum
  CDS (1)..(1269)
atgtcgcccttccccccgtttccggccgcttcggccgtccccgccgtcaccctggccgatgtggaagccgcggcccggctgatcgcccatgccgtgccccataccccgctgctcccctcgcgcaccctgtcgcggctgaccggggccgaggttttcatcaaattcgagaaccaccagttcaccgcctcgttcaaggagcgcggcgcgctcaaccggttgagcgcgctgagcgagaccgagcgggcgcgcggcgtcatcgccatgagcgcgggcaatcacgcccagggcgtggcctatcacgcccagcgcctgggcattcccgccgttatcgtcatgcccgctgacacgcccttcgtaaaggtcaagcacacccgtgatttcggcgcccgcgtggtgctggaaggcgagaccgtggccgaatcgcggctggtggccgagcgcatccgcgaggaggagggactgaccttcgttcatccctataatgatccctgggtgatcgccggccaggggacggtggccttggaaatgcttgccgatcagcccgacctcgacatcctggtcgccccgatcggcggcggcggcctgctgggcggcatggcggtggcggccaaggcggtcaaaccggccattgagatgatcggcgttcaggtcgggctttatccttcggcctataacgccctccacggcctgccgccttgcaccggcggcgccacggtggccgagggcatcgccgtcaaggaaccgggcgatctgaccttgccgctgctgcgcgctttggtctcgcgcatcatcctggtcgatgagacggcggtcgaggaagccatctcgctctatctctcggtcgaaaagaccgtggccgagggggcgggggcggcgtcgctcgccgccctgttgaccgagccccagcgctttcgcggcaaaaaggtcggtctggtgctgagcggcggcaatatcgatccgcggatcatggcctcggtcatcatgcgcagccttgtgcgcgagggccgaatcgcccatctctcgatcaggatcggcgacaagccggggcaactcgcccgggtggcgacggtgatcggcgaaaccggcggcaatatcgtcgaggtccgccatgaacgcctgacctcggatatttcggtcaaatccaccgatctgcgggtgatcctggagacccgcgaccatacccatctggccgagatccttgaacgcctcgccgccgccggttttccggccaacgaacgctcgttcagcggcccggccgccggcgattaa

SEQ ID NO: 31696 - protein, 422 aa, Rhodospirillum rubrum
MSPFPPFPAASAVPAVTLADVEAAARLIAHAVPHTPLLPSRTLSRLTGAEVFIKFENHQFTASFKERGALNRLSALSETERARGVIAMSAGNHAQGVAYHAQRLGIPAVIVMPADTPFVKVKHTRDFGARVVLEGETVAESRLVAERIREEEGLTFVHPYNDPWVIAGQGTVALEMLADQPDLDILVAPIGGGGLLGGMAVAAKAVKPAIEMIGVQVGLYPSAYNALHGLPPCTGGATVAEGIAVKEPGDLTLPLLRALVSRIILVDETAVEEAISLYLSVEKTVAEGAGAASLAALLTEPQRFRGKKVGLVLSGGNIDPRIMASVIMRSLVREGRIAHLSIRIGDKPGQLARVATVIGETGGNIVEVRHERLTSDISVKSTDLRVILETRDHTHLAEILERLAAAGFPANERSFSGPAAGD

SEQ ID NO: 31697 - DNA, 1536 bp, Ralstonia metallidurans CH34
  CDS (1)..(1536)
atgacccgcacgcccgccaagcccgactatctgaaaaaaatcctgaccgccaaggtctatgacgtggcccaggagaccgaattgacctatgcgcccgcgctgtcggcacgcaccggcaatgcggtctggttcaagcgcgaggacacccagccggtgttctcgttcaagttgcggggggcgtacaacaagatggcgtccctcacgcccgaggaactcaagcgcggcgtgatcgctgcttcggcaggcaaccacgcccagggcgtggcgctggcggcggcccgcatgcagtgcaaggcgatcatcgccatgccgaccaccacgccgcaggtgaagatcgacgccgtgcgcgagcgcggcggcgagtgggtgcagatcgttctgcacggtgagtcgtacagcgatgcctacctgcacgcggccgaactcgagaagaagcacaagctcgcgttcatccacccgtttgacgaccccgaggtcatcgccggccagggcaccatcgcgatggagatcctgcgccagcaccctggcccgatccacgcgatctttgtcgccatcggcggcggcggcctgatctccggcatcgccgcctacgtcaaggcggtgcgccccgagatcaaggtgatcggcgtgcagaccttcgattccgatgccatgaagcgctcggtggacgccggcaagcgcgtggaactgaaggatgtgggcctgttctcggacggtaccgccgtcaagctggtgggcaaggaaacgttccgcatcacgcgtgaactggtcgacgacatcatcctggtcgataccgatgcgatctgcgcgggcctgaaggatgtgttccaggacacccgcagcatcctcgagccggccggcgcgctggccgtggccggcctcaaggcgtacgccgagcgcgagaagctcaagcaccagcacctggtggcgatcgcctgcggcgccaatatgaacttcgaccgcctgcgctttgtggccgagcgcgccgaagtgggtgaagcgcgcgaagcggtcttcgccgtgacgatccccgaggaacgcggcagcttcaagcgcttctgcgaacaggtcggcacgcgcagcgtgaccgagttcaactaccgcatcgccgacaagggcgtggcgcatatcttcgtcggcgtgcagatcgccagccgcgcggagagcgacaagatcgccgccaacttccgccgccatggctttgacacgctcgacctgtcgaacgacgaactggccaagcagcacatccgctacatggtcggcggccattcgccgctggcgcatgacgaactgctgtatcgcttcgagttcccggagcgcccgggcgcgctgatgaagttcctgtccagcatgagcccgaactggaacatcagcctgttccactaccggaaccagggcgcggatacgtcgaacatcctggtcggcatccaggtgccgaagaacgagaagcgcgcgttccgcagcttcctttcgacgctcggttacgtacactgggatgagaccgacaaccccgtctacaagctgttcctttcctga

SEQ ID NO: 31698 - protein, 511 aa, Ralstonia metallidurans CH34
MTRTPAKPDYLKKILTAKVYDVAQETELTYAPALSARTGNAVWFKREDTQPVFSFKLRGAYNKMASLTPEELKRGVIAASAGNHAQGVALAAARMQCKAIIAMPTTTPQVKIDAVRERGGEWVQIVLHGESYSDAYLHAAELEKKHKLAFIHPFDDPEVIAGQGTIAMEILRQHPGPIHAIFVAIGGGGLISGIAAYVKAVRPEIKVIGVQTFDSDAMKRSVDAGKRVELKDVGLFSDGTAVKLVGKETFRITRELVDDIILVDTDAICAGLKDVFQDTRSILEPAGALAVAGLKAYAEREKLKHQHLVAIACGANMNFDRLRFVAERAEVGEAREAVFAVTIPEERGSFKRFCEQVGTRSVTEFNYRIADKGVAHIFVGVQIASRAESDKIAANFRRHGFDTLDLSNDELAKQHIRYMVGGHSPLAHDELLYRFEFPERPGALMKFLSSMSPNWNISLFHYRNQGADTSNILVGIQVPKNEKRAFRSFLSTLGYVHWDETDNPVYKLFLS

SEQ ID NO: 31699 - DNA, 969 bp, Ralstonia metallidurans CH34
  CDS (1)..(969)
atgacgaccctgcaactgcccacctacgccgacgtcgaagccgccgccaaacggatcgaaggctttgccaaccgcacgccggtcaacacgtcgcgcacgctcaacgaaatgctcggcgcggaagtcttcttcaagtgcgagaacttccagcgcatgggcgccttcaagttccgaggcgcgttcaacgcgctggcgaagttcaccgccgagcaacgccgtggcggcgtggtcgcgttctcgtccggcaatcacgcgcagggcatcgcgctgtccgcgaagctgctgaacatgcccgccacgatcgtgatgccccacgacgctccggccttgaaggtagcggcgacgcgggggtatggcgcgaccgtggtgagctatgaccgctacaaggaagaccgtgaagccatcggccgcgatctggccgaaaagcacggcatgacgctgatcccgccgtatgaccatccggatgtgctgacgggccagggcaccgccgccaaggaactgttcgaggaagtgggcgcgctcgacgccatcttcaccccgctgggcggcggcggactgctctccggcaccgcattgaccacgcgcgcgctggcgccacagtgccagatctacggcgtggagcccgaggcgggcaacgacggccagcaatcgttccgcagtggttcgatcgtccatatcgacaccccgcagaccattgccgatggcgctcagacgcagcacctgggtcagtacacgttcagcatcatcaagcgtgacgtgactgatatcctgaccgcaacagacgcgcaactggtcgaggccatgcgcttctacgccgaacggatgaagatgattgtcgagccgaccggctgcctgggcctggcggcggtcatgcagatgaaggacgcgctcaagggcaagcgcgtgggcgtagtgatcagcggcggcaacgtcgacctggagcgattctgctcgctgctgtcagcctga

SEQ ID NO: 31700 - protein, 322 aa, Ralstonia metallidurans CH34
MTTLQLPTYADVEAAAKRIEGFANRTPVNTSRTLNEMLGAEVFFKCENFQRMGAFKFRGAFNALAKFTAEQRRGGVVAFSSGNHAQGIALSAKLLNMPATIVMPHDAPALKVAATRGYGATVVSYDRYKEDREAIGRDLAEKHGMTLIPPYDHPDVLTGQGTAAKELFEEVGALDAIFTPLGGGGLLSGTALTTRALAPQCQIYGVEPEAGNDGQQSFRSGSIVHIDTPQTIADGAQTQHLGQYTFSIIKRDVTDILTATDAQLVEAMRFYAERMKMIVEPTGCLGLAAVMQMKDALKGKRVGVVISGGNVDLERFCSLLSA

SEQ ID NO: 31701 - DNA, 966 bp, Burkholderia fungorum LB400
  CDS (1)..(966)
atgcaagcgcttcccgctcccactttcgacgacgtactcgacgccgctgcgcgtcttgaaggcgtcgcccaccgcactcccgtgctgacctcgagcacgtttgacgaacgaacgggcgcgtcggtgttcttcaagtgcgagaattttcagcgcatgggcgccttcaagtttcgcggtgcctataacgcgatctcgcatttcgacgcggagcaacgcaaagccggcgtgctgacgtattcgtcgggtaaccacgcgcaggcaattgcattgtcggcgcggcttgccggcattcgcgcgacgatcatcatgccgcacgacgcaccggccgccaaagtcgcggcaaccaaaggctacggcggcgaagtgatcacctacgaccgctacaccgagaaccgcgaagagatcggccggcgtctcgccggagagcgtggcatgacgctgattccaccatacgatcatccacatgtgatcgccgggcagggcacggcggtgaaagaactgatcgaggaaaccggcccgctcgacatgctgttcgtgtgcctcggcggcggcgggctgatcagcggcagcgcgttgtccgccgcggcgttgagcccggcgtgcacggtgatcggcgtcgagccggaggcgggtaacgacggccagcagtcgctggcgcgcggcgagatcgtgcatatcgacacgccgcgcacgatcgccgacggcgccgcctccacgcatctgggcgactacacgtttgcgatcatccgcaagctggttgcgcggatcgaaacggtcagcgacgggcaactgatcgacacgatgcgctttttcgcgcagcgcatgaagatcgtggtcgagccgacgggttgtctcgccgcggcggcggtgctcaacggcatcgtgccggtgaagggcaagcgtgtcggcgtggtggtcagcggcggcaacgtcgatctggaaaagctcgcgcagtatctcgcctga

SEQ ID NO: 31702 - protein, 321 aa, Burkholderia fungorum LB400
MQALPAPTFDDVLDAAARLEGVAHRTPVLTSSTFDERTGASVFFKCENFQRMGAFKFRGAYNAISHFDAEQRKAGVLTYSSGNHAQAIALSARLAGIRATIIMPHDAPAAKVAATKGYGGEVITYDRYTENREEIGRRLAGERGMTLIPPYDHPHVIAGQGTAVKELIEETGPLDMLFVCLGGGGLISGSALSAAALSPACTVIGVEPEAGNDGQQSLARGEIVHIDTPRTIADGAASTHLGDYTFAIIRKLVARIETVSDGQLIDTMRFFAQRMKIVVEPTGCLAAAAVLNGIVPVKGKRVGVVVSGGNVDLEKLAQYLA

SEQ ID NO: 31703 - DNA, 1035 bp, Burkholderia fungorum LB400
  CDS (1)..(1035)
atgtccgttccttcgctggccgatctatcgttagccgatgtctaccgcgcacgccgccgtatcgaggggcgtgtgcgccatgcgccgctcgtcgaatcgcagagcctgtcggcgctcgcgggcgtgccggtgtttctcaaactcgaaaccgtgcagccgactggcagcttcaaggtgcgcggcgcgacaaacgcgctcggtcatctcgccgaacagggctgccggaaagtcgtgaccgcgtcgacgggcaatcacgggcgcgcggttgcgcatgcggcccgcacgctcggtatcgacgcgacggtctgcatgtcggcgctcgtgccggccaataaggtcgacgcggtgcgcgcgctcggcgcgcacgtgcggattgtcggcaaaagccaggacgaggccgagcacgatgcgttgagactggtacgcgaagaaggcttcgcttatgttccgccgttcgacgatccccatgtgatcgccggtcaggcgacgatcggtctggaaatcgtcgaggcgttgccggatgtagccaacatcgtcgtgccgctatcgggcggcggcctgttcgcgggcgtcgcgttcgccgccagaagcgcgaatcgcgcgatcggcctgaccggcgtgacgatggcgcgcggtgcggcgatgcatgccagtctggtggccggccagccggtgctggtcgaagaagtggcaacgctcgccgattcgctcggcggcggcatcgggctggaaaaccgctacacgtatgcgctcacgcgcgatctgatcgaccagaccgtgctgctcgatgaggcctcgatcgcgcgcggcatcgcgcatgcgtaccggcatgaacggctcgtcgtggaaggcgcggcggcggtgggcattgccgcgttgctcgatggcgtgctgcccgccggacgtatcgggcgcgggccgctcgtgctcatcgtgaccggcgccaacatcgatatggacctgcatcggcggatcgtcgatgcggattccatgcaacccgactcgacgcaatccggtttacatcccatctcatga

SEQ ID NO: 31704 - protein, 344 aa, Burkholderia fungorum LB400
MSVPSLADLSLADVYRARRRIEGRVRHAPLVESQSLSALAGVPVFLKLETVQPTGSFKVRGATNALGHLAEQGCRKVVTASTGNHGRAVAHAARTLGIDATVCMSALVPANKVDAVRALGAHVRIVGKSQDEAEHDALRLVREEGFAYVPPFDDPHVIAGQATIGLEIVEALPDVANIVVPLSGGGLFAGVAFAARSANRAIGLTGVTMARGAAMHASLVAGQPVLVEEVATLADSLGGGIGLENRYTYALTRDLIDQTVLLDEASIARGIAHAYRHERLVVEGAAAVGIAALLDGVLPAGRIGRGPLVLIVTGANIDMDLHRRIVDADSMQPDSTQSGLHPIS

SEQ ID NO: 31705 - DNA, 1512 bp, Magnetococcus sp. MC-1
  CDS (1)..(1512)
atgtccgaacaactgtttcgccacattcttacttcccgcgtctacgaggctgcggtggagacccctttggaacagtcggcttggctttcggcgcagctacgcaaccaagtttttattaaacgcgaggatctacagcctgtcttttcgtttaaattacgcggggcctacaacaaaatggcgcagcttacccctgagcagcgggcccggggcattattgcggcctctgcgggcaaccatgcgcaaggggtggcctttagcgcccgtcagttggggttatctgccaccattgtgatgccctgcaccaccccagagatcaaggtgggggcggtcaaacagtttggtgcccaggtggtgctgcatggggataactactccatcgccgccgaccactgtaaagagctggctcagcacaacggcatgacctttattcacccctttgacgatgagctggtgatcgccggacagggtaccgtggggctggagattatgcgccagagcggtaatcaactggacgccatttttgttccggtcggcggcggggggttgattgcgggcattgccacctatgtaaaaaatctgctaccgcagatccgtattattggcgtagaacccaccgatagcgatgccatggcccgcgccctagaggcgggcaagattgtctctttagaccaagtgggcatctttgccgatggggtggcggtgcgtgaggttggtacacgcaccctggcgctgtgtgaacagtatgtggatgagatggtgcgggtcaatgtggatgagatctgtaccgccatcaagtggacctatcaagccacccgtgccattgtagagcccgcaggggccttagcgctggctggtttacgccgctatgtggcggaaaaaggcataaccggtcaacgcttggtggtcatcaatagcggggccaatatgaactttgagcggctccgttatgtaaccgaacgcaccatggttggggagcaacgcgaggcgctgtttgccatcaccatacctgaacagcccggtgctctacgccacttttgccaagaggtggtgggggaccataatattaccgaatttaactaccgtctatcggggcgcgatgccgcccatatctttgtgggcattgatctgcgtgaaccagccgaacgacaactgctcgcccatcggttacagagtttccactatcaatttgtggatcttaccgaaaacgatctggccaagacccacctgcgtcatatggttggcgggcgttcccatgtggtgcagcatgagcgtcttttgcgttttcgtttccccgaacggcccggtgccttggcccactttcttaccaccatgcaggcggattggaacatctcactgtttcaataccgactacacggcggggagtatggtcgggtgttgattggtctggaggtgccccctgagcaacacgatcaattgcaaagctgcctagataagctgggttttcgctatgtagatgagagtgagaatcctgcctataagctgtttctctag

SEQ ID NO: 31706 - protein, 503 aa, Magnetococcus sp. MC-1
MSEQLFRHILTSRVYEAAVETPLEQSAWLSAQLRNQVFIKREDLQPVFSFKLRGAYNKMAQLTPEQRARGIIAASAGNHAQGVAFSARQLGLSATIVMPCTTPEIKVGAVKQFGAQVVLHGDNYSIAADHCKELAQHNGMTFIHPFDDELVIAGQGTVGLEIMRQSGNQLDAIFVPVGGGGLIAGIATYVKNLLPQIRIIGVEPTDSDAMARALEAGKIVSLDQVGIFADGVAVREVGTRTLALCEQYVDEMVRVNVDEICTAIKWTYQATRAIVEPAGALALAGLRRYVAEKGITGQRLVVINSGANMNFERLRYVTERTMVGEQREALFAITIPEQPGALRHFCQEVVGDHNITEFNYRLSGRDAAHIFVGIDLREPAERQLLAHRLQSFHYQFVDLTENDLAKTHLRHMVGGRSHVVQHERLLRFRFPERPGALAHFLTTMQADWNISLFQYRLHGGEYGRVLIGLEVPPEQHDQLQSCLDKLGFRYVDESENPAYKLFL

SEQ ID NO: 31707 - DNA, 933 bp, Thermobifida fusca
  CDS (1)..(933)
atgacgtcacgcatcactgtgtcccgtcaggtccccacgaccttcgacgtgcacctcgctgtccaacgcaccgctccctatctgcgtcgcaccccgctcctgcgcactcgtctgcggggccgccccctgctgctgaagctggagcatttgcagctcaccggtgcgtttaaactacgcggcgccttgaatgcgctactcaccggggacaggggtgaacgggtggttaccgcctcgggtggcaaccacggcctcggagtggccaccgccgcgcacctgctcggcggtacggccaccgtgtacgtacccgagaccgttcccgcggtcaaggagcggcggttgcgggacgccggtgccgacgtggttcgggccggcaccgagtacgcggcagcggaagccgcagcccgcgcctacgcggacaccgaagggctccgctacatccacgcctacaacgacccggacgtggtcgcaggccaaggcacgctcggccacgagatcgtcgccgacgcacccgactgcgatgcagtcgccgtggccgtaggcggcggcggtctcgccgcaggcgtgagcctgggcatcggcgacgaacggctcaccgtcgcggtagagccgcgcggctgcgccagcctgcacgccgcattcgccgccggcgagcccgtggacaccccggtcgattcagtagcggcctcggccttgggcgcctcccgggtgggcgacatcccgttcgcggtactgcgcgaccgcaacgtgacctccaccctcgtctcggaccccgagatccttgccgcccgcgacctgctgtgggaggaattccggatcgcggtggagcccgccgcggctactcccatggctgcctggctggccgggcacgtccccggcgaactgccgtgcgtggtgatctgcggcgccaacgccgactggcgtcccctggactga

SEQ ID NO: 31708 - protein, 310 aa, Thermobifida fusca
MTSRITVSRQVPTTFDVHLAVQRTAPYLRRTPLLRTRLRGRPLLLKLEHLQLTGAFKLRGALNALLTGDRGERVVTASGGNHGLGVATAAHLLGGTATVYVPETVPAVKERRLRDAGADVVRAGTEYAAAEAAARAYADTEGLRYIHAYNDPDVVAGQGTLGHEIVADAPDCDAVAVAVGGGGLAAGVSLGIGDERLTVAVEPRGCASLHAAFAAGEPVDTPVDSVAASALGASRVGDIPFAVLRDRNVTSTLVSDPEILAARDLLWEEFRIAVEPAAATPMAAWLAGHVPGELPCVVICGANADWRPLD

SEQ ID NO: 31709 - DNA, 1266 bp, Novosphingobium aromaticivorans DSM 12444
  CDS (1)..(1266)
atggaaaatgcagcgctcacgcccgtagtgcagggggccgccgacgacgcggacgccctgctgactctcgccgacgttcgtgcggcggcggagcgcattgccggccaggtggtgcgcaccccgaccctgcacagcaagacgctgagcgcgattaccggcgcgaacatctggatcaagttcgagaacctgcagttcaccgccgcctacaaggagcgaggtgcgctcaatgccctgctgctcctttcgcaggaacagcgcgcgcggggcgtgatcgccgcgtcggcgggaaaccacgcgcaggggctttcctaccacggaacccgcctgggcgttcccgtgaccatcgtcatgccgcgcacgacgccgacggtgaagatcatgcagaccgaggccgtgggcggcaaggtcgtgctcgagggcgagaccttcgacgaggcctatgcccatgcgcgcaagctggagcgcgaactgggactgacgttcgtccacccgttcgacgagcgcaatgtcgcggccggacagggtacggtcgcgctcgagatgctcgaggatgcgcccgagatcgacatgctggccgttcccatcggtggcggtggcctgctttcgggcatgggcacggcggcgcgcgggatcaagccggagatcggcctgatcggcgtgcaggcacagctcttcccgtcgatgttcgcgcggctcaagcacctcgatttgccatgcggcggcgatacgctggccgagggcatcgcggtgaaggagccgggggcgttcacctccgccgtgctgcgcgatctggtcgacgatgtggtgctggtgaacgaagccgcgctggaatcggccgtggcgctgctgctccagatcgagaagaccgtggtcgaaggcgcgggcgccgcggggctggcggcggtgatgcagaaccgggagctgttcgcgggccgcaacgtgggcgtcgtgctgacgggcgcgaacatcgatacgcgcctgctggccaacgtgctgctgcgcgatcttgcacggtcggggcgcctcggccgcctgcgcatcacattgcaggaccgtcctggcgcgctgttcaaggtggtcgaggagttcaaccgtcaccaggtgaacatccttgaagtttggcaccagcgcatcttcacttcgctgccggccaagggcctgaccgccgagatcgagtgcgaggcgcgcgatcgcgagcagatcgaccggctcgtcgccgggctgcgcggcaagggctacgacgtcgagcaggtcgaactggggtag

SEQ ID NO: 31710 - protein, 421 aa, Novosphingobium aromaticivorans DSM 12444
MENAALTPVVQGAADDADALLTLADVRAAAERIAGQVVRTPTLHSKTLSAITGANIWIKFENLQFTAAYKERGALNALLLLSQEQRARGVIAASAGNHAQGLSYHGTRLGVPVTIVMPRTTPTVKIMQTEAVGGKVVLEGETFDEAYAHARKLERELGLTFVHPFDERNVAAGQGTVALEMLEDAPEIDMLAVPIGGGGLLSGMGTAARGIKPEIGLIGVQAQLFPSMFARLKHLDLPCGGDTLAEGIAVKEPGAFTSAVLRDLVDDVVLVNEAALESAVALLLQIEKTVVEGAGAAGLAAVMQNRELFAGRNVGVVLTGANIDTRLLANVLLRDLARSGRLGRLRITLQDRPGALFKVVEEFNRHQVNILEVWHQRIFTSLPAKGLTAEIECEARDREQIDRLVAGLRGKGYDVEQVELG

SEQ ID NO: 31711 - DNA, 1206 bp, Ferroplasma acidarmanus
  CDS (1)..(1206)
atgttaagttatgatagaatagtcagagcaggaaatgagataaaggggaagatacatagaacgccattattccattcaacaacattcagcaatatgttttcatgtgacgtttactttaaaatggagaattttcagaagacggggtctttcaaatccagaggagctatggtaaaattttcaacgttgaccgctgaacagaaaaaaaatggagtaataaccgccagtgcaggaaatcacgcacagggagtggcttttgcggcttcctattatggcgttgatgcaaaaattgtcatgcctgaaacaacaccgcctgccaaggtaaacgctgtccaatcctatggcggcacagttatactaaagggcaatagctacgacgaagcacatgaatatgcggtacaggtttcagtggacgagaaaagggaatttattgaagcttataacgatgaggatgttattgccgggcaggggacaataggccttgaaattttagaagatgtgaaaccggacattgtaatagtgccaataggtggtggagggcttatttcagggatatcatttgcaattaaatcaaaaaacaaggatataaaaataataggggtagagtccgaaaaggcaaatgccatggaattatctataaaggaaggcaaaatagttccatacaccagcaacgatacaattgctgatggaatcgccgtaaaatatccgggaaatataacatttgaactggtaaagaaatatgtggatggagttgttacagtatcggatgagaatattgcatatgcactattcaagctgcttgaaagggaaaaagtgcttgtggagccttccggcgcagctggccttgcagcattatttgaaaataaaattgatgttaagggcaagaaagttgttattgtactttcaggagggaacgtaaacttcctactgctgtcaaacataatatacagggcgcttgaaatggaaaacaagttgcttcgccttgaattcaatctgcctgaccacccgggtataatggaaaaaatagtaaatgccatatcatcttccggagccaatatataccatgctgaggtggataatttaaacaaggatacgcctataggataccagtatctcctattcacaataaacatccttgacaaatcgagaatagatgaattgctcgggagcctcgataaacttggctataaataccggataataggatag

SEQ ID NO: 31712 - protein, 401 aa, Ferroplasma acidarmanus
MLSYDRIVRAGNEIKGKIHRTPLFHSTTFSNMFSCDVYFKMENFQKTGSFKSRGAMVKFSTLTAEQKKNGVITASAGNHAQGVAFAASYYGVDAKIVMPETTPPAKVNAVQSYGGTVILKGNSYDEAHEYAVQVSVDEKREFIEAYNDEDVIAGQGTIGLEILEDVKPDIVIVPIGGGGLISGISFAIKSKNKDIKIIGVESEKANAMELSIKEGKIVPYTSNDTIADGIAVKYPGNITFELVKKYVDGVVTVSDENIAYALFKLLEREKVLVEPSGAAGLAALFENKIDVKGKKVVIVLSGGNVNFLLLSNIIYRALEMENKLLRLEFNLPDHPGIMEKIVNAISSSGANIYHAEVDNLNKDTPIGYQYLLFTINILDKSRIDELLGSLDKLGYKYRIIG

SEQ ID NO: 31713 - DNA, 1254 bp, Cytophaga hutchinsonii
  CDS (1)..(1254)
atgaatagtaaagtgaaggttgaagacattgttgaagcggcaaaccgtttgaaaaatgttgtgacgcatacgccattaaccaaaaatgagcatctttctcaggaatataactgcaacctatggttaaaaagggaagatctgcaattggttcgttcctataaacttcgtggagcatataattttatgtgcagtcaaaaacgcgaagatatagaaaagggtgttgtatgtgccagtgccggaaaccatgctcagggcgttgcctattcctgccaggcgttgaaaattaaaggccggatctatatgccgagcacaacacccaaacaaaaagttacgcaggtaaaattttttggtaaagagtttgttgaagttgttctgaccggcgatacgtttgatgattcgtacaaagaggcaatgaattattgcacagagaataaattattatttgtacatccgttcgatgatcctaaagtaatagccgggcaaggtacagtaggttttgaaatattaaatgatattgttggaaccattgattatatctttgtgccgattggcggcggcgggcttgcagcaggactttgtacctacataaaagaattgagcccgcatacaaaaatcattggggtggagccgttaggtgcgccggcaatgaaacgctcactggaagaagggaaagttgttgtactggaagaaatcgataagtttgtggatggtgctgccgtgaagcgggtaggcgatctcaattttgatatctgttcagaatatctagatgatgtacagttggtaccggaagggaaaacatgcagcacgatcataaagctgtataatgaagaagccattgtagcagaacctgcaggggcattaagcattagtgtgctggattattataaagatgaaataaaagggaagaatgttgtgtgtgtgatcagcggcagtaacaacgatatcgaccgcatgcaggagatcaaggaacggtcgttgttgtatgaagggctgaaacattatttcataatccgctttaagcagcgtacaggagcactcagagagtttctggatgaggttttagggccaaatgatgatattacctattttgaatatacaaagaaaacaaaccgtgaaaatggcccggcaatggttggtattgaggttaaaatgaaagaagattttaatttactcatcgaccgtatgaacgcaaaaaatgtcgactatacgttagtaaattcagattcaaacttatttagttttctgatcatgtaa

SEQ ID NO: 31714 - protein, 417 aa, Cytophaga hutchinsonii
MNSKVKVEDIVEAANRLKNVVTHTPLTKNEHLSQEYNCNLWLKREDLQLVRSYKLRGAYNFMCSQKREDIEKGVVCASAGNHAQGVAYSCQALKIKGRIYMPSTTPKQKVTQVKFFGKEFVEVVLTGDTFDDSYKEAMNYCTENKLLFVHPFDDPKVIAGQGTVGFEILNDIVGTIDYIFVPIGGGGLAAGLCTYIKELSPHTKIIGVEPLGAPAMKRSLEEGKVVVLEEIDKFVDGAAVKRVGDLNFDICSEYLDDVQLVPEGKTCSTIIKLYNEEAIVAEPAGALSISVLDYYKDEIKGKNVVCVISGSNNDIDRMQEIKERSLLYEGLKHYFIIRFKQRTGALREFLDEVLGPNDDITYFEYTKKTNRENGPAMVGIEVKMKEDFNLLIDRMNAKNVDYTLVNSDSNLFSFLIM

SEQ ID NO: 31715 - DNA, 1512 bp, Microbulbifer degradans 2-40
  CDS (1)..(1512)
atgccccagacttaccttaaacgcatattagatgcgcgaatatacgatctagccatagaaaccccactagagtccgtgccgcttatttctattcgcacaggcaacaacgtgttgcttaaacgcgaagacttgcagccggtgttctcttttaaaattcgcggtgcctacaacaagttgcgcctattaagcgaagaggccagaaaggtcggtgtaattgctgcttctgcaggtaaccatgcacaaggtttggctttggctgctaagcatatgggggttgcggccactattgttatgccgcgcaccacgccagctattaaggtagatgcggtgcgccgtcgcggcgccaaagtggtgctaatgggcgacgcctacgacgaagctgcagcccatgctaaaaaactggtggaagagaaaggccttacctatatccacccgttcgatgacccagacgtgatcgcgggccaaggcacagtgggtatggagatattgcgccagcaccccggcgatatagatgtggtgtttgtacctgttggcggcggcggcttatgtgccggtgtagcggcttatatcaagcacgtgcgcccagaaaccaaggtcatagcggtggaggcagaagattctgcctgtttaaaattggcaatggataaaaaacgccgtgcggtgttgcccagtgtgggtatttttgccgagggcgtggctgtggcgcaaataggtaaagaaacctaccgcgtaattaaagagtgcatcgacgaagttataaccgttaacactgacgaaatgtgcgcggcaataaaagatatattcgaagatacccgctctattgccgagcctgcgggcgcgctttctcttgcgggcttaaaaaaatatgttgcgcgtacaggctgtgtagataaaacgctaatcgccattgatagcggcgccaacaccaactttgaccgtttacgctatatctctgaacgcactgagtttggcgaaaaacgcgaagctatattcgccgttaccctgccagaaaagcccggcgcctataaaaaattctgtaaagatttgggcaagcgcaatattaccgagtttaattatcgctacgccgataatcagcaggcacacatttttgtgggcttgcaaataacgcccgataaaaacgaccgtgaagacatcgtcaatacgcttacaaaaggcggttatgatgtagtggatatgaccgataacgaagtggccaagttgcacgttcgctatatggtgggcggccatgcaactgtgccagatgaaattgtgtatcggtttgagttccccgagcgcccaggtgcgctaatggaattcttaactaaaattgccgggcgctggaatatttctatgttccattaccgcaaccacggtgcggcgtttggcagagtgttggtgggcatgcaggtgcctaagggcgagcgcaaagacttaaaagatttgctcgacgaacttaattacacctattgggatgagacccaaaacgaagcctattcatttttcttggggtag

SEQ ID NO: 31716 - protein, 503 aa, Microbulbifer degradans 2-40
MPQTYLKRILDARIYDLAIETPLESVPLISIRTGNNVLLKREDLQPVFSFKIRGAYNKLRLLSEEARKVGVIAASAGNHAQGLALAAKHMGVAATIVMPRTTPAIKVDAVRRRGAKVVLMGDAYDEAAAHAKKLVEEKGLTYIHPFDDPDVIAGQGTVGMEILRQHPGDIDVVFVPVGGGGLCAGVAAYIKHVRPETKVIAVEAEDSACLKLAMDKKRRAVLPSVGIFAEGVAVAQIGKETYRVIKECIDEVITVNTDEMCAAIKDIFEDTRSIAEPAGALSLAGLKKYVARTGCVDKTLIAIDSGANTNFDRLRYISERTEFGEKREAIFAVTLPEKPGAYKKFCKDLGKRNITEFNYRYADNQQAHIFVGLQITPDKNDREDIVNTLTKGGYDVVDMTDNEVAKLHVRYMVGGHATVPDEIVYRFEFPERPGALMEFLTKIAGRWNISMFHYRNHGAAFGRVLVGMQVPKGERKDLKDLLDELNYTYWDETQNEAYSFFLG

SEQ ID NO: 31717 - DNA, 927 bp, Haemophilus influenzae 86-028NP
  CDS (1)..(927)
atgaaaaatctactcaccaatcctcaaccctctcaatcagattatatcaatgccattgttaaacttggttcgcgcgtatatgaagctgcacaagtgacccctttacaaaaaatgggaaaactttctgaacgactgcacaataatatctggattaaacgagaagaccgtcagccagtaaatagctttaaactacgcggtgcttacgcaatgatttctagcctttcagaggaacaaaaagcagcaggcgtaatagcggcatctgcaggtaaccatgcacaaggcgtggcattatcagcgaaacaattaggcttaaaagcattaattgttatgccacaaaacaccccaagcattaaagtggatgcagtgcgtggttttggtggtgaggtgttgttgcacggtgctaatttcgatgaagccaaagcaaaagccatcgagctttcaaaagaaaaaaatatgacatttattccaccattcgatcatccattggtaatcgctggacaaggcacgttagcgatggaaatgctacaacaagtggcagatttggattatgtgtttgtacaagtcggtggtggtggcttagctgcgggtgtggcaattttgcttaagcaatttatgccagaaattaaaatcatcggtgtagaatcaaaggattctgcatgcttaaaagccgctctcgataaaggcgaaccaacagatttaacccatgttggattatttgccgatggcgttgccgtaaaacgcattggcgacgaaacattccgcctatgccaacaatatcttgatgatatggtattggtcgatagtgacgaagtatgcgcagcaatgaaagatttgtttgagaacgttcgtgctgttgcagaaccatcaggtgcattaggtttggctggtttgaaaaaatatgcgaaacaaaaccaggggattccctag

SEQ ID NO: 31718 - protein, 308 aa, Haemophilus influenzae 86-028NP
MKNLLTNPQPSQSDYINAIVKLGSRVYEAAQVTPLQKMGKLSERLHNNIWIKREDRQPVNSFKLRGAYAMISSLSEEQKAAGVIAASAGNHAQGVALSAKQLGLKALIVMPQNTPSIKVDAVRGFGGEVLLHGANFDEAKAKAIELSKEKNMTFIPPFDHPLVIAGQGTLAMEMLQQVADLDYVFVQVGGGGLAAGVAILLKQFMPEIKIIGVESKDSACLKAALDKGEPTDLTHVGLFADGVAVKRIGDETFRLCQQYLDDMVLVDSDEVCAAMKDLFENVRAVAEPSGALGLAGLKKYAKQNQGIP

SEQ ID NO: 31719 - DNA, 1056 bp, Pediococcus pentosaceus ATCC 25745
  CDS (1)..(1056)
atgttagtagagaaagaacccagaaaccaagttgtagcagcaaccgataatttattaaatctaaaccagattgaagaagcccgcgaggttattaaaaaatatgcgcgtcggacaccattagttaagtccatgtttttgagcaacaacgttgtccatggggatgtctatttaaaattagagaatatgcaattaaccggttcttttaaatttagaggggcgaataacaaaattaaccacttgaatgaagaagaaaaacaacgaggcgtaattacagcttcagctggaaatcatgcacaaggagtagctttgaccggtaagttgctgggaattaaaactacggtagtgatgccggatgaggcgccccaaatgaagcgcgatgcaacccgaggatatggagcggaagtagatattcatggcgcaacttttgatgacgctcacgaatggatgcgagaaagagctgaaaaagaaggaaaaaccattgtagatccgtttaatgatgctttaatttgtgctggacaaggaactatcggtttggaaattctagaagatttagtggatgtagaaaccgttgtagttccagtcgggggcggtggtctaatttcaggaatcgccacggctttaaaatcaatcaatccttcaattcatatcgtcggagttcaatcggaaaatgtgcatggcatgaaggcgtctgttgatgcaggcaaaattgttaaacatcaccaagattttacgctagcagacggaactgatgtagcaaccccaggtaatattacatttgggattgtttccaaactagtggatgagattgtcttggttagtgaagaagaaatttcaaaagcgatgaaagatttaatgcagagaaccaaggtggttgctgaaggagcaggagcattgccaacggccgctttagaagcaggtaagattgatccaaaatggactaaagataagaaggttgtagctttagtttccggtggaaatgtggatctacagcgagtttcacagattattgatcacttctttactcctgttgatacgcataaaggtgccattgggtaa

SEQ ID NO: 31720 - protein, 351 aa, Pediococcus pentosaceus ATCC 25745
MLVEKEPRNQVVAATDNLLNLNQIEEAREVIKKYARRTPLVKSMFLSNNVVHGDVYLKLENMQLTGSFKFRGANNKINHLNEEEKQRGVITASAGNHAQGVALTGKLLGIKTTVVMPDEAPQMKRDATRGYGAEVDIHGATFDDAHEWMRERAEKEGKTIVDPFNDALICAGQGTIGLEILEDLVDVETVVVPVGGGGLISGIATALKSINPSIHIVGVQSENVHGMKASVDAGKIVKHHQDFTLADGTDVATPGNITFGIVSKLVDEIVLVSEEEISKAMKDLMQRTKVVAEGAGALPTAALEAGKIDPKWTKDKKVVALVSGGNVDLQRVSQIIDHFFTPVDTHKGAIG

SEQ ID NO: 31721 - DNA, 1245 bp, Moorella thermoacetica ATCC 39073
  CDS (1)..(1245)
atgagcaatataacccaactacgctgtataaactgcagccgtacctatcaaccccggcccggcttttatacctgccccatctgcgggtcgacggacggcatcctggatgtcgaatacgattacgattatataaacaaatccatctccaggcagagcctggccagcaaccgggaacattccctctggcgttaccgtcccttcttgccggtggcccaggagggaccgctgccccctctgcgggtgggttggagccccctgtaccgggcccggcgcctgggggacgaactggggttgaaagagctatatatcaaggacgatgggattaatcccacggggtctttaaaagacaggccttcggccgtggcggtggcccgagccctggccgaaggagctaaggtggtcgcctgctcttcaaccggcaacgctgcttcctccctggcgggggcagcagcttccgtgggcctgaaggcggtaatctttgtaccgggacgggcaccgcaagggaaggtagcccaactcttgattttcggggccaccgttatcagtgttcagggatcctatgaggatgccttcaagctttcggcggcggccatagccgagcacggctggtacaaccgcaatgccgccattaacccttatctggtagaaggcaaaaagacagtttgcctggaagtggcggaacagctaaactgggaggtacccgactgggtggtcctttccgtgggcgacggttgtaccatggccggtgcctggaaggcctgggtggacctgaaaaaggccggttggattgacaaactgccgcggatgctgggggtccaggccgagggttgctgccccattaccagggccttccgggagggaaccagggtaaaacccatgcccgaaaataccctggcggacagcatcgccgtcggcgtgccccgcaatccagaaaaggctctgcgggccgtaagggattccgggggtacgatgatcaacgtcagcgatgaagaaatccttgcagccatgcgcaccctggggcggaccagcggcatcttcggcgaacctgccggtgcagccgggaccgccggccttatcaaagccgtccaggaaggaataattaaatccggagataaggtggtcgtcctggtaacaggcaacggcctcaaggatgtggccaatgccatcaaagcggccggagagcctatccgggtggagccctccctggaggccttaaaggaagccctggctcggtacgggaaatga

SEQ ID NO: 31722 - protein, 414 aa, Moorella thermoacetica ATCC 39073
MSNITQLRCINCSRTYQPRPGFYTCPICGSTDGILDVEYDYDYINKSISRQSLASNREHSLWRYRPFLPVAQEGPLPPLRVGWSPLYRARRLGDELGLKELYIKDDGINPTGSLKDRPSAVAVARALAEGAKVVACSSTGNAASSLAGAAASVGLKAVIFVPGRAPQGKVAQLLIFGATVISVQGSYEDAFKLSAAAIAEHGWYNRNAAINPYLVEGKKTVCLEVAEQLNWEVPDWVVLSVGDGCTMAGAWKAWVDLKKAGWIDKLPRMLGVQAEGCCPITRAFREGTRVKPMPENTLADSIAVGVPRNPEKALRAVRDSGGTMINVSDEEILAAMRTLGRTSGIFGEPAGAAGTAGLIKAVQEGIIKSGDKVVVLVTGNGLKDVANAIKAAGEPIRVEPSLEALKEALARYGK

SEQ ID NO: 31723 - DNA, 1518 bp, Thiobacillus denitrificans ATCC 25259
  CDS (1)..(1518)
atgagccacccagacgactacctcgaacgcattctcacctcgcgcgtctatgacgtcgcgatcgaatcgccgctcgaggtcgcgcacaatctttcgcgtcgcctcgacaaccagatcctgctcaagcgcgaggacctgcagccggtgttctcgttcaagtgccgcggcgcgtacaacaagatggcgaagttgaccgccgcgcaactggcgcgcggcgtcgtcgcggcgtccgccggcaaccacgcgcagggcgtcgctttggcggccgaaaagctcggcgcgacggccaccatcgtcatgccggcgacgaccccgaggatcaaggtcgacgcggtcgcggcgcgcggcgcccgcgtgatcctgcacggcgacaactacgacgaagcctacgagcatgcgatgcagctggcgaaggaggcgaaggcgaccttcgtccatccctacgacgatcccgacgtgatcgcgggccagggcacggtcgcgatggagttgctgcgccagcacccgggcccgatccactccgtctacatcccggtcgggggcggcggtctgatcgcgggtatggccgcctacatcaagcggctgcggccgcagatcaagatcgtcggcgtcgagcccgaggacgccgacgcgatggcgcgttcgctgtgcaagaacacgcgcgtgacgctgccgcgcgtcggcatttttgccgacggcgtcgcggtaaaaaaggtcggcaaggaaaccttccggctggcgcagctctatgtcgacgaaatcatccgcgtgaacaacgacgcgatctgcgcagcgatcaaggacgtcttcgaggacacccgttcgatcctcgaacccgcgggcgcgctttcgatcgccggcatgaaagcggcgatcgccggtgacaggctgaaggggaagacgcttgccgccgtggcgtctggcgccaacatgaacttcgaccgcctgcgccatattgcggagcgcgcggaactgggcgagaagcgcgaagcgattctcgcggtgaccattcccgaaacgccgggcagcttcaagaccttctgcggcctgctcggcgcgcgcaacatcaccgaattcaactatcgctacgccgatccgcgtgtggcgcgggtgttcgtcggactgtccgtacccggtgagggcgagagcaagcgcgtcgtcgaactgctcgggcggcacggcctcgaagcgatcgatctgagcgacaacgaaatggccaagctccacatccgccacctggtcggcgggcgcgcgcccgacgcggtgaacgaggtgctgtaccgcttcgagtttcccgagcgcccgggcgcgctgatgcagttcctgcaaagcatgagccgcggctggaacatcagcctctttcattatcgcaaccacggcaccgactacgggcgcgtgctggtcggcatccaggtgccggacaaggaaaaaccggtctttcagaaattcctcgaaggcctcggctaccgctactgggacgagtcgcgcaacccggcgtacacgctcttcctgggctga

SEQ ID NO: 31724 - protein, 505 aa, Thiobacillus denitrificans ATCC 25259
MSHPDDYLERILTSRVYDVAIESPLEVAHNLSRRLDNQILLKREDLQPVFSFKCRGAYNKMAKLTAAQLARGVVAASAGNHAQGVALAAEKLGATATIVMPATTPRIKVDAVAARGARVILHGDNYDEAYEHAMQLAKEAKATFVHPYDDPDVIAGQGTVAMELLRQHPGPIHSVYIPVGGGGLIAGMAAYIKRLRPQIKIVGVEPEDADAMARSLCKNTRVTLPRVGIFADGVAVKKVGKETFRLAQLYVDEIIRVNNDAICAAIKDVFEDTRSILEPAGALSIAGMKAAIAGDRLKGKTLAAVASGANMNFDRLRHIAERAELGEKREAILAVTIPETPGSFKTFCGLLGARNITEFNYRYADPRVARVFVGLSVPGEGESKRVVELLGRHGLEAIDLSDNEMAKLHIRHLVGGRAPDAVNEVLYRFEFPERPGALMQFLQSMSRGWNISLFHYRNHGTDYGRVLVGIQVPDKEKPVFQKFLEGLGYRYWDESRNPAYTLFLG

SEQ ID NO: 31725 - DNA, 903 bp, Silicibacter sp. TM1040
  CDS (1)..(903)
atggtgaaaacgccaaccgtctcggttcagagctttggcctcgcatttccggtcgaattgaagctcgagcatctccagcatgcaggcagttttaaggcgcgcggtgcgtttaacacgctcctgtcgacccctgtccccgaagcaggtctggtggcggcctccggtggcaatcatggcgcggcggtggcctttgccgcccgcgctttgggtcacaacgccaagatctatgtccccgagattgcaggccagaccaagattgacctgatccgctcaaccggagcggagcttgaggtcgtgcccggcgcctatgccaatgcactcgaagcggcacaggattgggagctacaaacgggtgccatgcagatccatgcctatgacgcacccgcaacggtcgctggacagggcactttgtttgctgaatgggaggaacaggggctcgaggctgacaccattttgatcgcagtgggcggcggtggtctcatcggcggagcgctgggctggtttgagggccggcgcaaggtggtcgcagtagaacctgcaacctcttgcgcgctgaaaaccgcactgatgaatggcaaacctaccaatgttgacgttggcggcatcgctgccaatgccttgggggcgcgccgcattggagacatctgttttgaccttgcgcataacgcgcgcacgccaagcgtgattgtcccagatgctgccatcgaggccgcacaacacgcgctctggcgcgatcatcgcctcctggtggagcctgcaggggcaactgcgcttgcggctttgatgtgcggggcctatctgcctgcgcgtgatgaaaaggtttcggtgctcttgtgtggtggcaacattgacccagaaccgctgacggatcccgccacacgacttgatgtctcgttcaactaa

SEQ ID NO: 31726 - protein, 300 aa, Silicibacter sp. TM1040
MVKTPTVSVQSFGLAFPVELKLEHLQHAGSFKARGAFNTLLSTPVPEAGLVAASGGNHGAAVAFAARALGHNAKIYVPEIAGQTKIDLIRSTGAELEVVPGAYANALEAAQDWELQTGAMQIHAYDAPATVAGQGTLFAEWEEQGLEADTILIAVGGGGLIGGALGWFEGRRKVVAVEPATSCALKTALMNGKPTNVDVGGIAANALGARRIGDICFDLAHNARTPSVIVPDAAIEAAQHALWRDHRLLVEPAGATALAALMCGAYLPARDEKVSVLLCGGNIDPEPLTDPATRLDVSFN

SEQ ID NO: 31727 - DNA, 966 bp, Silicibacter sp. TM1040
  CDS (1)..(966)
atgaaggacaccgcaatgtatatcccaacctacgaggacatgctggcggcgcatcaacgtatcgcgccacacatccaccgcaccccggtgcgccagtccgcctacctcaacgaactgaccggcgcgcagctgtttttcaaatgcgaaaactttcaggagccgggggccttcaaggtgcgtggcgccaccaatgcagtctttggtctggacgcagcacaggcggccaagggcgtggcgacgcattccagcggcaaccatgcctcctgcctgtcctatgcggcgatgctgcgcggcattccctgcaacgtggtgatgccgcgcaccgcgccgcaggccaaaaaagacaccgtgcgccgctatggcgggaagatcaccgaatgtgagccctcgaccacctcgcgcgaggagacatttgcccgcgtacaggccgaaaccggtggcgattttgtgcatccctacaacgatcctcgggtgatcgctggccaaggcacctgcgccaaggagtttgtcgagcagaccgacgggcttgattgtgtgctcgcgccgattggcggcggcggcatgatttcgggcacctgtctgacgctgtcgacgctggcacccgaaacacggatcatcgccgccgagcccgagcaggctgatgacgcctaccgcagcttcaaggcgggctacatcattgccgatgatgcgcccaggaccatcgccgacgggctgctggtgccgctcaaggatctgacctggcattttgtgtcgaaccatgtgtccgacattctgaccgcatctgaccctgagatcatcgacgcgatgaagctcatctggaagcacctgcgcgtggtgatggagccctcctctgcggtgccgctcgccaccatcctgaaaaaccccgagacctttcgcggcaaacgcgttggcatcgttttgaccggtggcaatgtcgatctggatcgtctgccctggacgatttga

SEQ ID NO: 31728 - protein, 321 aa, Silicibacter sp. TM1040
MKDTAMYIPTYEDMLAAHQRIAPHIHRTPVRQSAYLNELTGAQLFFKCENFQEPGAFKVRGATNAVFGLDAAQAAKGVATHSSGNHASCLSYAAMLRGIPCNVVMPRTAPQAKKDTVRRYGGKITECEPSTTSREETFARVQAETGGDFVHPYNDPRVIAGQGTCAKEFVEQTDGLDCVLAPIGGGGMISGTCLTLSTLAPETRIIAAEPEQADDAYRSFKAGYIIADDAPRTIADGLLVPLKDLTWHFVSNHVSDILTASDPEIIDAMKLIWKHLRVVMEPSSAVPLATILKNPETFRGKRVGIVLTGGNVDLDRLPWTI

SEQ ID NO: 31729 - DNA, 1284 bp, Silicibacter sp. TM1040
  CDS (1)..(1284)
atgcgtgaaacgctgcgccctcttgccttgggcgtggctttgggtcacgaaatccatatgaccaacttcagaacccaggccaaagcggccgaggcggcgatgcgcgatgtcttcccgcccacgccgctgcaacgcaacgaactcctgtcgcagcgctttggtgcggagatttacctcaaacgcgaggatctcagcccggtgcgctcctacaagattcgcggcgcgctcaacgcgatgcgaaagcagaccagcaaggatctgtttgtctgtgcttcggcgggaaatcacgcgcagggcatggcttacatgtgtcggcaaatggacaaacggggtgtgatctttatgccggtgaccacacctcagcagaagatccagaagacccgcatgtttggcggtgacaacgtcgaggtgcatctgatcggggattacttcgacgatacattgtccgccgcgcaggcgtggtgcgcagaaaaaggagggtatttcctctctccttttgacgacgcggatgtcatcgaaggtcaggcatcaatcgcagtggaaatcgaggcgcaactcggcaaggcgccggatcatatcgttctaccggtgggcggcgggggtatgtcctctggcgtggttcggtattttggcgaggatgtgcatgcgcttcttgtggagcctgagggcggcgcctgcctgaaggcggcgcttgaggcaggtcatcccacaccgctcaaccgggtggatacctttgtggacggcgccgccgttggcaaaattggcgagcggccttttgatattttgcgcagcgtgccgttgccggatgtcctgactgtgtcagaggaccggatctgcaccaccatcctcgagatgctcaatgtcgaaggtatcgttctggaacctgcaggcgcgctcgccgtcgaggcgctgggcgacctgcgcacatggattaagggtaagaccgtggtttgtctgacttccggcgggaactttgatttcgagcgactgccagaggtcaaggaacgggcgcagcgctattccggggtgaagaaatacttcctgctgcgcctgccgcaacgtcccggcgcgctcaaggaattcctgaacattcttgggccggatgatgacatcgcacgttttgaatacatgaagaagtctgcgcgcaacttcggctcggtcctgatcgggatcgagaccaagcgcccagagaacttcgcgccgctgtttgcgcaactggatgcggcgggtttcacctacaccgacatcacaaatgacgagacactggcgcagttcgtgatctga

SEQ ID NO: 31730 - protein, 427 aa, Silicibacter sp. TM1040
MRETLRPLALGVALGHEIHMTNFRTQAKAAEAAMRDVFPPTPLQRNELLSQRFGAEIYLKREDLSPVRSYKIRGALNAMRKQTSKDLFVCASAGNHAQGMAYMCRQMDKRGVIFMPVTTPQQKIQKTRMFGGDNVEVHLIGDYFDDTLSAAQAWCAEKGGYFLSPFDDADVIEGQASIAVEIEAQLGKAPDHIVLPVGGGGMSSGVVRYFGEDVHALLVEPEGGACLKAALEAGHPTPLNRVDTFVDGAAVGKIGERPFDILRSVPLPDVLTVSEDRICTTILEMLNVEGIVLEPAGALAVEALGDLRTWIKGKTVVCLTSGGNFDFERLPEVKERAQRYSGVKKYFLLRLPQRPGALKEFLNILGPDDDIARFEYMKKSARNFGSVLIGIETKRPENFAPLFAQLDAAGFTYTDITNDETLAQFVI

SEQ ID NO: 31731 - DNA, 1002 bp, Rickettsia akari str. Hartford
  CDS (1)..(1002)
atgactttattactacaatcttctcaaaatgtagctactgcacatactagaataaaacaatatctacatttaactccaatcgttcactctgaaagcttaaatgagatgctcggtcatgagattttttttaaggttgaatcattacaaaaaaccggtgcattcaaagttagaggagtattaaatcatttattagaattaaaagagcaaggcaaattacctgataaaatagtctgttatagtacgggtaaccatggggttggtcttgcttatgcaagtaaattattcggtcttaaaacaaggatttatttaccgttaaatacttcaaaagtaaaacagcaagcagctctttattacggcggtgaagttatatatacatatactcgacaagaagcagaagaaaaagcaaaagaagatgaaaagcaaggattttactatatacatccttccgatagtgattctacaatagcaggagcaggcactttatgctatgaagcattacagcagctaggctttagtcctgatgctatttttgcctcttgcggcggcggcggtttaatttccggctcataccttgccaaggaattaatatcaccgataagcttgttaataggttcagaaccgcttactgctaatgatgcttatttatcggttaaaaataataagatatataaatttgataaggcaccgactaccatcgcagacggtcttaaaaccttaagtgtatcagcccgtacatttgaatatctgaaaaaacttgatcatttttatttagcagaagaatatgaaatatattactggacggcgtggcttactaatttacttaaagttatatgcgagccgtcaagtagtataaatatggtgtcagtggtgaattggttaaaaatacaatccaaacctcaaaaattactggtactaatctcaggcggtaatatagaccctattctttataacgaactatggaaagaggagtatttaaccgttccaccaagtattactaactaa

SEQ ID NO: 31732 - protein, 333 aa, Rickettsia akari str. Hartford
MTLLLQSSQNVATAHTRIKQYLHLTPIVHSESLNEMLGHEIFFKVESLQKTGAFKVRGVLNHLLELKEQGKLPDKIVCYSTGNHGVGLAYASKLFGLKTRIYLPLNTSKVKQQAALYYGGEVIYTYTRQEAEEKAKEDEKQGFYYIHPSDSDSTIAGAGTLCYEALQQLGFSPDAIFASCGGGGLISGSYLAKELISPISLLIGSEPLTANDAYLSVKNNKIYKFDKAPTTIADGLKTLSVSARTFEYLKKLDHFYLAEEYEIYYWTAWLTNLLKVICEPSSSINMVSVVNWLKIQSKPQKLLVLISGGNIDPILYNELWKEEYLTVPPSITN

SEQ ID NO: 31733 - DNA, 1236 bp, Chloroflexus aurantiacus
  CDS (1)..(1236)
atgagccgattcgcaattgaactggccgatattcagtctgcacggcgggcgttgcgggatattatcctacccacgccagtattgccggcaacccgcctgagtgctgaactgggtgggtcaattttttacaaggctgaaaatacccagcagagtggttcgttcaaaattcgtggtgcttacaacacgatcattcatctgtcacctgaagagaaacaacgcggcgtgattgcaccgtctgccgggaatcacgctcagggtgtcgcgcaggcagcccagttattgggggtaaaagcaacaattgtgatgcctgagcgcgctccattgaccaaagtggtggcaacccgccggttgggcgccgaggtcattctgcacggcgccaccttcgatgatgcgatggcctacgcacacgctctcaaagaagaacgtggcttaacctacgtccatgccttcgatcatccacgggtgattgcaggtcagggaacgattggcctggaactggttgaagccctgcccgatttaaaccaactggtcgtaccaatcggcggtggtggcctgatcagcgggattgccctggccgtgaagacattgttgccgcacgtgcgtatcatcggtgtgcaggctgccggctgtgcgccggtgccggcctcgctcgccgccggtcatccggtgacggcaccgactgcgcatacgattgcagatggtattgccgtgaagcgtcccggcgaactcaccctgccgatgatccaggccctggttgatgacgttgtcaccgttgatgacgaagagattgtgatggcaatcgcgcacgtgttgcaatacagtcgtctggtggtcgagggagccggcgccgcaggtgttgctgccctgctcagtggtaaggtgccggtacaaccacaccaggtgacggcgacgatcctttgcggtgggaatatcgatgcgaatctgctgatgcgggtgattgagtatgccctggttcgccagggacgctacctcttgctccgcaccagcgtcgatgatcgtccgggcggcctggccggcctggtcaatcacgttgcctcgaccggtgccagcgtcatggatctcttccatcgccgtgggatgtggcgagtgccaatcgaccgtgccggcgttgaactcatcctcgaagtccgtgatgaagaacacgctcagatggtcatcaattctctcgaacaggccggctaccattgcgagcgcgaaccgaactggccgatataa

SEQ ID NO: 31734 - protein, 411 aa, Chloroflexus aurantiacus
MSRFAIELADIQSARRALRDIILPTPVLPATRLSAELGGSIFYKAENTQQSGSFKIRGAYNTIIHLSPEEKQRGVIAPSAGNHAQGVAQAAQLLGVKATIVMPERAPLTKVVATRRLGAEVILHGATFDDAMAYAHALKEERGLTYVHAFDHPRVIAGQGTIGLELVEALPDLNQLVVPIGGGGLISGIALAVKTLLPHVRIIGVQAAGCAPVPASLAAGHPVTAPTAHTIADGIAVKRPGELTLPMIQALVDDVVTVDDEEIVMAIAHVLQYSRLVVEGAGAAGVAALLSGKVPVQPHQVTATILCGGNIDANLLMRVIEYALVRQGRYLLLRTSVDDRPGGLAGLVNHVASTGASVMDLFHRRGMWRVPIDRAGVELILEVRDEEHAQMVINSLEQAGYHCEREPNWPI

SEQ ID NO: 31735 - DNA, 993 bp, Chloroflexus aurantiacus
  CDS (1)..(993)
atgtctaccgagaaaaccattacccctgccgacatcctggctgctcgccgtcgcatcagcggtatcgttcaaccaactccgcttgaggtgagtcgccccttgagcgccctgaccggtgccgaggtctggttgaagctggaactggcacaggtgaccggcagttttaagctgcgtggtgcagccaatgctctgcgccagttaccacctgccacgcatgtcgtggcctgctcggcgggcaatcacgcgctcggtgttgcccataccgccgcgttgaccggtacgccggccaccctggtggtgccgacaaccgcctcgccggcgaaggtcaccgcattgcgacgctatccggttgaggtgatattgcacggtgccggctacgacgaggctgaaaccgaagcgctccggctggcagcccaccacggctggcattttgtgtcaccctacaacgacccggcagtgattgccgggcagggaacgctggcaattgaggtctgggacgcattgcccgacgtcgatatggtggtagtcgcggtcggtggcggtgggttagccagcggcgttggtatctgggccagagcgatgaacccgcgcgtccgcatcattggcgtacaggcagccgcttccgcggcaatggcggcggcgttgcgggccgggcgggtcgttccggcacctgatgaaccaacgctggccgacggtctggctggaggtatcgccagcgataccatcacgctcccgatcctgcaacaggttttagacgagatgatcctggtcgaagaggcagctattgcccgcgctatgcgctggttaatcgacgaacaccatctgattgtagaagggagtgctgcggtgacggtggcagccctgctcgaaggtcagatcacccatcttgtcggcaaacggatcgtggcactgctctgcgggcgtaatgttgccatttccaccttgcaccacattctcgcagttccgcccaaagacggagcatcatcccattga

SEQ ID NO: 31736 - protein, 330 aa, Chloroflexus aurantiacus
MSTEKTITPADILAARRRISGIVQPTPLEVSRPLSALTGAEVWLKLELAQVTGSFKLRGAANALRQLPPATHVVACSAGNHALGVAHTAALTGTPATLVVPTTASPAKVTALRRYPVEVILHGAGYDEAETEALRLAAHHGWHFVSPYNDPAVIAGQGTLAIEVWDALPDVDMVVVAVGGGGLASGVGIWARAMNPRVRIIGVQAAASAAMAAALRAGRVVPAPDEPTLADGLAGGIASDTITLPILQQVLDEMILVEEAAIARAMRWLIDEHHLIVEGSAAVTVAALLEGQITHLVGKRIVALLCGRNVAISTLHHILAVPPKDGASSH

SEQ ID NO: 31737 - DNA, 1518 bp, Chloroflexus aurantiacus
  CDS (1)..(1518)
atgcccaaccctgattttacctacgttcaacgcatcctgaccagtcgggtctatgatgttgtcaaagagaccccattgcaacatgcgcctcttctcagcgcccgcctgggagcacagatatttttcaaacgtgaggatctgttgcccatcttctcttttaagctccgtggtgcctataaccgcatggctcatctcagtcctgccgagaaagaacgcggcgtcatcacagcctctgccggcaatcacgcccagggagtcgccttttctggccagcagctcggcgtgcgcacgctgattgtcatgccggcaaccaccccagagatcaaggtggcagcctgtcggcgtcggaatgcagaagttgtcctgtacggcgacagctatagtgacgctgaagcgcacgcctaccgcttacagcaagaattgggcttaaccttcatccatccctacgacgatccgctggtgattgccggtcagggtacgattgggctggagatttcccaacagatgcgcgccgagcgataccgtgtcttcgtgccggtaggtggcggcggtctgattgccggcatcgcgatcttcttgaagagcatcaatcccaatattgagatcattgccgtcgagccagatgactctgatgcgatgtaccagagcgtccgggccggctatcgggtcacccttgatcaggtcggaatctttgttgatggcgtggcagttcggcgggttggcgaacacacctttgcgattgttcagcgctacgtcgatgattttgtgcgggtgacaaccgacgaggtctgtgcggcgatcaaagatgtctttgaggacacccgggccattatggagccagccggcgcgctggccgtcgccgggttaaagcgctatatcgccgaacacggggccgatctaccggcagtagccttaacgtgtggcgctaacatgaactttgaccgtctgcgccacgttgccgaacgggccgaaattggcgaacggcgtgaggcgttgtttgctgtgaccatccctgaacgacccggctcattcaagcaattttgtcgcgtgatcggaccacacaatatcaccgaattcaactaccgctatgcaccgcgccccgaagccaatgtctttgtgggtgtacaactgaccaatgccaatcagcgccacgagctggccgaacgtatgcgcaacgccggttatacggtgcttgacctgaccaacgacgagctggcaatcattcatctacgccacatggttggtggacgagcacccgaagcaaccgacgaacggctcttcaccttcgagttcccggagcgaccgggagcgctcttgcaatttctcgagtcgctcgatgcctcgtggaacatcagcctcttccactaccgcaaccatggcagcgcccatgggcgggtactggccggtattcaggtgcccgatgccgatctcgaccgtttctacgcctcactggctcgcctgggatacccgtatcaggagcagagtgataatccggcgtaccacctgtttttgaaatga

SEQ ID NO: 31738 - protein, 505 aa, Chloroflexus aurantiacus
MPNPDFTYVQRILTSRVYDVVKETPLQHAPLLSARLGAQIFFKREDLLPIFSFKLRGAYNRMAHLSPAEKERGVITASAGNHAQGVAFSGQQLGVRTLIVMPATTPEIKVAACRRRNAEVVLYGDSYSDAEAHAYRLQQELGLTFIHPYDDPLVIAGQGTIGLEISQQMRAERYRVFVPVGGGGLIAGIAIFLKSINPNIEIIAVEPDDSDAMYQSVRAGYRVTLDQVGIFVDGVAVRRVGEHTFAIVQRYVDDFVRVTTDEVCAAIKDVFEDTRAIMEPAGALAVAGLKRYIAEHGADLPAVALTCGANMNFDRLRHVAERAEIGERREALFAVTIPERPGSFKQFCRVIGPHNITEFNYRYAPRPEANVFVGVQLTNANQRHELAERMRNAGYTVLDLTNDELAIIHLRHMVGGRAPEATDERLFTFEFPERPGALLQFLESLDASWNISLFHYRNHGSAHGRVLAGIQVPDADLDRFYASLARLGYPYQEQSDNPAYHLFLK

SEQ ID NO: 31739 - DNA, 975 bp, Polaromonas sp. JS666
  CDS (1)..(975)
atgctgcaacttcccgtttacgacgacgtcctcgccgcagccgcgcggcttgagggccacgcgcaccgcacgccggtactgacctccgccacggccgatgcccgctggggttcccagtttttcttcaagtgcgaaaacttccagcgcatgggggcgtttaagttccgtggagcgttcaatgcgctgtcaaagttcgacgcgggccagcgccgggccggggcgatcgcgttttcgtcgggcaaccatgcacaggcggtggcgctgtcggcgcggctgctcggcatgcccgcgttgatcgtgatgccgcaggacgcaccggctgccaagctggccgcgacgcgtggctacggcgccgaggtggtgctgtacgaccgcttcagcgaagaccgcgaggcgctcacgcagcggctggcggccgagcggggtatgaccctgattccgccctatgaccatcccgacgtgattgccggccagggcacggccgccaaggaactgcttgaagagaccggtccgctcgaccgcctgtatgtctgcctgggcggtggcgggctgaccagcggctcggcgctggccgcgcgggccctggcgccgcaatgcaaggtgtatggcgtggagcccgaagccggcaacgatggccagcagtcgctgcgcgcgggccggattgttcatatcgaaacgcccaagaccattgccgacggtgcgcaaacccagcatctgggtcagtacaccttcggcatcattcgacgcgatgttgatgacatcctcacggtgagcgacgcgcagctggtcgaggccatgcgcttttttgccgagcgcatgaagatggtggttgagcctaccggttgcctggcgtttgccggggcctgcgcggcgcttgaagcggacgcggccctcaagggcaggcgtgttggcgtcatcgtgagcggcggcaatgtcgacctggcgcgctacgcggagctgctggctgcacgctga

SEQ ID NO: 31740 - protein, 324 aa, Polaromonas sp. JS666
MLQLPVYDDVLAAAARLEGHAHRTPVLTSATADARWGSQFFFKCENFQRMGAFKFRGAFNALSKFDAGQRRAGAIAFSSGNHAQAVALSARLLGMPALIVMPQDAPAAKLAATRGYGAEVVLYDRFSEDREALTQRLAAERGMTLIPPYDHPDVIAGQGTAAKELLEETGPLDRLYVCLGGGGLTSGSALAARALAPQCKVYGVEPEAGNDGQQSLRAGRIVHIETPKTIADGAQTQHLGQYTFGIIRRDVDDILTVSDAQLVEAMRFFAERMKMVVEPTGCLAFAGACAALEADAALKGRRVGVIVSGGNVDLARYAELLAAR

SEQ ID NO: 31741 - DNA, 1647 bp, Polaromonas sp. JS666
  CDS (1)..(1647)
atgatgttggactgcgagaaaaacatgccaacccacaccccccctgctgcctacccctcccctcaagcggccaaaaccgcacgcaaagtgtctgcgcaaggcctcacgcccgcggattacctgaagaaaatcctcaccgcgcgcgtctacgacgtcgcgctggaatcggccctggagcccgccaaaaacctgggccgccggctgaacaacaccgtgctgctcaagcgtgaagaccagcagcccgtcttcagcttcaagctgcgcggcgcctataacaagatggcgcacctcagcagcgcccagctcaagaaaggcgtgatttgcgcctcggccggcaaccatgcccagggcgtggccctgagcgcgcaaaaactcggcacccgcgccgtggtggtgatgccgacgaccacgccacaggtcaagatcgatgcggtcaagggctggggcgcagaagtggtactgcacggcgacagctactcggatgcctacgcccacgccgtgctgctggaaaaaaagcgtggattgacctttgtacatcctttcgacgacccggacgtgattgccggccagggcacgattgcgatggaaatcctgatgcagctgcaaagcctggggtcgcgccggctggacgccgtgtttgtcgccattggcggcggcggcctgattgccggggtggccaactacatcaaggcggtgcgacccgagatcaaagtcatcggcgtgcagatgaacgactccgacgcgatgatgcagtcggtgaccgcgaaaaagcgcgtcaccctgaatgacgtgggcctgttttcagacggcacggccgtcaagctggtgggcgaggaaacctttcgcatcagccgcgaactggtcgacgaattcatgaccgtggacaccgatgcggtgtgcgccgccatcaaggacgtgtttgtggacacgcgcagcatcgtggagcctgccggcgcgctggccgtggccgccatcaagcagtacgtggccacgcacaagaccaaaggggaaacctacgcagccattttgtgcggcgccaacatgaacttcgaccgcctgcgctttgtggccgagcgggctgaagtgggcgaggaacgcgaggcgctgtttgccgtgacgattcccgaagagcgcggcagcttccggcacttttgcgaactgattggcgagttgcccggcggcccgcgcagcgtgaccgaattcaactaccgcatcagcgacgacgagaaagcccatgtctttgtgggcctgaccacctcggccaagggcgagagcagcaagatcgcggccaacttctcccgccacggcttcaaggcgctcgacctcacgcatgacgagctcgccaaggaacatatccgccacatggtgggcgggcacagcgcactgtccaaggacgaacgcctgctgcgcttcatctttcccgagcggcccggcgcgctgatgaaatttttgtccagcatgcagccgggatggaacatcagcctctttcactaccgcaaccagggcgccgactacggccgcatcctggtgggcctgcaggtgcccaaggccgacaacaaggccttcaaggccttcctggacaccctgggctacccccacgtggaagaaaccgacaaccccgtctaccggctgtttctgcagagctga

SEQ ID NO: 31742 - protein, 548 aa, Polaromonas sp. JS666
MMLDCEKNMPTHTPPAAYPSPQAAKTARKVSAQGLTPADYLKKILTARVYDVALESALEPAKNLGRRLNNTVLLKREDQQPVFSFKLRGAYNKMAHLSSAQLKKGVICASAGNHAQGVALSAQKLGTRAVVVMPTTTPQVKIDAVKGWGAEVVLHGDSYSDAYAHAVLLEKKRGLTFVHPFDDPDVIAGQGTIAMEILMQLQSLGSRRLDAVFVAIGGGGLIAGVANYIKAVRPEIKVIGVQMNDSDAMMQSVTAKKRVTLNDVGLFSDGTAVKLVGEETFRISRELVDEFMTVDTDAVCAAIKDVFVDTRSIVEPAGALAVAAIKQYVATHKTKGETYAAILCGANMNFDRLRFVAERAEVGEEREALFAVTIPEERGSFRHFCELIGELPGGPRSVTEFNYRISDDEKAHVFVGLTTSAKGESSKIAANFSRHGFKALDLTHDELAKEHIRHMVGGHSALSKDERLLRFIFPERPGALMKFLSSMQPGWNISLFHYRNQGADYGRILVGLQVPKADNKAFKAFLDTLGYPHVEETDNPVYRLFLQS

SEQ ID NO: 31743 - DNA, 1203 bp, Polaromonas sp. JS666
  CDS (1)..(1203)
atgctcagtctgaccgatattgaacaagccgcccagcgcctgcagggccatttgctggataccccctgcgtggagtccaggacgctgtcacagctgaccggggcgcagatttacctgaaatttgaaaacctgcagtacacggcctctttcaaggagcgtggcgcctgcaacaaacttgcgcaactctcaggcgacgaacggcgccgcggcgtgatcgcgatgagcgccggcaaccatgcccagggtgtggcttatcatgcccagcgcctgggcctgagggccgtcatcgtgatgccgcgcttcacgcccggcgtcaagaccgagcgtacccgcggctttggcgcggaggtggtgctgcacggcgacacgctggaggagtcgcgcgcccacgcgctgatgctggccgagcgcgagggcctggtgtttgtgcacccctacgacgacgaagctatcgtggcgggccagggcaccgtggggctggaaatgctgcacgccgtccccggcctggacacgctggtcgtcgccgtgggcggcggcgggctgatcgcgggcatggccatcgccgccaaggccctgaagcccgagattgaaatcgtgggggtgcagacctcgcgctttccggccatggtcaacgccatcaagggcacgcaccacccgcagggcaccagcaccattgccgagggcatcgccgtgggcacgccgggggtcatcccgcaagccatcattgaaaagctggtggacgacctggtgctggtcgatgaaggggatatcgagcaggccatggtgatgctgctggaaattgaaaaaaccctggtcgagggtgcgggcgcggccggcttggcggcggtgctcaaatacccggcgcgctttgccggcaagaaagtcgggctggtgctgtgcggcggcaatatcgacccgctgctgctggcggccatcatcgagcgcggcatggtgcgcgccgggcggctggcccgcatcaaggtcagcgtgcgtgacgtgccaggctcgctggccaagatcaccgcgacggtagccgatgcgggcgccaacatcgacgaggtacaccaccagcgcgccttcaccacgctgtcggtccagaatgtggagatcgagctggtgatccagacgcgcgggcgcgagcacatcgcgcaggtgctggcggcgctggccgcagccggatttgaggcgtccgagcagcactga

SEQ ID NO: 31744 - protein, 400 aa, Polaromonas sp. JS666
MLSLTDIEQAAQRLQGHLLDTPCVESRTLSQLTGAQIYLKFENLQYTASFKERGACNKLAQLSGDERRRGVIAMSAGNHAQGVAYHAQRLGLRAVIVMPRFTPGVKTERTRGFGAEVVLHGDTLEESRAHALMLAEREGLVFVHPYDDEAIVAGQGTVGLEMLHAVPGLDTLVVAVGGGGLIAGMAIAAKALKPEIEIVGVQTSRFPAMVNAIKGTHHPQGTSTIAEGIAVGTPGVIPQAIIEKLVDDLVLVDEGDIEQAMVMLLEIEKTLVEGAGAAGLAAVLKYPARFAGKKVGLVLCGGNIDPLLLAAIIERGMVRAGRLARIKVSVRDVPGSLAKITATVADAGANIDEVHHQRAFTTLSVQNVEIELVIQTRGREHIAQVLAALAAAGFEASEQH

SEQ ID NO: 31745 - DNA, 1008 bp, Polaromonas sp. JS666
  CDS (1)..(1008)
atgagcaccacgctgcacggcacgcccacggtcaccccgcgggccgatggccttccttcgctgcgcgccatcgaagaggcggccggcgtggtctaccgggagttccaggccacgccgcaataccgctggggcctgtccagccagcggctgggcaccgactgctggatcaagcacgagaaccacacgccggttggcgccttcaagatccgcggcggcctcacctactttgacgccctgaaaaaaagcggcacgctccccctcgaggtcatcagcgccacacggggcaaccacggccagagcataggctgggccgcccgcgcccatggtgtggcctgcaccatcgtcgttccgcacggcaattcgatcgagaagaatgcagccatgcgtgcgctcggcgtgacgctgatcgagcacggccaggacttccaggagagccgcgaatttgccatccagctggccgccgaacgcggcgcccacatggtgcccagctttcacgctgacctgctgcgcggcgtggctaccagctggtgggaattcatgcaggccgtgccgcagctggacgtggtgtacgtgccgattggccagggctccggggcctgctcggccattgccgccaaactggcgctcggacgtaagctgcgcatcgtcggcgtggtgagcgcgcatgccaccacctacgccgattccctggcggcaggccgcgtggtcgaggcaccggtgacaacccggctggccgacggcatggcctgtcgtatcgcggaccctgcggcgctcgaactcatggcgccccatatcgaccacctggtgcaggtcaccgatgacgaggtcgcgcaggcgatgcgcgatctgtatgcggacacgcacaacgtggccgaaggggcaggcgcggccagctttgccgccgccatgcaggagcgcagcgagctcaagggacaggtggtcggcaccacgctgtgcggcagcaatgtggacagcaccacgctggccagcgtactcggggcctgctga

SEQ ID NO: 31746 - protein, 335 aa, Polaromonas sp. JS666
MSTTLHGTPTVTPRADGLPSLRAIEEAAGVVYREFQATPQYRWGLSSQRLGTDCWIKHENHTPVGAFKIRGGLTYFDALKKSGTLPLEVISATRGNHGQSIGWAARAHGVACTIVVPHGNSIEKNAAMRALGVTLIEHGQDFQESREFAIQLAAERGAHMVPSFHADLLRGVATSWWEFMQAVPQLDVVYVPIGQGSGACSAIAAKLALGRKLRIVGVVSAHATTYADSLAAGRVVEAPVTTRLADGMACRIADPAALELMAPHIDHLVQVTDDEVAQAMRDLYADTHNVAEGAGAASFAAAMQERSELKGQVVGTTLCGSNVDSTTLASVLGAC

SEQ ID NO: 31747 - DNA, 942 bp, Polaromonas sp. JS666
  CDS (1)..(942)
atgaccaaccgccatcaaatcgagaactgcctgggcgcgttcaatcaggattaccgccactttattcgtcaaacgccgctgtggaaactgcccggcaaggcgctgggcgtggcctgcgcggaagtctggctcaagctggagcacctgcagacgggcggcagcttcaaggcgcgcggcatgctcaaccggctgctgtccaatccgataccgcccagcggggtgatcgtcgcgtcgggcggcaatgccggcattgccaccgcggcagccgccaaagagctgggtgtgcactgcgaggtgtttgtgcctgaagtgtccagcccggccaagcgcgcccgtctcgccgcgctgggctcccgggtcgtggtcacgggcgcggcttacgccgacgcgctgcaggcctgcctggcgcgccagcaggaaaccggcgcgctgctcacgcatgcctatgaccagcccgaagtgctcacgggggccggcacgatggcgctggagatcgagcagcagggcggcctgcccgatgccgtgctggtcagcgtcggcggcggtggcctgattggcggcgtggccagctggtttgaacagcgctctagagtggtggcgctggagcctgaactggcgccaacgctgttcaaggcccgcgaagccggcgagccggtggacgtggccatcagcggcattgcagccgactcgctgggcgccaagcgcattggcagcatggcgtgggacgcgacccaggcccatgtgcgcgatgcgctgttgctcagcgacgaatccatccgggcggcgcagttgtggctctggaacgaactgaaactggccgttgaacccgccgccgcgttgccgctggccgcgttgcacagcggccgctacgtgccgcgcaccgatgaaaaggtctgcctcatcatttgcggcgccaacctggacccagcgtcgcttgtctga

SEQ ID NO: 31748 - protein, 313 aa, Polaromonas sp. JS666
MTNRHQIENCLGAFNQDYRHFIRQTPLWKLPGKALGVACAEVWLKLEHLQTGGSFKARGMLNRLLSNPIPPSGVIVASGGNAGIATAAAAKELGVHCEVFVPEVSSPAKRARLAALGSRVVVTGAAYADALQACLARQQETGALLTHAYDQPEVLTGAGTMALEIEQQGGLPDAVLVSVGGGGLIGGVASWFEQRSRVVALEPELAPTLFKAREAGEPVDVAISGIAADSLGAKRIGSMAWDATQAHVRDALLLSDESIRAAQLWLWNELKLAVEPAAALPLAALHSGRYVPRTDEKVCLIICGANLDPASLV

SEQ ID NO: 31749 - DNA, 1212 bp, Campylobacter lari RM2100
  CDS (1)..(1212): transl_table=11
atggttgaattaaataaaatttatcaagcaaaacagaaaatcgcagattttgtattaaaaaccccttttgtacactcttcttttttgagtgagtttttagaaactgatgtttttttaaaatgtgaaaatttgcaaaaaacaggtgcttataaaatcagaggagcttataatacaatagctaatttaactaaagaacaaaaacaagcaggcgtaatagctgcaagtgcaggaaatcacgcacaaggagtagcaattagtgctaaaaaatttggcatagaagctgtgattgttatgcctgaagccacgcctttgttaaaagtaagtgcgactaaaaatttaggtgcaaaagtgattttaaaaggagataattttgatgaggcttatgcttatgcactaaattatgccaaagaacatcatttaaatttcattcatccttttgaaaatgaaagtattatagcagggcagggtactttaatgcttgaaatgcttgatgaaataagtgatttagatatgattttagctccagttggtggaggaggtttgattagtggagtggcaagtgctgctaagcaaattaatcctgctataaaagtcattggagtgagtgctaaaggagctcctgcgatgtatgagagttttaaaagtaaaaaaatgattaactcaaaagctgttagaactatagctgatggtatagcagtgcgtgatgtgaataaaattaattttgatattattcttgaatgtgttgatgattttattcaagttgatgatgaggaaatagctaatgcggtattgtatttacttgaaaaacataaaatcacagttgagggagcaggcgcatcagcagtagctgcgcttttgcataaaaaaatagatttaaaaaatcataaaaaaattggcgtgattttaagtggtggaaatatcgatgtgcaaatgttaaatatcattatagaaaaaggcttgtttaaagcttttagaaaaatgcttattaatgttactttgattgataaaccaggggctttgagtgctttgagtgatgcgatcaaagaagcgcaggctaatatagttaaaattgattatgatagattttcaactaaactcgaatacggcgatgcaatgatttcaatcactttagaaaccaaaggaaaggaacatcaagaattagttagaaaaatactttatgataaaggttttaattttaatgaaattttatga

SEQ ID NO: 31750 - protein, 403 aa, Campylobacter lari RM2100
MVELNKIYQAKQKIADFVLKTPFVHSSFLSEFLETDVFLKCENLQKTGAYKIRGAYNTIANLTKEQKQAGVIAASAGNHAQGVAISAKKFGIEAVIVMPEATPLLKVSATKNLGAKVILKGDNFDEAYAYALNYAKEHHLNFIHPFENESIIAGQGTLMLEMLDEISDLDMILAPVGGGGLISGVASAAKQINPAIKVIGVSAKGAPAMYESFKSKKMINSKAVRTIADGIAVRDVNKINFDIILECVDDFIQVDDEEIANAVLYLLEKHKITVEGAGASAVAALLHKKIDLKNHKKIGVILSGGNIDVQMLNIIIEKGLFKAFRKMLINVTLIDKPGALSALSDAIKEAQANIVKIDYDRFSTKLEYGDAMISITLETKGKEHQELVRKILYDKGFNFNEIL

SEQ ID NO: 31751 - DNA, 1038 bp, Leuconostoc mesenteroides
  CDS (1)..(1038): transl_table=11
atgacgactgagggaaagctaacggctgaagaaatagatgaggcgcatcgagtcttgtcaaaggtagtaacgcatacgccattggcatatgatgactatctatcaaaaaaatacagagctaatgtgtatcttaaacgagaagatatgcaacgggttcgttcgttcaaaattcgtggtgcctactacaatatcattaaggcagagaaagaaaaactcaataatggggttgttgctgcttcagctggaaaccacgcgcaaggcgtagccgatacatgtcataatttaaagatacaagcaactatttttatgccagtcactacaccaaatcaaaaagtagaagcggttaaacgttttggtagtcaatatgttacggtaatcctagtcggtgatacctttgacgaagcacaaagtgcagcgtttgaatacactgaaaaacataatatgttctttgtagcaccatttgatgatcggcgtaccatggctgggcaaggcacggtggcggttgaggtatttgaagatgctgtagagcaaaatattaatgttgattatttgattgcttctgttggtggtggcggtttaatcggtggtctgtcgacctattctaaaaaggtatcaccacaaaccacagtagtaggtgtcgaaccagaaacggcacagtcaatgaaagcggattttcaagctcaaaaacctaccaccgtcgagaatattgatcactttgttgatggtgctgccgttgcgcgtgtcagtcagtttacctataatcaagcacagcagtatgttgacaaactgctggctatccctgaaggaaaggttgctcaagcagtattagacttgtacacttatgaggcgatagttgccgaaccagctggagcgatgcctatcgctagtttggattttatggccagtgatatcgtagggaaaaacgtcgttctagttgtttctggtggaaacaatgatatcggccgtatgcaagaaatggaacaaaaggcattaatgtataagggtcgccaacagttttacttagttgagtttccgtaa

SEQ ID NO: 31752 - protein, 345 aa, Leuconostoc mesenteroides
MTTEGKLTAEEIDEAHRVLSKVVTHTPLAYDDYLSKKYRANVYLKREDMQRVRSFKIRGAYYNIIKAEKEKLNNGVVAASAGNHAQGVADTCHNLKIQATIFMPVTTPNQKVEAVKRFGSQYVTVILVGDTFDEAQSAAFEYTEKHNMFFVAPFDDRRTMAGQGTVAVEVFEDAVEQNINVDYLIASVGGGGLIGGLSTYSKKVSPQTTVVGVEPETAQSMKADFQAQKPTTVENIDHFVDGAAVARVSQFTYNQAQQYVDKLLAIPEGKVAQAVLDLYTYEAIVAEPAGAMPIASLDFMASDIVGKNVVLVVSGGNNDIGRMQEMEQKALMYKGRQQFYLVEFP

SEQ ID NO: 31753 - DNA, 1500 bp, Caenorhabditis elegans
  CDS (1)..(1500)
atggttgctccatctcgaaagaagtcgattattcatcatcatgatcactctcatgaatcaacacctcaaaaaactcaccatcatcgagtgaagcaggctgaacgtaaacggacagcaagcatcagtaaagaagatggaatggaatataacaaaagagttcgaaagcttcataaggcattcttaacccatggagccgagtccccacatgttgatgataaacagacttctggaagtaacagtgatactgaagctccacttttcgatccggattgtgatccagagaacccaaagaaattgaaattttctgatatttcaagtgctgcatttaacattaaaaatggagttcaaacaacaccatgtgtgcgatctcttcaactgtcatccaagtgtgaaatggacctttatttcaaaaaagaatatctgcaagtgacaggatcattcaaagaacgaggagcaagatacgctctttcaaaaatggctgagcaattcaaaaaagcaggagtgatcgctgcgagcgcaggaaatcatgctctagctctcagttatcatggacaacaaatggggattccagtgacagtggtcatgcctgttattgctccacttatgaaaattcaattctgcagaagcttgggagcaacagttattctcaagggagagagtattgcagtggccaaggactttgcacttcgtcacgctaaagagaatcacttaaagtacattaatggttatgatgcaattgatattcttgctggacaaggaacaattggacttgaaattcttgatcaagttccagatgttgatacaattcttgtaccagttggaggtggtggattaattgctggaatcgcaacagctgttaagacattgaagccggatgttcatatttatggaattgaatcagaaacctgcccatcgttcactgaagcatatgaagctggccatataataacttcccaggccaaagcgtcacttgctgatggtctcgccgttcccacagtcggcggaaattctttggagacagcaaaaggcttggttgataaggttatcacagtgaaagaagaaagcattgcgctgagtattttaagacttttggaagttgaaaaggctgttgttgaaggaggaggagctgttggattagcagctattttggaaggaaaagtaccagaattgaaaggaaagaaagttgtttcaattctttccggtggaaatattgatacaacagtacttggaagatcaattgaaagaggattagctgtagatggaagacttgttcgtttagaagttgtcgtatcagatagaccaggaggtattgctgaactaacaactacaattgctcatcttggagcatcaatcaaagatattttccacgaaagagcatggatctcaacggatgtattccacgttaaagttaaggttgtggcagaaactcgtggaaaagagcacgtggaggagattgagactgcattgaagaaaatttatgataatgttatacttcattga

SEQ ID NO: 31754 - protein, 499 aa, Caenorhabditis elegans
MVAPSRKKSIIHHHDHSHESTPQKTHHHRVKQAERKRTASISKEDGMEYNKRVRKLHKAFLTHGAESPHVDDKQTSGSNSDTEAPLFDPDCDPENPKKLKFSDISSAAFNIKNGVQTTPCVRSLQLSSKCEMDLYFKKEYLQVTGSFKERGARYALSKMAEQFKKAGVIAASAGNHALALSYHGQQMGIPVTVVMPVIAPLMKIQFCRSLGATVILKGESIAVAKDFALRHAKENHLKYINGYDAIDILAGQGTIGLEILDQVPDVDTILVPVGGGGLIAGIATAVKTLKPDVHIYGIESETCPSFTEAYEAGHIITSQAKASLADGLAVPTVGGNSLETAKGLVDKVITVKEESIALSILRLLEVEKAVVEGGGAVGLAAILEGKVPELKGKKVVSILSGGNIDTTVLGRSIERGLAVDGRLVRLEVVVSDRPGGIAELTTTIAHLGASIKDIFHERAWISTDVFHVKVKVVAETRGKEHVEEIETALKKIYDNVILH

SEQ ID NO: 31755 - DNA, 1137 bp, Sorghum bicolor
  CDS (1)..(1137)
atgcatgtgattgattgcttcctcgtcctacctagatttgggagttccaccgccaccgtcgtcgtcctcgttctcctttctcctagtccttggcgcgttgtggcgaactggagaggcctgatgggaagcagagatggcaccggtgacagcacgggacgccagggctatgctgccgacattgattccatcagggaggcgcaggcacgcattgcgccgtacgttcacaggacgcccgttctgtcgtcggcgtccatcgatgccatggtggggaagcagctcttcttcaagtgcgagtgcttccagaaagcaggggcattcaagatccgaggtgcttcgaattcgatattcgcacttgacgatgagcaggcatcaaagggcgttgtgacacatagcagtgggaaccatgccgccgccgtggctttggctgcaaagctgcgtggcatacctgcacacattgtcataccaagaaatgcaccagcgtgtaaggttgaaaatgttaagcggtatggtggtcatattatccggagcgatgtcagcattgaatcgagagaatctgtttgtaaaagagtccaggaggagactggtgctgttcttatccatcccttcaatgataaatacactatcagtggtcagggtacagtatctcttgaacttttggagcaagtccctgaaattgacacaataattgttcctattagtggcggtggtttaatttctggtgtgacccttgctgcaaaggccataaacccttcgatacgcattctggcagcagaaccaaaaggtgctgatgattctgcccagtctaaggctgctggaaagatcatcacattgccttccacaaacaccattgctgatggtctacgagcttttcttggtgacttgacatggcctgtggtgcgtgacttggtggacgatgttatcgttgtggatgacacagcgattgtggacgccatgaaaatgtgctacgagatcctgaaggtggctgttgagcctagtggcgcaattggcctggccgcagcactgtccgacgagtttaagcaaagctctgcttggcacgagagcagcaagataggaataattgtttccggaggcaatgttgacctcggcactctttgggagtctctgtacaaacaatga

SEQ ID NO: 31756 - protein, 378 aa, Sorghum bicolor
MHVIDCFLVLPRFGSSTATVVVLVLLSPSPWRVVANWRGLMGSRDGTGDSTGRQGYAADIDSIREAQARIAPYVHRTPVLSSASIDAMVGKQLFFKCECFQKAGAFKIRGASNSIFALDDEQASKGVVTHSSGNHAAAVALAAKLRGIPAHIVIPRNAPACKVENVKRYGGHIIRSDVSIESRESVCKRVQEETGAVLIHPFNDKYTISGQGTVSLELLEQVPEIDTIIVPISGGGLISGVTLAAKAINPSIRILAAEPKGADDSAQSKAAGKIITLPSTNTIADGLRAFLGDLTWPVVRDLVDDVIVVDDTAIVDAMKMCYEILKVAVEPSGAIGLAAALSDEFKQSSAWHESSKIGIIVSGGNVDLGTLWESLYKQ

SEQ ID NO: 31757 - DNA, 1002 bp, Saccharopolyspora spinosa
  CDS (1)..(1002): transl_table=11
atgaccttcaagcaacaccaggatgccagcggttttacgctgcctttcgaagcgattaccgctgcacatgatcgaattcgagaacgaatcatcgaaacgccgctgctggagagcgcggccctcaacgcactggtcggcgcacgagttctggtcaaagccgagtcgttgcagaagacgggctcgttcaagtttcgtggggcttgcaatcgcgcgctgcaactcgcgccgcacgagcggtccggcggaatcgtcgcctggtcgtccgggaatcacgcgctggcgatctcggccgtatgtgcggaactgggcgtgccggccaccatcctcatgcccttggacgcaccccgggcgaaggtcgacggcgccaagagctacggggccgaggtccggctttacgaccggcaaaccgaggatcgagaggcactcggcagggagatcgccgaccggacgaacgcggtcatcgttccgccttatgacgatccggagatcatggccggtcagggaacggtcggactcgaactcctcgcccaggcgcgcgaggccggtctaaagcccgacgccgtactcgccagtgcgagcggcggagggctgatcgccggcgtggcaaccgctgtgcgcacgaccctgcctgatgcacaggtattcgcggtcgaacctgaaggcttcgacgaccacgcacgttcccttgccgcaggcgcacgtgtgcggaacgaaccgggggcgcagtcgatctgcgactcgctccacgtgcccacgccaggagaactcacgttctccgtcaaccaccgccttctcactggtggcctcacggtcagcgacaccgaagttcgccgagcgatgcgggtggctttcgagacgctcaagctcgtggcggagcccggaggcgccgcacccctcgccgccctcctcgcggggaagttggacgtgtccggcaagaccgtcgtgacggtgctcagtggcggcaatgtcgatgcggacatgttccagtccgcattctcctga

SEQ ID NO: 31758 - protein, 333 aa, Saccharopolyspora spinosa
MTFKQHQDASGFTLPFEAITAAHDRIRERIIETPLLESAALNALVGARVLVKAESLQKTGSFKFRGACNRALQLAPHERSGGIVAWSSGNHALAISAVCAELGVPATILMPLDAPRAKVDGAKSYGAEVRLYDRQTEDREALGREIADRTNAVIVPPYDDPEIMAGQGTVGLELLAQAREAGLKPDAVLASASGGGLIAGVATAVRTTLPDAQVFAVEPEGFDDHARSLAAGARVRNEPGAQSICDSLHVPTPGELTFSVNHRLLTGGLTVSDTEVRRAMRVAFETLKLVAEPGGAAPLAALLAGKLDVSGKTVVTVLSGGNVDADMFQSAFS

SEQ ID NO: 31759 - DNA, 978 bp, Xenopus laevis
  CDS (1)..(978)
atggattttgcagagcaagctccttttcatattgtcactcctctgaaagagagtcgtgctttatccaaattggctgggactgaagttctcatgaaactggaaaatgttcagcctgcagggtctttcaagatacgtgggattggacactattgtcagaagcttgcgaagaaaggctgcacgaggtttgtctgttcctcagggggtaatgctgggcttgcagcagcttatgcttgtaggggactgaacctcccagcaaccattgttgttccacaaagtactggagcagatattgtacagaagctgcaggatctgggagctgatgttgtgataattggaaaggtctgggatgatgctgatgcacatgctcaccagctgactgaaactcctggcagtgtgtatatctctccatttaaccatcctctcgtctgggaaggccactccagccttgtgtgtgaactaaaggcctctttgggttctcagaagccaggggcactggttgtttctgtagggggtggtgggctcctggctgggctagctgaagggctgaagaaggtgggctggtctgatattcccataattgcaatggagactaaaggggcccactgtttgaatgcagctcttgaagcaggaaaacccatcagccttccagatattaccagtgttgccaagtgtctcggtgccaagacagtatgtgacagagcctttgagtgtacaagggagcacaacgttatttccattactgttgatgacagagaagccatacgggctgtggaaatgtttttggatgatgagttaatttttgtggagcctgcatgtggagctgcccttgctgctgtctattcaggacatatccaacgcctgcagcaggagggaatcttgaagacaccccttgaccccattgtgatggtagtgtgtggaggcagttcgatcagcatttctcagctaaaacacttcaaatcccagctgaatatgaattga

SEQ ID NO: 31760 - protein, 325 aa, Xenopus laevis
MDFAEQAPFHIVTPLKESRALSKLAGTEVLMKLENVQPAGSFKIRGIGHYCQKLAKKGCTRFVCSSGGNAGLAAAYACRGLNLPATIVVPQSTGADIVQKLQDLGADVVIIGKVWDDADAHAHQLTETPGSVYISPFNHPLVWEGHSSLVCELKASLGSQKPGALVVSVGGGGLLAGLAEGLKKVGWSDIPIIAMETKGAHCLNAALEAGKPISLPDITSVAKCLGAKTVCDRAFECTREHNVISITVDDREAIRAVEMFLDDELIFVEPACGAALAAVYSGHIQRLQQEGILKTPLDPIVMVVCGGSSISISQLKHFKSQLNMN

SEQ ID NO: 31761 - DNA, 1536 bp, uncultured bacterium 311
  CDS (1)..(1536): transl_table=11
atgacatttgctaaatctaaaaaatatttaaaaaaaatagaagagagcagtgtttatgatgtagctgatattacacccttgtctcttgcaagccatctaacaaaagaaacaaagaataatatctttttaaaacgcgaggaccttcagccggtattttcttttaaattgaggggggcttataacaaaatttcatatcttaagaagatcggtaccatagaaagagtgataactgcttctgcaggcaatcatgcacaaggagttgcttactctgcaagaaagctcagactcaaagcaaccattgtgatgccagtaacgactcccagtattaaagtaagtgcggttaaaaatctaggtgctcaagttgttcttgtaggggatacttatgatgaagcttatgaacatgctattaagttatcaaaaaaaccaaactatgcttttgtacatccttatgacgacccagacgttatcgctggacaaggaactatcggaaaagagattttagatcaagctggtaatgatttagatgccgtatttgttcctgttgggggcgggggcctgctggcaggcataggagcttatattaaaactctaaggccagatgtaaaaattattggagtagagcctgaggaagcagctggactttatgaagcccttaaagcaaatcggatagtaactttaaaacaagtagggatttttgtagacggggtagccgtaaaacaggttggtaaagttacttttcctataattaaagaatgggtagatgaagtggttacagtatctgtcgatgagatttgtgcagctattgaagatatttttcaagagactagaacaatatctgaacctgcaggagctttatccttggcaggcttgaagaaattaactaaaagtaaaggctggaagaataagaatctagtagctattaattcaggtgcaaaccttaactttgatcgtctttctcacatagtcgaacgagtacagttgggagagaagaaagaagctcttctaagtgtctgcattccagaagaaaaaggcagtttcagacaattttgtaaggatctaggcaaaaggatgattactgaatttaattatcgaattgatgatgaaaaagaagcaaacatttttgtagcttgtagagtaaatgagggaataaaagaaaaaagtagatttataaagaatttgcgcaagaaaggttattcccctaaagatttatctgataatgaaatggctaaattgcatgtcaagcacatggtaggaggcagggctccaaaagacattatttcttacggggaagagatttttagagttgagttcccggaaagacctggagcactgatggatttcttaagtttgttaggagacaaatggaatataactttgtttcactatagaaatcaaggttcagcttatggaagggtgttagtaggctttcaagctaatccaaaagaaactgaaaaattaacaaagcacctcgttaaaacaggctttccattttggaatgaatctaagaactcagcttatttatccttccttgaatga

SEQ ID NO: 31762 - protein, 511 aa, uncultured bacterium 311
MTFAKSKKYLKKIEESSVYDVADITPLSLASHLTKETKNNIFLKREDLQPVFSFKLRGAYNKISYLKKIGTIERVITASAGNHAQGVAYSARKLRLKATIVMPVTTPSIKVSAVKNLGAQVVLVGDTYDEAYEHAIKLSKKPNYAFVHPYDDPDVIAGQGTIGKEILDQAGNDLDAVFVPVGGGGLLAGIGAYIKTLRPDVKIIGVEPEEAAGLYEALKANRIVTLKQVGIFVDGVAVKQVGKVTFPIIKEWVDEVVTVSVDEICAAIEDIFQETRTISEPAGALSLAGLKKLTKSKGWKNKNLVAINSGANLNFDRLSHIVERVQLGEKKEALLSVCIPEEKGSFRQFCKDLGKRMITEFNYRIDDEKEANIFVACRVNEGIKEKSRFIKNLRKKGYSPKDLSDNEMAKLHVKHMVGGRAPKDIISYGEEIFRVEFPERPGALMDFLSLLGDKWNITLFHYRNQGSAYGRVLVGFQANPKETEKLTKHLVKTGFPFWNESKNSAYLSFLE

SEQ ID NO: 31763 - DNA, 972 bp, Rhizobium sp
  CDS (1)..(972): transl_table=11
atgcgcaattaccccaccattcaggacatccgtgaagcccgggaacggctgagaccacacgtcaggcacacgccgctgttgcgcgcggacaagattgagaaagctgctggttgtcagctctatctcaaacccgaaaccctgcagattactggcgccttcaagatccgcggcgccctgaacaaggctctctcgctctcgagagaagagatcgcaaacggcatcatcgcgacgtcgtcgggcaaccatgcccaggggctttcttacgcggccaagatgctcggcgtaaaggtgatattggtacttccggtgaccacacccaaaatcaagattgaaaatacaaaagcccttggcgcggaagtcattctttttgatggtgataatgctgctagatggaaaaaggtctacgaaatcgctgaaggaaacaagtatgcggttattcacggctttgaagaccccattgtaatggctggccagggaacgatcgggtgcgagatactcgaagacttggacgatgtggacacggtcatcgtccccttaggcggcggaggcctaatctcgggaatcgctaccgccataaaagaaacgaaaccatcggtgcgcgttatcggggcagagcctgccttgacaccgaagtattatcacagccggatcaacaaggagcgcacatcgcttccgttgaagaacaccattgcggatggcttgaggttaagtgttccgggtaaaaacccgtatccgattatcgaaaaatatgtggacgagattgttcttgttgaagacgagcacatcatctccgggatgcgcgcgcttgccagggatgcgaagttgatcgctgaaccagccgcctcgattggcattggagccttgttggcgggcagcatagacgtcaagcccgatgaaaaagtctgtgcggtgttgtctggcggcaactgggacctaggcgatcttgcagagatatacaaggcagcggggtaa

SEQ ID NO: 31764 - protein, 323 aa, Rhizobium sp
MRNYPTIQDIREARERLRPHVRHTPLLRADKIEKAAGCQLYLKPETLQITGAFKIRGALNKALSLSREEIANGIIATSSGNHAQGLSYAAKMLGVKVILVLPVTTPKIKIENTKALGAEVILFDGDNAARWKKVYEIAEGNKYAVIHGFEDPIVMAGQGTIGCEILEDLDDVDTVIVPLGGGGLISGIATAIKETKPSVRVIGAEPALTPKYYHSRINKERTSLPLKNTIADGLRLSVPGKNPYPIIEKYVDEIVLVEDEHIISGMRALARDAKLIAEPAASIGIGALLAGSIDVKPDEKVCAVLSGGNWDLGDLAEIYKAAG

SEQ ID NO: 31765 - DNA, 969 bp, Acinetobacter baumannii
  CDS (1)..(969): transl_table=11
atgaaaaatttaacccttccaaattatgaagatgtcgcagccgctgctgaacgtataaaaggttttgtaaataaaactcctgttttaacttcacgtacggtgaacaatgaatttgaagcagaagtgttctttaaatgtgagaattttcagcgtgtaggcgctttcaaatttcgtggtgccatgaatgcacttttgcaatttaatgagactcaaaagaaagcaggtgtagttgctttttcttcgggaaatcatgcacaagctattgcgctttcatcaaaaattcttggtattccagcaaccattatcatgcctaaagatgcacctgctgcaaaaatggcagcaacgcgagaatacggcggtaatattgttgaatttgaccgttatacggaagatcgggaaaaaattggaaaagagattgccgaacaaaatggtctaacattaattccgtcttatgaccatccgcatgtgattgcaggtcaaggtacagctgctaaagagttatttgaagaagtcggtgatttagattacctgtttgtatgtttaggtggcggcggtttgttggcaggttctgccctgtcggctcgccagctttctccgaactgtaaaatatatggcgttgaaggtgcgctaggaaatgatgggcaaatgtcttttagaaaaggcgaaattgttcatattgataccccattaaccattgccgatggcgcgcagactcaatatttgggcaaattgacctttcctattattcaacagaaagttgatgatattttgacggtcacagacgaagaactcattaacgctatgaagttctttgctgaaagaatgaagatggtggttgaaccgacaggatgtctcggatttgcggctgcccgtaatttaaaacatgagttaaaaggcaaacgtatcggcattattattagtggtggcaatgtcgatatttctaaatacgcggagtttttatctgcctaa

SEQ ID NO: 31766 - protein, 322 aa, Acinetobacter baumannii
MKNLTLPNYEDVAAAAERIKGFVNKTPVLTSRTVNNEFEAEVFFKCENFQRVGAFKFRGAMNALLQFNETQKKAGVVAFSSGNHAQAIALSSKILGIPATIIMPKDAPAAKMAATREYGGNIVEFDRYTEDREKIGKEIAEQNGLTLIPSYDHPHVIAGQGTAAKELFEEVGDLDYLFVCLGGGGLLAGSALSARQLSPNCKIYGVEGALGNDGQMSFRKGEIVHIDTPLTIADGAQTQYLGKLTFPIIQQKVDDILTVTDEELINAMKFFAERMKMVVEPTGCLGFAAARNLKHELKGKRIGIIISGGNVDISKYAEFLSA

SEQ ID NO: 31767 - DNA, 3522 bp, Dictyostelium discoideum
  CDS (1)..(3522)
atggcaaagaaacattcaagagaagaaacaataacatcaccaagtccaagtggaaatacaactacaacatctacaacaagtccaacatcaacaacaccaacaaaagaaaaaagaacaaaaatttcaaatggaaataataaagaaaaagaaaccaatagtaataataatataaatacaagtaatacaaatattttaaatggtagtgttaatagtttaaataatagtagtacaaatttatttacaacacatcaaaataatccagtaaagaatttaaaaggatttgatgatattggtgaaggtatacttagattcgaaggatcaaaagaaattgatttcattggatcagtaaagagagttcattcaatgatgaaagattatttaaagaaaactccacaatatgattacgaattattaagtcaattattcaaatgtgatttacaattgaaattagagaatcttcaattgtttggtgatatttatgttagaaattgttttagtatccttttatcaaattattttaatcaagccaaagatttaggtaaagagtttagacaaattggtggtttcgttttagtgattaatccaatggatattgaaagtcaaccaatggtaactggtagtattttaactgctcttcatttaaaaatgaaatgtattatttatgttggtcctggtaatttaccattatcacaaattacaagattatatatgtgtcatgctagaggtgcaaaaattatatttcataaaggtgatgtatcatcatgttatacaagagcatggcaacatgcaaaagatatgagtatggtatttttagattgtaaatttataccacattttagtttattgggtgcagcaactattgcacatgaaatgatggaggatagtccagatagggagacaattatcataccattaagattatattcacagggttggagttatgtcagtggtatttcaattttctataagattatgaaacctgaaatcaagattatagtagttcaaatgactgatgatctctttggtaaagatattgaaggtaaagaatttaatagacaatcattattccctgaccgtttagagattggttggttagcattaattcatgatcaatcagatcttaccaatgttttcgacgctttcgattcaagaaatcaaggtaaattctctgataaagatttagaggcattattgataagcattggtggtgatccaactagaaataaatcaatgtgtccaaaatcatcactttctcaaactgaatttgttcatgaagtaatcacagagatcacaaatggtttagagcaattggaggagaaatttagctactttttaccacaattcaaattggataacttaatcaatcataaaatcatcgatcaattagtaacagcaaccgaggatcaagcttcaatcgctttcattaaatgtttagagtatacccatactctcaccaatggtaagggttcaattgctttgggtggtctaatgagtggtaatattcatttaagacccgatgaaaaagtattggttatgttatcaggtggttatgtcgatgtaatcgattttcaaactattttaaactatggtttagatatcactggtcaaagctttgaaattgaattggatttacccgataatactacatcactaaataaagtattaaatgttattggtgaaaataaagtatcagttatggaggtattaatggatcgttcttgtgaaactttaaaacaatatcatgttagaacttcaattcaatgtcattcaagaaattttgaacaacaatttaaaatctttgatgttattaaatctttaggttttaaatatagtttaagaaaatctgcaattctaaataaagaagaatctggtttcctctcaccaccaatgattaagccttcaacaaatttatcaatttctcaatcaattaatattggtagtagtgtaacgagtttaccatcatttccaaatactttaaattcaagtagttcaaatgcatttaatagatttggtaatggtaatggtagttcatcaaatacaacatcaccatcaccaccaccacaactaccaccacaattacaatataaaatttcaccaaaaccatatcatcaacaaaaaagaaatattggtgatataacagttcaatcaattagagaagcacataatagaattaaacatattatgactcaaccacccatttatcattcaactacctattcaaagatttgtggttgcaaagttacattaatgttagagaatactcaaaagactggtagttttaagattagaggttcatcgaatatggtgttaagagcattggaaggtgcaatggtaaacactgatgaaagaccagttggtttagttgctgcctctgcaggcaatcatgctcaaggtgtagctttaatctctgcaaaagttggtttaccttgtacaatcgtttgtccagagtatgcaccagattcaaaattatcatcaactcgtcaatatggtgccgaagtcattaaaaagggtaaaagtcttgaagaggctgtcaaattggccgatgaaatctgtaaggaaagaaattggacattggttagaccttacaatgatgttgatgtaatcgaaggtcaaggtacaatgggttgtgatatctatgataaagtaccagatgtcgatactgtggttgtaaatgttggtggtggtggtatgatcgctggtatcgcactattcttgaaacgtatcaatccaaacattagaatcattggtgttcaatcagcaaacgtttcaccattatcagaatttaaacaaaccaatcaattccgttatatcgaaccagcagttttatcattggccgatggtacaaatgtaaagatgccaggtggtgtacacactcaagtacttcatgatatggtcgatgagtatgtaaccgttagtgaaaatgaaatcgcttcgaccatagttcatctactttataatagtcgtacagtttcagagggtgcaggttgtttaggtttggctgcattaatgcataagaaaattaaagttagaaaggatgaaagggtttgtgtcatcatttgtggtggtaatatcgatatgtcaacacttcgtcaagtctatgaatatggtttacgttcacttggtcgttctttcacaattcatttaacaacttgggattatcctgggaccctaagtaaaatcattggtttggctgcccgtgccgaattaaaagttcgtgaaattagacatatccgtggtggtggtaatatcaattggaatgaagttatcatttccctctccttctatagtaactcttttaatcatcaaaactttttcttatctctattggctcaagaaggtctcttcccaaagattgtcggtagaaaatacattaaagataatgaaatagtctataaaattttcgataaatctgttgataaaaagaataaagaattaaaagataccttttcagaaagacaacaactatttttagaacaatatggaaaacaagccaatgtttctttggaaagtaaaatgaattaa

SEQ ID NO: 31768 - protein, 1173 aa, Dictyostelium discoideum
MAKKHSREETITSPSPSGNTTTTSTTSPTSTTPTKEKRTKISNGNNKEKETNSNNNINTSNTNILNGSVNSLNNSSTNLFTTHQNNPVKNLKGFDDIGEGILRFEGSKEIDFIGSVKRVHSMMKDYLKKTPQYDYELLSQLFKCDLQLKLENLQLFGDIYVRNCFSILLSNYFNQAKDLGKEFRQIGGFVLVINPMDIESQPMVTGSILTALHLKMKCIIYVGPGNLPLSQITRLYMCHARGAKIIFHKGDVSSCYTRAWQHAKDMSMVFLDCKFIPHFSLLGAATIAHEMMEDSPDRETIIIPLRLYSQGWSYVSGISIFYKIMKPEIKIIVVQMTDDLFGKDIEGKEFNRQSLFPDRLEIGWLALIHDQSDLTNVFDAFDSRNQGKFSDKDLEALLISIGGDPTRNKSMCPKSSLSQTEFVHEVITEITNGLEQLEEKFSYFLPQFKLDNLINHKIIDQLVTATEDQASIAFIKCLEYTHTLTNGKGSIALGGLMSGNIHLRPDEKVLVMLSGGYVDVIDFQTILNYGLDITGQSFEIELDLPDNTTSLNKVLNVIGENKVSVMEVLMDRSCETLKQYHVRTSIQCHSRNFEQQFKIFDVIKSLGFKYSLRKSAILNKEESGFLSPPMIKPSTNLSISQSINIGSSVTSLPSFPNTLNSSSSNAFNRFGNGNGSSSNTTSPSPPPQLPPQLQYKISPKPYHQQKRNIGDITVQSIREAHNRIKHIMTQPPIYHSTTYSKICGCKVTLMLENTQKTGSFKIRGSSNMVLRALEGAMVNTDERPVGLVAASAGNHAQGVALISAKVGLPCTIVCPEYAPDSKLSSTRQYGAEVIKKGKSLEEAVKLADEICKERNWTLVRPYNDVDVIEGQGTMGCDIYDKVPDVDTVVVNVGGGGMIAGIALFLKRINPNIRIIGVQSANVSPLSEFKQTNQFRYIEPAVLSLADGTNVKMPGGVHTQVLHDMVDEYVTVSENEIASTIVHLLYNSRTVSEGAGCLGLAALMHKKIKVRKDERVCVIICGGNIDMSTLRQVYEYGLRSLGRSFTIHLTTWDYPGTLSKIIGLAARAELKVREIRHIRGGGNINWNEVIISLSFYSNSFNHQNFFLSLLAQEGLFPKIVGRKYIKDNEIVYKIFDKSVDKKNKELKDTFSERQQLFLEQYGKQANVSLESKMN

SEQ ID NO: 31769 - DNA, 1053 bp, Dictyostelium discoideum
  CDS (1)..(1053)
atgggtcttaaaacaactatttcaccagattcttcatttgataaaataataaataccaaaacttcacctccattacatataaattctccaatgttggaatcattggctttatcaaaattatttaaagaagaaaatgcaaaagtatggatgaaagtagatgcacttcaaccatcaggctcattcaaaatccgtggagtaggccttctctgtaatcaacttttaaaagaaaaaaaatcaaaaaatgaagaagctcattttatttgttcatcaggaggtaatgcaggtaaaagtgttgcatatgcaggtagaaaattaaatgtaaagacaacgatagttttaccaaatactataccagaggcaacaattgaaaagattaaagatgaaggagcaaatgtaattgtacatggtactatttgggatgaagcaaatacatttgcattggaattggcagagaaagaaggttgtacagattgttatatccatccattcgatcatccattactttgggagggtcattccacaatgattgatgaaatctatcaagatgttcaaaatggtgtttgtgaaaaaccagatgtaattttattttcagttggtggtggtggtatgatgattggtattttacaaggtttagatagatatggttggaatgatataccaattgttactgttgaaactgttggtagtcatagtttttggaaaagttttcaagagaaacaattgacaaaattggatgtatcagaggttacaagtgtaattaaaaccttatcaactcgttcagtttgtagtgaagcttgggaaatttcaaaaagatttaatattaaaccaattttagtcactgatagagatgctgtagatgcttgtttaaaatttgttgatgatgaaagaatcttagtagaaccatcttgtggtgcaacattatctgtactctattcaaaaaaattatcaacacttttagatataaattcaaaaaatattttaacaatcgtttgtggtggaaatggaactagtattttacaattgaatgatttattacaaactttaccaaaatag

SEQ ID NO: 31770 - protein, 350 aa, Dictyostelium discoideum
MGLKTTISPDSSFDKIINTKTSPPLHINSPMLESLALSKLFKEENAKVWMKVDALQPSGSFKIRGVGLLCNQLLKEKKSKNEEAHFICSSGGNAGKSVAYAGRKLNVKTTIVLPNTIPEATIEKIKDEGANVIVHGTIWDEANTFALELAEKEGCTDCYIHPFDHPLLWEGHSTMIDEIYQDVQNGVCEKPDVILFSVGGGGMMIGILQGLDRYGWNDIPIVTVETVGSHSFWKSFQEKQLTKLDVSEVTSVIKTLSTRSVCSEAWEISKRFNIKPILVTDRDAVDACLKFVDDERILVEPSCGATLSVLYSKKLSTLLDINSKNILTIVCGGNGTSILQLNDLLQTLPK

SEQ ID NO: 31771 - DNA, 1740 bp, Giardia lamblia
  CDS (1)..(1740)
atgcatgccctaatccagtctggagagctcatgaacttcgttgtcaagctcaacacacttgatgggaatctcatgacccgtttgacagatatcctctccaagcactcgattaatattcttagctttcacgtaaagactatacaacaccagcaggtctctatcaaggcctcgggccctggctaccagcacttagtttctttgtacaatgagttgtccgaggtcttcggtgatgagaacatcctggggttggcgatccctaagtacaatataaaggaggaggggctgcgcgatgtctcctatgaggagttcaatgagggagcttcgtccagtggcgagcccatcagaacatatgtttcccccatcaagtcgtgtgatgagataacgccggcaactattgagcttgcttacaacaagcttcaggcagctaaagccatacacgagaccccctgcatcatctccaaggcgtacagcaatattttgcagaagaagacaggcgttgaccacaccgttattctccagtttgaaaatgttcagcagacgggctcgtttaagatccgcggggcgagcaatatgctcattaagagcaaggagtgggccgagagcaataatactgagatctctggggttgtggcatgctctgcaggaaaccacgcccagggagtcagcaagacaagtgacttgttgggtattcgctgcacaatagtttgccctgagacggctccgactgtcaaattggttaacacaaagcgatacaacgccgaagtgattaagcacggtgctgtcttcgatgaggcaagcaagtattcccaggaactctgtgagaagcgcggctggatgtttatcccgccctataactcgttcgacgtcattgagggccaaggaacaattgctcacgaactgatgaacaagatggtcgggcaagggcacgtttcctccattgaccgcatcctggtcaatattggaggaggcggtatgatttcaggaatctccctttacgctaagagagtcaatccaaatatcaagatcacagggatccaagcagagaaggtgtttcctctccgcaactacaaagagagtggccagcttgtccctgttgacaaaacggctggaacaatagcagatggctgcaatgtcaaggttcttggaggaatccacaacgatgtcctcaagaactacgttgacgagttcatttcggtgactgagaacgagatcgccagtgcggttgttcatgctcttatcacgacagggacgctctgcgagggcgccggagcaatgggtattgcggccctgatgtatgacaagctgacccttgctgagcgtgagaacatagctgtcgttctgtgtggtggcaatatcgacctcactagagtcagacagatctataactacggactcattgctctagggaggatgctcagcgttgagatcagacaggcagacacatatggcagccttgcaaagctcagcaagattgccttgaaatactactctaccatacgatatgttacatacctgcgaggcggagatgaccttgattgggaccagatggtcgtgaaggtggacatcaagattccaagccctgcagtctatggcttgcttagccaagagattcgtgcgtcctttgatacagttacatttctgggtgaaaccgttatccctcgttaccctgtgtcagcccatgcacctgagctgggatcgtctgctgtggagaactctcaggtacgcgtcgttaagaagtga

SEQ ID NO: 31772 - protein, 579 aa, Giardia lamblia
MHALIQSGELMNFVVKLNTLDGNLMTRLTDILSKHSINILSFHVKTIQHQQVSIKASGPGYQHLVSLYNELSEVFGDENILGLAIPKYNIKEEGLRDVSYEEFNEGASSSGEPIRTYVSPIKSCDEITPATIELAYNKLQAAKAIHETPCIISKAYSNILQKKTGVDHTVILQFENVQQTGSFKIRGASNMLIKSKEWAESNNTEISGVVACSAGNHAQGVSKTSDLLGIRCTIVCPETAPTVKLVNTKRYNAEVIKHGAVFDEASKYSQELCEKRGWMFIPPYNSFDVIEGQGTIAHELMNKMVGQGHVSSIDRILVNIGGGGMISGISLYAKRVNPNIKITGIQAEKVFPLRNYKESGQLVPVDKTAGTIADGCNVKVLGGIHNDVLKNYVDEFISVTENEIASAVVHALITTGTLCEGAGAMGIAALMYDKLTLAERENIAVVLCGGNIDLTRVRQIYNYGLIALGRMLSVEIRQADTYGSLAKLSKIALKYYSTIRYVTYLRGGDDLDWDQMVVKVDIKIPSPAVYGLLSQEIRASFDTVTFLGETVIPRYPVSAHAPELGSSAVENSQVRVVKK

SEQ ID NO: 31773 - DNA, 1848 bp, Podospora anserina
  CDS (1)..(1848)
atggcttccacaaattcgaatgcacctcgtcatgaggggagtgtggcagagcagacggccggccatgttaacggtgactatgtggtcaatggcgtgccacagctgcccaccgcattccgcaacggcaacggcggccttggtgctgggggtttgcccaggaacatgtcgctgaacagcttcgctctgacagagtacagcgcaaagccaacaccccccgctgaagacaagaaagatgaagtgaaaaaggtcgtgccagacgagtatctgctaccgaatggtaacccagatctcattatcctacgtgtacagtatcttcgccttatcatcacctcctacccgcgggtgagagaggtgtgcaaagaaactcctttggtgcacgctgttggcctgagcaaccgactggagcgcaaggtcctgttgaagcgcgaggatgagcaaccggtattcagtttcaaactcagaggagcgtacaacaagatggctcatctcgacgctaccgagtcctggaagggtgtcgtttgttgcagcgctggcaatcatgctcagggcgttgcttactcggcccgcaggttgaaaatcccagccactattgtgatgcccaagggcacaccaagcatcaagcatctcaatgtatcgagaatgggcggacacgttgttcttcacggcgccgactttgacgaggccaaggaggaatgtgctcggcgggaaaagcaggatggcctgataaacattcccccgttcgacgacccttatgttattgccggccaaggaactatcggtatggagattctctcacaaacaaacctgcagaagcttgatgccatcttctgctgcgtgggtggaggcggcctgatcgccggcgttggtgtgtacgtcaagcgtattgcaccgcatgtcaagatcattggcgtggaaacgtacgacgcggatgcgatgactcagtctctcgacaagggggagcgtgtgcttctcaaggatgttgggttgttcgccgatggcgccgcggtcaagattacgggcgaggaaacgttccgtatttgtcaggaggttgtggacgaaatggttcgggtaaccacagacgaggcctgtgccgctatcaaggacatgtttgaggataccaggtctatcattgaaccagctggtgccctggccattgccggtctgaagaagtgggtggccgccaatccaaccccggatcctacacggtctgtcgtggccatcacatccggcgcaaacatgaactttgaccgcttgggctttgttgcagcccgtgctacgtacggcgagggaagagaggctttacttgcagcccgcatcccagaaagcccgggagccttcgctgaactcatcaacgccgtcatgcctcactctgtcaccgagtttagctatcgttacgccagcccaactgaagcaaatgtgctcctgggtatctcattaaccgccgttggtagtgaacgcgcacagcaactgcagtcggttatcagccgcatcaaggagtccggcaccatggatatcaccgatctgtccaacgacgagttagcaaagagtcacattcgatacatggttggtggccgttctagtgtgcctaacgagcgtctgtacacattccgattcccagaacggcccggtgctcttgagcgcttcctacagaccttgcgtgtcaaatacaacatcagtctgttccagtacagaaaccacggtggtgatattgggcaggttttgacaggcatcgtttgcccgaacgaggagattggcgaactagaaacattcctcaagaagatcggctatccgtgggaggactgcacagatgcaccggtgttcaagacattcttacggtcggagtcatag

SEQ ID NO: 31774 - protein, 615 aa, Podospora anserina
MASTNSNAPRHEGSVAEQTAGHVNGDYVVNGVPQLPTAFRNGNGGLGAGGLPRNMSLNSFALTEYSAKPTPPAEDKKDEVKKVVPDEYLLPNGNPDLIILRVQYLRLIITSYPRVREVCKETPLVHAVGLSNRLERKVLLKREDEQPVFSFKLRGAYNKMAHLDATESWKGVVCCSAGNHAQGVAYSARRLKIPATIVMPKGTPSIKHLNVSRMGGHVVLHGADFDEAKEECARREKQDGLINIPPFDDPYVIAGQGTIGMEILSQTNLQKLDAIFCCVGGGGLIAGVGVYVKRIAPHVKIIGVETYDADAMTQSLDKGERVLLKDVGLFADGAAVKITGEETFRICQEVVDEMVRVTTDEACAAIKDMFEDTRSIIEPAGALAIAGLKKWVAANPTPDPTRSVVAITSGANMNFDRLGFVAARATYGEGREALLAARIPESPGAFAELINAVMPHSVTEFSYRYASPTEANVLLGISLTAVGSERAQQLQSVISRIKESGTMDITDLSNDELAKSHIRYMVGGRSSVPNERLYTFRFPERPGALERFLQTLRVKYNISLFQYRNHGGDIGQVLTGIVCPNEEIGELETFLKKIGYPWEDCTDAPVFKTFLRSES

SEQ ID NO: 31775 - DNA, 981 bp, Burkholderia pickettii
  CDS (1)..(981): transl_table=11
atgacccagctagacaccaccactcttcccgacctgtccgccatcgccggcctgcgcgcccggctgaaacaatgggtgcgcaccacgcccgtattcgacaagaccgacttcgaacccgtgccgggcacggcggtgaacttcaagctcgaactgctgcaggccagcggcaccttcaaggcgcgcggcgcgttctcgaacctgctagcgctggacgacgatcagcgcgcggccggcgtcacctgcgtgtcggcaggcaaccatgccgttggggtggcctacgccgccatgcgcctgggcatcccggccaaggtggtcatgatcaagaccgccagcccggcccgcgtggcgctgtgccgccagtacggcgccgaagtggtgctggccgaaaacggccagacggcattcgataccgtgcaccgcatcgaaagcgaggaagggcgcttcttcgtgcaccccttcaatggctaccgcacggtgctgggcaccgccacgctaggtcacgaatggctggagcaggctggcgcgctcgacgccgtgatcgtgcccatcggcggcggcgggctgatggcgggcgtcagcacggcggtgaaactgctggcgccgcaatgccaggtcatcggcgtagagcccgaaggcgccgacgccatgcaccgcagctttgaaaccggcggccccgtcaagatgggctccatgcagagcatcgccgacagcctgatggcgccgcacaccgagcaatacagctacgaactgtgccgccgcaacgtcgaccgcctggtcaaggtgtccgacgatgaactgcgcgccgccatgcgcctgctgttcgaccagctcaagctggccaccgagccggcatgtgccaccgccacggccgcgctggtcggcgggctgaaggccgaactggccggcaagcgggttggcgtgctgctgtgcggcaccaacaccgacgccgccaccttcgcgcggcacctgggcctcggctga

SEQ ID NO: 31776 - protein, 326 aa, Burkholderia pickettii
MTQLDTTTLPDLSAIAGLRARLKQWVRTTPVFDKTDFEPVPGTAVNFKLELLQASGTFKARGAFSNLLALDDDQRAAGVTCVSAGNHAVGVAYAAMRLGIPAKVVMIKTASPARVALCRQYGAEVVLAENGQTAFDTVHRIESEEGRFFVHPFNGYRTVLGTATLGHEWLEQAGALDAVIVPIGGGGLMAGVSTAVKLLAPQCQVIGVEPEGADAMHRSFETGGPVKMGSMQSIADSLMAPHTEQYSYELCRRNVDRLVKVSDDELRAAMRLLFDQLKLATEPACATATAALVGGLKAELAGKRVGVLLCGTNTDAATFARHLGLG

SEQ ID NO: 31777 - DNA, 1779 bp, Arabidopsis thaliana
  CDS (1)..(1779)
atgaattccgttcagcttccgacggcgcaatcctctctccgtagccacattcaccgtccatcaaaaccagtggtcggattcactcacttctcctcccgttctcggatcgcagtggcggttctgtcccgagatgaaacatctatgactccaccgcctccaaagcttcctttaccacgtcttaaggtctctccgaattcgttgcaataccctgccggttacctcggtgctgtaccagaacgtacgaacgaggctgagaacggaagcatcgcggaagctatggagtatttgacgaatatactgtccactaaggtttacgacatcgccattgagtcaccactccaattggctaagaagctatctaagagattaggtgttcgtatgtatcttaaaagagaagacttgcaacctgtattctcgtttaagcttcgtggagcttacaatatgatggtgaaacttccagcagatcaattggcaaaaggagttatctgctcttcagctggaaaccatgctcaaggagttgctttatctgctagtaaactcggctgcactgctgtgattgttatgcctgttacgactcctgagataaagtggcaagctgtagagaatttgggtgcaagggttgttcttttcggagattcgtatgatcaagcacaagcacatgctaagatacgagctgaagaagagggtctgacgtttatacctccttttgatcaccctgatgttattgctggacaagggactgttgggatggagatcactcgtcaggctaagggtccattgcatgctatatttgtgccagttggtggtggtggtttaatagctggtattgctgcttatgtgaagagggtttctcccgaggtgaagatcattggtgtagaaccagctgacgcaaatgcaatggctttgtcgctgcatcacggtgagagggtgatattggaccaggttgggggatttgcagatggtgtagcagttaaagaagttggtgaagagacttttcgtataagcagaaatctaatggatggtgttgttcttgtcactcgtgatgctatttgtgcatcaataaaggatatgtttgaggagaaacggaacatattggaaccagcaggggctcttgcactcgctggagctgaggcatactgtaaatattatggcctaaaggacgtgaatgtcgtagccataaccagtggcgctaacatgaactttgacaagctaaggattgtgacagaactcgccaatgtcggtaggcaacaggaagctgttcttgctactctcatgccggaaaaacctggaagctttaagcaattttgtgagctggttggaccaatgaacataagcgagttcaaatatagatgtagctcggaaaaggaggctgttgtactatacagtgtcggagttcacacagctggagagctcaaagcactacagaagagaatggaatcttctcaactcaaaactgtcaatctcactaccagtgacttagtgaaagatcacctgcgttacttgatgggaggaagatctactgttggagacgaggttctatgccgattcacctttcccgagagacctggtgctctaatgaacttcttggactctttcagtccacggtggaacatcacccttttccattaccgtggacagggtgagacgggcgcgaatgtgctggtcgggatccaagtccccgagcaagaaatggaggaatttaaaaaccgagctaaagctcttggatacgactacttcttagtaagtgatgacgactattttaagcttctgatgcactga

SEQ ID NO: 31778 - protein, 592 aa, Arabidopsis thaliana
MNSVQLPTAQSSLRSHIHRPSKPVVGFTHFSSRSRIAVAVLSRDETSMTPPPPKLPLPRLKVSPNSLQYPAGYLGAVPERTNEAENGSIAEAMEYLTNILSTKVYDIAIESPLQLAKKLSKRLGVRMYLKREDLQPVFSFKLRGAYNMMVKLPADQLAKGVICSSAGNHAQGVALSASKLGCTAVIVMPVTTPEIKWQAVENLGARVVLFGDSYDQAQAHAKIRAEEEGLTFIPPFDHPDVIAGQGTVGMEITRQAKGPLHAIFVPVGGGGLIAGIAAYVKRVSPEVKIIGVEPADANAMALSLHHGERVILDQVGGFADGVAVKEVGEETFRISRNLMDGVVLVTRDAICASIKDMFEEKRNILEPAGALALAGAEAYCKYYGLKDVNVVAITSGANMNFDKLRIVTELANVGRQQEAVLATLMPEKPGSFKQFCELVGPMNISEFKYRCSSEKEAVVLYSVGVHTAGELKALQKRMESSQLKTVNLTTSDLVKDHLRYLMGGRSTVGDEVLCRFTFPERPGALMNFLDSFSPRWNITLFHYRGQGETGANVLVGIQVPEQEMEEFKNRAKALGYDYFLVSDDDYFKLLMH

SEQ ID NO: 31779 - DNA, 1080 bp, Mus musculus
  CDS (1)..(1080)
atggagggggccttggcagaacgcgtcggggcggagcctttccacagggtcacgcccctgctggagagctgggcgctgtctcaggtggcaggcatgccggtcttcctcaaatatgagaatgtgcagatagctggctcctttaagattcggggcatcggacatttctgccagcagatggccaagaggggatgcagacatctggtgtgctcctcagggggcaatgcgggcattgcggctgcatactcggctcgtaagctgggcatccccgtcaccatcgtgctcccagagggcacctccgtgcaggtggtgaggcggctcgagggggaaggggccgaggtccagctgactgggaaagtctgggatgaagccaatgtaaaagcacaagaactggccacaagggatggctgggtgaacgtctccccgtttgaccatccccttatatgggaaggccatgccagcctagtgcgggagctgaaggagtcactagggacccctccaggtgccgtggtgctggccgtggggggcggagggctcctggcaggtgtgactgctggcctgctggaggtgggctggcagcatgtgcccatcgttgccatggagacccgcggggcgcacagtttcaattcggccttgcaggcaggcaggccggtcaccctgccagacatcaccagtgtagccaagagcctcggagccaagacggtggctgcacggaccttggagtgtgcaaaggagtgtgaggtcctctctgaggtggtagaagaccgggaggctgtcagcgctgtgcagaggttcctggacgatgagcgcatgctggtggaacctgcctgcggtgccgccctggccgccatctactcgggcatcctgtggaggcttcaggctgagggccgcctgagttctgccctagcttccgttgtggtcatcgtgtgcggtggcaacaacattagtagccaacagcttcaggagctgaaaaccagctgggctgcattgaaaatctcaggaactcccccaaagttcctggacacctggtgggtcatcaagggacctcggttccagtggtcctgccctcttccttccaggtag

SEQ ID NO: 31780 - protein, 359 aa, Mus musculus
MEGALAERVGAEPFHRVTPLLESWALSQVAGMPVFLKYENVQIAGSFKIRGIGHFCQQMAKRGCRHLVCSSGGNAGIAAAYSARKLGIPVTIVLPEGTSVQVVRRLEGEGAEVQLTGKVWDEANVKAQELATRDGWVNVSPFDHPLIWEGHASLVRELKESLGTPPGAVVLAVGGGGLLAGVTAGLLEVGWQHVPIVAMETRGAHSFNSALQAGRPVTLPDITSVAKSLGAKTVAARTLECAKECEVLSEVVEDREAVSAVQRFLDDERMLVEPACGAALAAIYSGILWRLQAEGRLSSALASVVVIVCGGNNISSQQLQELKTSWAALKISGTPPKFLDTWWVIKGPRFQWSCPLPSR

SEQ ID NO: 31781 - DNA, 1809 bp, Oryza sativa
  CDS (1)..(1809)
atggcggccgccgccaccgccgcggccgcggccacctccaccttcaccgccgccgtgccgcgcgcgcgcgggcgcaggcatccaacgcgcgtggcggcggcggcggcggcgacggcgtcgtcaccggaggcggcgatggcggcggcggcgccgccgttgccgatgatgcgggtggcgcccgagacgctgcagcggcagagcgggtacctcgtgcggggccgcggggaggaggggattggggagggggaggcggaggcggtgggaggggacgcggcgggagggctcggcgcgatggagtacctgaccagcgtgctctcgtccaaggtgtacgacgtcgccatcgagtcgccgctccagctcgccaccaagctctccgagcgcctcggcgtcaacttgtggatcaagcgcgaggacctgcagcccgtattctcattcaagttgagaggagcatacaatatgatggcaaagctctcgcgtgaacagttggagaggggtgtcatctgctcctctgctgggaaccatgcccagggagtggccctttccgctcaaagactcggttgcgatgctgttattgtcatgcctgtgacaacgcctgaaatcaagtggcgatcggtggagagattgggtgcaacagttgtactcaaaggggactcatatgatgaagctcaatcatatgcaaaacaaagatgcgagcaggaaggccgcacattcatacctccttttgaccatcctgatgttataagtggacaaggaacgattggcatggaaattgttcggcagttgcaaggcccacttcatgccatatttgtacctgtaggaggaggtggattaattgctgggatcgctgcctatgtaaaaagggttcgcccagaggtgaaaataattggagtggagccatcagatgcaaatgcaatggcattgtccttgtgtcatggtcaaagggtcatgctggagcaagttggtgggtttgctgatggtgtggctgtcaaagttgtaggggaggaaacatttcgcttgtgccgggaacttgtagatggtattgttcttgtcagtcgagatgctatttgtgcttcaataaaggatatgtttgaggagaaaagaagcatacttgaacctgctggtgcccttgcgctggcaggagctgaagcttactgcaaatactatggcttgaaaggggaaaatgttgttgcaataactagtggagcaaatatgaactttgatcggctcagattagtaactgagctggctgatgttggtcgaaaacgagaagcagttcttgccacatttttgccagaggagcagggaagcttcaaaaagtttgcagagctggttggccggatgaatattactgaattcaaatacagatacgattgcaatgcaaaagatgcccttgtcctttacagtgttggcatctacactgacgatgaacttaaagcaatggtggaacgtatggaatcttcaaaattgagaactgttgatcttactgacaatgatttggcaaaggatcatctaagatactttattggtggcaggtcagaagtaacagatgaacttgtttaccggttcattttcccagaaaggcctggtgcacttatgaaatttttggatgcattcagcccccgctggaatatcagccttttccattaccgtgcacagggtgaaaccggagcgaatgttttggttggcatacaagtgccgccggaggagtttgacgaattcaagagccgtgctgacaatcttgggtacgagtacatgtcggagcagaacaacgagatataccggctcctcttgcgcgatccgaagatctaa

SEQ ID NO: 31782 - protein, 602 aa, Oryza sativa
MAAAATAAAAATSTFTAAVPRARGRRHPTRVAAAAAATASSPEAAMAAAAPPLPMMRVAPETLQRQSGYLVRGRGEEGIGEGEAEAVGGDAAGGLGAMEYLTSVLSSKVYDVAIESPLQLATKLSERLGVNLWIKREDLQPVFSFKLRGAYNMMAKLSREQLERGVICSSAGNHAQGVALSAQRLGCDAVIVMPVTTPEIKWRSVERLGATVVLKGDSYDEAQSYAKQRCEQEGRTFIPPFDHPDVISGQGTIGMEIVRQLQGPLHAIFVPVGGGGLIAGIAAYVKRVRPEVKIIGVEPSDANAMALSLCHGQRVMLEQVGGFADGVAVKVVGEETFRLCRELVDGIVLVSRDAICASIKDMFEEKRSILEPAGALALAGAEAYCKYYGLKGENVVAITSGANMNFDRLRLVTELADVGRKREAVLATFLPEEQGSFKKFAELVGRMNITEFKYRYDCNAKDALVLYSVGIYTDDELKAMVERMESSKLRTVDLTDNDLAKDHLRYFIGGRSEVTDELVYRFIFPERPGALMKFLDAFSPRWNISLFHYRAQGETGANVLVGIQVPPEEFDEFKSRADNLGYEYMSEQNNEIYRLLLRDPKI

SEQ ID NO: 31783 - DNA, 942 bp, Mus musculus
  CDS (1)..(942)
atggctgcccaggagtccctgcatgtgaagaccccacttcgtgacagcatggcgttgtccaaattggccggcaccagcgtgttcctaaaaatggacagctcccagccctcaggctccttcaagatccgaggcattgggcatctctgcaagatgaaagcaaaacaaggctgtagacattttgtctgttcttcagctggcaacgcgggcatggcgaccgcctacgctgccaggaggctgggcatcccagccactatcgttgtgcccaacaccacacctgccctcaccattgagcggctcaagaatgaaggcgccacagttgaagtggtgggagagatgctggatgaggccatccaagtggccaaggctctggaaaagaacaacccgggttgggtgtacatttccccctttgatgaccctctcatctgggaaggccacacttcccttgtgaaagagctgaaggagacgctgagcgccaagcccggggctatcgtgctgtctgtgggcggtggaggcctgctgtgcggagtggtccaggggctgcgggaggtgggctgggaggatgtgcccatcatcgccatggagacctttggcgcccacagcttccatgctgccatcaaggaaggaaagctggtcaccctgcccaagatcaccagtgtcgccaaggccttgggcgtgaacactgtcggggcgcagaccctgaagctgttttacgaacaccccattttctccgaggtcatctcagaccaggaggctgtgtctgctcttgagaagttcgtggacgatgagaagattctggtggagcccgcgtgcggcgcggcgctggctgctgtgtacagccgcgtggtgtgcaggctgcaggatgaaggccggctgcaaaccccactggcctcgctggttgtcatcgtgtgtggcggcagcaacacaagcctggcgcagctctag

SEQ ID NO: 31784 - protein, 313 aa, Mus musculus
MAAQESLHVKTPLRDSMALSKLAGTSVFLKMDSSQPSGSFKIRGIGHLCKMKAKQGCRHFVCSSAGNAGMATAYAARRLGIPATIVVPNTTPALTIERLKNEGATVEVVGEMLDEAIQVAKALEKNNPGWVYISPFDDPLIWEGHTSLVKELKETLSAKPGAIVLSVGGGGLLCGVVQGLREVGWEDVPIIAMETFGAHSFHAAIKEGKLVTLPKITSVAKALGVNTVGAQTLKLFYEHPIFSEVISDQEAVSALEKFVDDEKILVEPACGAALAAVYSRVVCRLQDEGRLQTPLASLVVIVCGGSNTSLAQL

SEQ ID NO: 31785 - DNA, 1806 bp, Nicotiana attenuata
  CDS (1)..(1806)
atggaagttctttgtcaagccccagctggaaactcaaattttgcctgtaaccccaaatttacagcaattagaaccagagcaatttctagcaatgacacatttaaagtaatttccagtactggcaacaacaagaaaatgaagggcgcgatacgtacttcgattccaaaaccatcagcattgccattgaaggtctcacaattatctccatcagctgattcaatgcctgttccagcgtctttgcaggacgtcgaggcggggaagttgatagagaataatccatcagggggcgatacagaggaattgtttcagtatcttgttgaaatattggcttctagagtgtatgatgtagcaattgattcccccttgcaaaatgcagctaagctttccaagaagcttggagttaacttttggatcaaaagagaggatatgcagtccgtgttctcgttcaagcttagaggagcttataacatgatgaccaaactctcaaaggagcagttagaaagaggggttataactgcttcagctggaaatcatgcacaaggtgttgcattaggtgctcagagacttaaatgtactgctacgattgtcatgcctgttaccacaccagagatcaagattgaagcagttaagaacttggatggtaaagtagttctacatggtgacacatttgataaagctcaggaacatgctttaaagttggctgaagatgaaggtctcacattcatcccgcctttcgatcacccagatgtgatcataggccaaggtacaattggaacggagattaatcgtcaacttaaagatatacatgcagtatttgtgcctgtaggaggaggaggtttaatagctggtgttgctgcatatttcaaaagggttgctcctcatacaaagattattggagttgagccatttggtgcaagttcaatgacacaatctttgtaccatggagaaagagtaaagttggaacaagttgataattttgcagatggcgtagctgttgcactagttggtgaagaaactttccgtctttgcaaagatttaatagacggaatggtcttagtcagtaacgatgctattagtgctgcagtaaaggatgtgtacgacgaaggacggaacatattagagacatcaggtgcacttgccatagctggagctgaagcttactgcaaatactataacataaagggcgaaaacgttgtagcaattgctagtggagccaatatggacttcagcaaactaaaattagtcgtcgatttagcagatattggtggacagagggaagctctgctggctacttttatgccagaagaaccaggaagcttcaaaaaattctgcgaacttgtgggacctatgaatattactgaatttaagtacagatataattctggaagaaaacaagctctggtactctacagtgttggtgttaatacaaaatcggatcttgagtcaatgttggagaggatgaaatcatcacagctgaatactgtcaatctcacaaataataatttggtcaaagaacatctaaggcatttgatgggaggcagatcagaaccaagtaatgagattttctgtcaattcatatttcctgagaagcctggagctttaaggaagtttttagatgctttcagccctcgttggaatataagtttgttccattatcgtgaacagggagaacttgatgcaagtgtgttagttggattccaagttccaaaaggtgagatagaagagttccgagttcaagctaacaatcttggttattcatatgaaatcgagagtctcaacgaggcttctcaacttataatggagtga

SEQ ID NO: 31786 - protein, 601 aa, Nicotiana attenuata
MEVLCQAPAGNSNFACNPKFTAIRTRAISSNDTFKVISSTGNNKKMKGAIRTSIPKPSALPLKVSQLSPSADSMPVPASLQDVEAGKLIENNPSGGDTEELFQYLVEILASRVYDVAIDSPLQNAAKLSKKLGVNFWIKREDMQSVFSFKLRGAYNMMTKLSKEQLERGVITASAGNHAQGVALGAQRLKCTATIVMPVTTPEIKIEAVKNLDGKVVLHGDTFDKAQEHALKLAEDEGLTFIPPFDHPDVIIGQGTIGTEINRQLKDIHAVFVPVGGGGLIAGVAAYFKRVAPHTKIIGVEPFGASSMTQSLYHGERVKLEQVDNFADGVAVALVGEETFRLCKDLIDGMVLVSNDAISAAVKDVYDEGRNILETSGALAIAGAEAYCKYYNIKGENVVAIASGANMDFSKLKLVVDLADIGGQREALLATFMPEEPGSFKKFCELVGPMNITEFKYRYNSGRKQALVLYSVGVNTKSDLESMLERMKSSQLNTVNLTNNNLVKEHLRHLMGGRSEPSNEIFCQFIFPEKPGALRKFLDAFSPRWNISLFHYREQGELDASVLVGFQVPKGEIEEFRVQANNLGYSYEIESLNEASQLIME

SEQ ID NO: 31787 - DNA, 1542 bp, Gamma
  misc_feature (1488)..(1488): n is a, c, g, or t
  CDS (1)..(1542): transl_table=11
ttgagactaaaaattaaaaaaacaggttcttttaagaattcccagaagtacctaaagcttattcctaatgcatctgtttatgacgtagcattaaaatcacctataacatttgctctaaatatttcttcaaagctggggaataaagttttcctaaaaagagaggatctgcaacctatattttcttttaaaaacagaggagcgtataacaagattgtaaatttatccgatgccgaaaagaagaggggggttattgctgcatcagcaggaaatcatgctcaaggggtagccagtgcatgtaagaaattaaaaattaattgcttgatagttatgccaataacaactccagaaataaaaataaaagatgtaaaaagatttggagccaaaatactccaacatggggacaacgtagatgcagcattaaaagaggcactgtttattgcaaagaaaaaaaaattgtcttttgttcatccttttgacgaccctctaacaattgctggccaagggactataggacaagaaattcttgaagataaaaataattttgatgttgtctttgttccggtgggaggaggaggtattctagctggtgtatctgcctggatagcacagaataataagaaaataaaaattgttggtgttgaggttgaggattccgcttgtcttgctgaggccgtaaaagctaataaaagagttattttaaaagaagtgggcctctttgctgatggggtggcagtatcaagggttggaaaaaataattttgatgttattaaagagtgcgtagatgaagtcattacagttagcgttgatgaggtctgcaccgctgtaaaagatatctttgaagatacaagggttctatcagaacctgctggggcattagcacttgcagggttaaaagcctacgcaaggaaagttaaaaataaaaaacttattgctataagttctggcgctaatgtaaatttccaaagacttaattttattgttgagcgatcagagattggtgaaaatagagaaaaaatattaagtatcaaaatcccagagatacctggaagttttcttaagctttcaaggatgtttggcagctctcaagttacagagtttaactacaggaaatctagcttaagcgatgcatatgttttagttggtgttagaactaaaactgaaaaatcatttgaaatcttaaagtccaaattaaaaaaagcaggcttcacctttagcgactttactcgaaatgaaatatccaatgatcatctgaggcatatggttggtggcagaaatagtgactcaggctctcataacaatgaaagaatatttaggggagagtttcctgagaagccgggcgcgctgttaaattttctagagaaatttggaaataaatggmatatttccttatttcattacaggaacctaggttcagcttttggaaagatattaattggcatcgagagtaaggataaagacaagctaataaatcatttaaataagtcaggnactatttttacagaagaaacctctaacaaggcatacaaagattttttaaaatga

SEQ ID NO: 31788 - protein, 513 aa, Gamma
  misc_feature (460)..(460): Xaa can be any naturally occuring amino acid
MRLKIKKTGSFKNSQKYLKLIPNASVYDVALKSPITFALNISSKLGNKVFLKREDLQPIFSFKNRGAYNKIVNLSDAEKKRGVIAASAGNHAQGVASACKKLKINCLIVMPITTPEIKIKDVKRFGAKILQHGDNVDAALKEALFIAKKKKLSFVHPFDDPLTIAGQGTIGQEILEDKNNFDVVFVPVGGGGILAGVSAWIAQNNKKIKIVGVEVEDSACLAEAVKANKRVILKEVGLFADGVAVSRVGKNNFDVIKECVDEVITVSVDEVCTAVKDIFEDTRVLSEPAGALALAGLKAYARKVKNKKLIAISSGANVNFQRLNFIVERSEIGENREKILSIKIPEIPGSFLKLSRMFGSSQVTEFNYRKSSLSDAYVLVGVRTKTEKSFEILKSKLKKAGFTFSDFTRNEISNDHLRHMVGGRNSDSGSHNNERIFRGEFPEKPGALLNFLEKFGNKWXISLFHYRNLGSAFGKILIGIESKDKDKLINHLNKSGTIFTEETSNKAYKDFLK

SEQ ID NO: 31789 - DNA, 1113 bp, Bacillus halodurans
  CDS (1)..(1113): transl_table=11
atgcaagtggttcgctcgttcaaaatccgcggcgcgttccatcaaatttccagcattccgaaagaggaattaaacaacggggtcgtctgtgccagtgcaggaaatcacgcacaaggtgttgcgtattcctgtcacacgttgcaaattccggggaaaatttttatgccgacgacgacgccacggcaaaaagtagaccaagtcaaattcttcggtaaggaatatgtggaggtcatattaacaggggaaacgttcgatgattcttttaacgaagcgaaagagtacggaataaagcataaaatgacctttatccatccattcgatcaagaaaagattgttgcaggtcaaggaaccgttgggatggaaatcatgaacgatattgacgacaacattgattacttgttctgttcgattggtggaggcggccttattagtggtgttggaacatacattaaaagcattagcccgcggacgaaagtgatcggatgtgaaccggctggagcgccagccatgaaggaatcacttaagcaagggaaggttatcgagcttgaaaaaatcgacaaatttgtcgacggcgcagccgtaaaaaaggtcggagaaattccttttgaaatttgccaaaaaattctggaagatattgttctagtacctgagggaaaaatatgtacaaccatccttaacctctacaatcaagatgcgatcgtagcggagcctgcaggggcgatgccgattgctgcactcgacttttttaaagacgagatcaaaggaaagacagtcgtctgtgtgttaagtggtggaaacaacgatattggccggatgcaggaaatgagggaacgctcattgatctatgaaggattacagcattactttatcatccaatttccgcaacgagctggggcattgaaagaattcattcttgatgttctcggtccagatgatgacatcactcggtttgaatatacaaagaaaaacaataaatcaaatggccccgtattaatagggattgagctgaaatgtgatgaggactatcatcgtttaatggatcgtctcaacaaaaaaggttttgaatatcgtgaaattaataaaaatgagagtttgtttaacctgttaatttga

SEQ ID NO: 31790 - protein, 370 aa, Bacillus halodurans
MQVVRSFKIRGAFHQISSIPKEELNNGVVCASAGNHAQGVAYSCHTLQIPGKIFMPTTTPRQKVDQVKFFGKEYVEVILTGETFDDSFNEAKEYGIKHKMTFIHPFDQEKIVAGQGTVGMEIMNDIDDNIDYLFCSIGGGGLISGVGTYIKSISPRTKVIGCEPAGAPAMKESLKQGKVIELEKIDKFVDGAAVKKVGEIPFEICQKILEDIVLVPEGKICTTILNLYNQDAIVAEPAGAMPIAALDFFKDEIKGKTVVCVLSGGNNDIGRMQEMRERSLIYEGLQHYFIIQFPQRAGALKEFILDVLGPDDDITRFEYTKKNNKSNGPVLIGIELKCDEDYHRLMDRLNKKGFEYREINKNESLFNLLI

SEQ ID NO: 31791 - DNA, 1263 bp, Bacillus cereus
  CDS (1)..(1263): transl_table=11
atggtgcaaaaggtaaaggagagagtgaaaattgaagatatcttaatggctcataattgcatgaaagatatcgttattaaaacaccgttacaacgtgatacagttttatctgagaaatatgattgtgacgtttatgtaaaacgagaagatttacaattgattcgctctttcaaaattcgtggtgcgtacaatttaattcaaagcttaccgaaagaacaattacaaaacggtgttgtttgcgcaagcgctggtaatcacgcacaaggggtagcttttacgtgtaatttattgaagattccgtcaaaaatctttatgccaacaacgacgccgaaacaaaaagtatcgcaagtacaatttttcggtggtgatttcgcagagattgtattagttggtgatacattcgatagctcttttcaagaagcacagcgttattgtgaagaaaatagaatgacgtttgttcatccatttgatgatccgtatgtggttgctggtcaaggaacagtggcagttgaaattatgcatgatatggagaaaccagtggattatatctttacagcaattggcggcggtggattagcatcaggtgttggtacatatgtgaaaggtgttagtcctgctacaaaggttattggggtagagccaatgggagcagcatctatgaaagaggcttttcttcaaaacgataatgtcgcattggagaaaatagatagttttgttgatggagcagcagttaaaaaggtaggaaagttaacatttgaaacgtgtaaagatgtaattgatgacatcgttttagtaccagaaggaaaggtttgtacgacgattttagaactgtataagaaaaatgcgattgtagcagagcctgctggtgcactttctattgccgcacttgatctatacaaggatgaaattcaaggtaaaacagttgtatgcacattaagcggtggaaataacgatattgatagaatgcaagagatgaaagaacgttctctcatttacgaaggattaaaacattatttcatcattgaattcccgcagcgttcaggtgcgctaagagaatttcttgataaaggattaggaccagaagatgatattacgcgctttgagtatattaagaaacataataaggaaaatggtccagcgttagtcggagtagagttaaaacataaagaagattacgcgcagttaattacccgttttaaagaaaataacattcaatttatggagcttaataaaaatcctgttttgtttgatttacttatttaa

SEQ ID NO: 31792 - protein, 420 aa, Bacillus cereus
MVQKVKERVKIEDILMAHNCMKDIVIKTPLQRDTVLSEKYDCDVYVKREDLQLIRSFKIRGAYNLIQSLPKEQLQNGVVCASAGNHAQGVAFTCNLLKIPSKIFMPTTTPKQKVSQVQFFGGDFAEIVLVGDTFDSSFQEAQRYCEENRMTFVHPFDDPYVVAGQGTVAVEIMHDMEKPVDYIFTAIGGGGLASGVGTYVKGVSPATKVIGVEPMGAASMKEAFLQNDNVALEKIDSFVDGAAVKKVGKLTFETCKDVIDDIVLVPEGKVCTTILELYKKNAIVAEPAGALSIAALDLYKDEIQGKTVVCTLSGGNNDIDRMQEMKERSLIYEGLKHYFIIEFPQRSGALREFLDKGLGPEDDITRFEYIKKHNKENGPALVGVELKHKEDYAQLITRFKENNIQFMELNKNPVLFDLLI

SEQ ID NO: 31793 - DNA, 987 bp, Homo sapiens
  CDS (1)..(987)
atgatgtctggagaacccctgcacgtgaagacccccatccgtgacagcatggccctgtccaaaatggccggcaccagcgtctacctcaagatggacagtgcccagccctccggctccttcaagatccggggcattgggcacttctgcaagaggtgggccaagcaaggctgtgcacattttgtctgctcctcggcgggcaacgcaggcatggcggctgcatatgcggccaggcaactcggcgtccccgccaccatcgtagtgcccggcaccacacctgctctcaccattgagcgcctcaagaatgaaggtgccacatgcaaggtggtgggtgagttattggatgaagccttcgagctggccaaggccctagcgaagaacaacccgggttgggtctacattcccccctttgatgaccccctcatctgggaaggccacgcttccatcgtgaaagagctgaaggagacactgtgggaaaagccgggggccatcgcgctgtcagtgggcggcgggggcctgctgtgtggagtggtccaggggctgcaggagtgtggctggggggacgtgcctgtcatcgccatggagacttttggtgcccacagcttccacgctgccaccaccgcaggcaaacttgtctccctgcccaagatcaccagtgttgccaaggccctgggcgtgaagactgtggggtctcaggccctgaagctgtttcaggaacaccccattttctctgaagttatctcggaccaggaggctgtggccgccattgagaagttcgtggatgatgagaagatcctggtggagcccgcctggggcgcagccctggccgctgtctatagccacgtgatccagaagctccaactggaggggaatctccgaaccccgctgccatccctcgtggtcatcgtctgcgggggcagcaacatcagcctggcccagctgcgggcgctcaaggaacagctgggcatgacaaataggttgcccaagtga

SEQ ID NO: 31794 - protein, 328 aa, Homo sapiens
MMSGEPLHVKTPIRDSMALSKMAGTSVYLKMDSAQPSGSFKIRGIGHFCKRWAKQGCAHFVCSSAGNAGMAAAYAARQLGVPATIVVPGTTPALTIERLKNEGATCKVVGELLDEAFELAKALAKNNPGWVYIPPFDDPLIWEGHASIVKELKETLWEKPGAIALSVGGGGLLCGVVQGLQECGWGDVPVIAMETFGAHSFHAATTAGKLVSLPKITSVAKALGVKTVGSQALKLFQEHPIFSEVISDQEAVAAIEKFVDDEKILVEPAWGAALAAVYSHVIQKLQLEGNLRTPLPSLVVIVCGGSNISLAQLRALKEQLGMTNRLPK

SEQ ID NO: 31795 - DNA, 984 bp, Mus musculus
  CDS (1)..(984)
atggctgcccaggagtccctgcatgtgaagaccccacttcgtgacagcatggcgttgtccaaattggccggcaccagcgtgttcctaaaaatggacagctcccagccctcaggctccttcaagatccgaggcattgggcatctctgcaagatgaaagcaaaacaaggctgtagacattttgtctgttcttcagctggcaacgcgggcatggcgaccgcctacgctgccaggaggctgggcatcccagccactatcgttgtgcccaacaccacacctgccctcaccattgagcggctcaagaatgaaggcgccacagttgaagtggtgggagagatgctggatgaggccatccaagtggccaaggctctggaaaagaacaacccgggttgggtgtacatttccccctttgatgaccctctcatctgggaaggccacacttcccttgtgaaagagctgaaggagacgctgagcgccaagcccggggctatcgtgctgtctgtgggcggtggaggcctgctgtgcggagtggtccaggggctgcgggaggtgggctgggaggatgtgcccatcatcgccatggagacctttggcgcccacagcttccatgctgccatcaaggaaggaaagctggtcaccctgcccaagatcaccagtgtcgccaaggccttgggcgtgaacactgtcggggcgcagaccctgaagctgttttacgaacaccccattttctccgaggtcatctcagaccaggaggctgtgtctgctcttgagaagttcgtggacgatgagaagattctggtggagcccgcgtgcggcgcggcgctggctgctgtgtacagccgcgtggtgtgcaggctgcaggatgaaggccggctgcaaaccccactggcctcgctggttgtcatcgtgtgtggcggcagcaacataagcctggcgcagctgcaggcactcaaggtgcagctgggcctgaacgggctgcccgagtga

SEQ ID NO: 31796 - protein, 327 aa, Mus musculus
MAAQESLHVKTPLRDSMALSKLAGTSVFLKMDSSQPSGSFKIRGIGHLCKMKAKQGCRHFVCSSAGNAGMATAYAARRLGIPATIVVPNTTPALTIERLKNEGATVEVVGEMLDEAIQVAKALEKNNPGWVYISPFDDPLIWEGHTSLVKELKETLSAKPGAIVLSVGGGGLLCGVVQGLREVGWEDVPIIAMETFGAHSFHAAIKEGKLVTLPKITSVAKALGVNTVGAQTLKLFYEHPIFSEVISDQEAVSALEKFVDDEKILVEPACGAALAAVYSRVVCRLQDEGRLQTPLASLVVIVCGGSNISLAQLQALKVQLGLNGLPE

SEQ ID NO: 31797 - DNA, 1023 bp, Homo sapiens
  CDS (1)..(1023)
atgtgtgctcagtattgcatctcctttgctgatgttgaaaaagctcatatcaacattcgagattctatccacctcacaccagtgctaacaagctccattttgaatcaactaacagggcgcaatcttttcttcaaatgtgaactcttccagaaaacaggatcttttaagattcgtggtgctctcaatgccgtcagaagcttggttcctgatgctttagaaaggaagccgaaagctgttgttactcacagcagtggaaaccatggccaggctctcacctatgctgccaaattggaaggaattcctgcttatattgtggtgccccagacagctccagactgtaaaaaacttgcaatacaagcctacggagcgtcaattgtatactgtgaacctagtgatgagtccagagaaaatgttgcaaaaagagttacagaagaaacagaaggcatcatggtacatcccaaccaggagcctgcagtgatagctggacaagggacaattgccctggaagtgctgaaccaggttcctttggtggatgcactggtggtacctgtaggtggaggaggaatgcttgctggaatagcaattacagttaaggctctgaaacctagtgtgaaggtatatgctgctgaaccctcaaatgcagatgactgctaccagtccaagctgaaggggaaactgatgcccaatctttatcctccagaaaccatagcagatggtgtcaaatccagcattggcttgaacacctggcctattatcagggaccttgtggatgatatcttcactgtcacagaggatgaaattaagtgtgcaacccagctggtgtgggagaggatgaaactactcattgaacctacagctggtgttggagtggctgctgtgctgtctcaacattttcaaactgtttccccagaagtaaagaacatttgtattgtgctcagtggtggaaatgtagacttaacctcctccataacttgggtgaagcaggctgaaaggccagcttcttatcagtctgtttctgtttaa

SEQ ID NO: 31798 - protein, 340 aa, Homo sapiens
MCAQYCISFADVEKAHINIRDSIHLTPVLTSSILNQLTGRNLFFKCELFQKTGSFKIRGALNAVRSLVPDALERKPKAVVTHSSGNHGQALTYAAKLEGIPAYIVVPQTAPDCKKLAIQAYGASIVYCEPSDESRENVAKRVTEETEGIMVHPNQEPAVIAGQGTIALEVLNQVPLVDALVVPVGGGGMLAGIAITVKALKPSVKVYAAEPSNADDCYQSKLKGKLMPNLYPPETIADGVKSSIGLNTWPIIRDLVDDIFTVTEDEIKCATQLVWERMKLLIEPTAGVGVAAVLSQHFQTVSPEVKNICIVLSGGNVDLTSSITWVKQAERPASYQSVSV

SEQ ID NO: 31799 - DNA, 1020 bp, Mus musculus
  CDS (1)..(1020)
atgtgtgctcagtactgcatctcctttgctgatgttgaaaaagctcatatcaacattcaagactctatccacctcaccccagtgctaacaagctccattttgaatcaaatagcagggcgcaatcttttcttcaaatgtgagctcttccagaaaactgggtcttttaagattcgaggtgcccttaatgccatcagaggcttaattcctgacacgccagaagagaagcccaaagccgtagttactcacagcagcggaaaccatggccaagctctcacctatgctgctaaactggaaggaattcctgcttacattgtggttccccaaacagctcccaactgcaagaaactggcaatccaagcctatggagcatcgatagtatactgtgacccaagtgacgagtccagagaaaaggtcactcaaagaattatgcaagaaacagaaggcatcttggtccatcccaaccaggagcctgcagtgatagctggacaaggaacaattgccctggaagtgctgaaccaggttcccttggtagatgcactggtggtaccagtaggaggaggaggaatggttgctggaatagccattacaattaaggccctgaaacctagtgtgaaggtatacgctgctgagccctcgaatgcagatgactgctaccagtctaaactgaaaggagaactgacccccaatcttcatcctccagaaaccatagcagatggtgtcaaatccagcattggcttgaatacctggcctattataagagaccttgtggatgatgtcttcactgtcaccgaagatgaaatcaagtatgcaacccagctggtgtgggggagaatgaaactgctcattgagccgactgctggcgtggcactggctgcagtgctgtctcagcatttccaaacagtctctccagaagtaaagaacgtctgcattgtactcagtggggggaatgtagacctaacctccctgaactgggtggggcaggctgaacggccagctccttaccagacggtttctgtttaa

SEQ ID NO: 31800 - protein, 339 aa, Mus musculus
MCAQYCISFADVEKAHINIQDSIHLTPVLTSSILNQIAGRNLFFKCELFQKTGSFKIRGALNAIRGLIPDTPEEKPKAVVTHSSGNHGQALTYAAKLEGIPAYIVVPQTAPNCKKLAIQAYGASIVYCDPSDESREKVTQRIMQETEGILVHPNQEPAVIAGQGTIALEVLNQVPLVDALVVPVGGGGMVAGIAITIKALKPSVKVYAAEPSNADDCYQSKLKGELTPNLHPPETIADGVKSSIGLNTWPIIRDLVDDVFTVTEDEIKYATQLVWGRMKLLIEPTAGVALAAVLSQHFQTVSPEVKNVCIVLSGGNVDLTSLNWVGQAERPAPYQTVSV

SEQ ID NO: 31801 - DNA, 1083 bp, Saccharomyces cerevisiae
  CDS (1)..(1083)
atgtcgatagtctacaataaaacaccattattacgtcaattcttccccggaaaggcttctgcacaatttttcttgaaatatgaatgccttcaaccaagtggctccttcaaaagtagaggaatcggtaatctcatcatgaaaagtgccattcgaattcaaaaggacggtaaaagatctcctcaggttttcgctagttctggcggtaatgccggttttgctgctgcaacagcatgtcaaagactgtctctaccatgtacagtcgtggttcctacagcgacaaagaagagaatggtagataaaatcaggaacaccggtgcccaggttatcgtgagtggtgcctactggaaagaagcagatacttttttaaaaacaaatgtcatgaataaaatagactctcaggtcattgagcccatttatgttcatcccttcgataatccggatatttgggaaggacattcatctatgatagatgaaatagtacaagatttgaaatcgcaacatatttccgtgaataaggttaaaggcatagtatgcagcgttggtggaggtggtttatacaatggtattattcaaggtttggaaaggtatggtttagctgataggatccctattgtgggggtggaaacgaatggatgtcatgttttcaatacttctttgaaaataggccaaccagttcaattcaagaagataacaagtattgctacttctctaggaacggccgtgatctctaatcaaactttcgaatacgctcgcaaatacaacaccagatccgttgtaatagaggacaaagatgttattgaaacctgtcttaaatatacacatcaattcaatatggtgattgaaccggcatgtggcgccgcattgcatttgggttacaacactaagatcctagaaaatgcactgggctcaaaattagctgcggatgacattgtgataattattgcttgtggcggctcctctaatactataaaggacttggaagaagcgttggatagcatgagaaaaaaagacactcctgtaatagaagtcgctgacaatttcatatttccagaaaaaaatattgtgaatttaaaaagtgcttga

SEQ ID NO: 31802 - protein, 360 aa, Saccharomyces cerevisiae
MSIVYNKTPLLRQFFPGKASAQFFLKYECLQPSGSFKSRGIGNLIMKSAIRIQKDGKRSPQVFASSGGNAGFAAATACQRLSLPCTVVVPTATKKRMVDKIRNTGAQVIVSGAYWKEADTFLKTNVMNKIDSQVIEPIYVHPFDNPDIWEGHSSMIDEIVQDLKSQHISVNKVKGIVCSVGGGGLYNGIIQGLERYGLADRIPIVGVETNGCHVFNTSLKIGQPVQFKKITSIATSLGTAVISNQTFEYARKYNTRSVVIEDKDVIETCLKYTHQFNMVIEPACGAALHLGYNTKILENALGSKLAADDIVIIIACGGSSNTIKDLEEALDSMRKKDTPVIEVADNFIFPEKNIVNLKSA

SEQ ID NO: 31803 - DNA, 1269 bp, Bacillus subtilis
  CDS (1)..(1269): transl_table=11
atgaaaccgttgcttaaagaaaactctctcatccaagtgaaacacattttgaaggctcaccaaaacgtaaaggacgttgtcattcacacacctttgcagaggaatgacagactttctgagagatatgaatgcaatatctatttaaaacgcgaagacttgcaagttgtcagatcttttaagctcagaggggcttatcataaaatgaaacagctttccagcgagcagacagagaacggagttgtgtgtgcaagtgccggaaaccacgctcaaggtgtggcattttcgtgtaaacatcttggcattcacgggaaaatttttatgccgtctactacaccgagacaaaaagtatctcaagttgaactattcggaaaaggatttatcgatattattttgacaggcgatacgtttgacgacgtgtataaaagcgctgctgaatgctgtgaggcggaatctcggacgtttatccatccgttcgatgatccggatgtgatggccggacagggaacgctcgcagtcgagattttaaacgacattgatacagaaccgcattttctttttgcaagtgtcggaggcggcggccttctctctggggtaggtacatatttgaaaaacgtgtctcctgatacaaaggtaattgctgttgagccggcgggagcggcatcctactttgaatcaaacaaagctgggcatgtcgtcacacttgataaaattgataagtttgtagatggggcggctgttaaaaaaattggcgaggaaaccttccggacgctggaaactgtcgttgatgacattctccttgtgcctgaaggaaaagtatgtacatccattcttgaattatataacgaatgtgcggttgttgctgaaccggctggagctctttctgtcgcagcgcttgatttgtacaaggatcaaattaaagggaaaaacgtggtgtgtgtggtaagcgggggcaataacgatatcggaagaatgcaggaaatgaaggagcgttccttgatttttgaaggccttcagcattattttatcgtcaattttccacaaagagcgggggcgctccgcgaatttcttgacgaagtcctcgggccgaatgatgacattacaaggtttgaatatacgaagaaaaataataaaagcaatggacctgctcttgtcggcatcgagctgcagaacaaagccgattatgggccgctgattgaacggatgaacaaaaaaccgtttcattatgtagaggtgaacaaggatgaggacttgttccatttgctaatctaa

SEQ ID NO: 31804 - protein, 422 aa, Bacillus subtilis
MKPLLKENSLIQVKHILKAHQNVKDVVIHTPLQRNDRLSERYECNIYLKREDLQVVRSFKLRGAYHKMKQLSSEQTENGVVCASAGNHAQGVAFSCKHLGIHGKIFMPSTTPRQKVSQVELFGKGFIDIILTGDTFDDVYKSAAECCEAESRTFIHPFDDPDVMAGQGTLAVEILNDIDTEPHFLFASVGGGGLLSGVGTYLKNVSPDTKVIAVEPAGAASYFESNKAGHVVTLDKIDKFVDGAAVKKIGEETFRTLETVVDDILLVPEGKVCTSILELYNECAVVAEPAGALSVAALDLYKDQIKGKNVVCVVSGGNNDIGRMQEMKERSLIFEGLQHYFIVNFPQRAGALREFLDEVLGPNDDITRFEYTKKNNKSNGPALVGIELQNKADYGPLIERMNKKPFHYVEVNKDEDLFHLLI

SEQ ID NO: 31805 - DNA, 1773 bp, Cicer arietinum
  CDS (1)..(1773)
atgctctcgacctccacgaccaattcttccattctgcccttccggtctagggcaagtagttctacttttatcgcgcgccccccagccaacttcaactccatctttacgacttcggtgagggtcttcccaatcagtatgtcacgatattgcgtttttccacatacttgggagcgagatcataacgttcctggagttcctggagttttacgaaaagtggttccagcagcacctattaagaacaaaccaacttgtgcagattcagatgagttacctgagtacttaagagacgtactacgctcacctgtttacgacgtagttgtcgagtcacctgtcgagctaactgagagattatcagatcgcttaggtgttaacttttacgttaaaagagaggatcgccaacgcgttttttcatttaaattacgcggtccatacaatatgatgtcatcattatcacatgaggaaattgataaaggtgttatcaccgcatcagcaggaaaccatgcacaaggagtcccatttccatttccaggaagacgcctaaaatgtgtcgcaaaaattgtcatgccaactactactccaaacattaaacttgatggtgtccgcgcactaggagcagatgttgtattatggggtcatacttttgatgaggcaaaaacccatgctgtcgagttatgtgagaaggatggattaagaactattcctccatttgaggatccagcagtaattaaaggacaaggtactattggaagtgagattaacagacaaattaaacgcattgacgcagtttttgtacctgttggtggaggtggtttaattgctggcgttgcagcatttttcaaacaaattgctccacaaactaaaattattgtagttgagccatatgatgcagcatcaatggcattatcagttcatgcagagcacagagcaaaattatcaaatgtcgatacttttgcagacggtgcaactgtcgccgtaattggtgagtatacttttgcaagatgccaagacgttgttgatgcaatggttctagttgcaaacgatggaattggtgcagcaataaaggatgtttttgatgagggtcgaaacatagttgagacttcaggtgcagcgggcattgcaggaatgtattgtgagatgtacagaataaagaatgacaacatggtgggaattgtaagcggagctaacatgaacttcagaaaactccataaggtttcagaattagcagtgttgggttcaggacacgaggcattattgggtacttatatgccaggtcaaaaaggatgttttaaaactatggcaggtttagttcatggatcactctcatttactgagattacttacagatttacttcacatcgcagatcgatactggtactaatgcttaagctcgagccatggcggtatattgagaaaatgattgaaatgatgaaatatagtggtgttactgttttaaacatttcacataacgagttagcagttattcatggtaaacatttagtcggaggatcagcaaaagtctcagatgaggtctttgtagagtttataattccagagaaagcagatctaaaaaaatttctagaggtattatcacctcattggaaccttactttatacaggtaccgcaaccaaggagacttaaaagcaacgattttaatggtcatagctagtttcctgtgtgaaattgttatccgtaaaaaccaaattgatgatttaggatacccatatgaaattgatcaatacaacgacgcatttaacttagcggtaacagagtaa

SEQ ID NO: 31806 - protein, 590 aa, Cicer arietinum
MLSTSTTNSSILPFRSRASSSTFIARPPANFNSIFTTSVRVFPISMSRYCVFPHTWERDHNVPGVPGVLRKVVPAAPIKNKPTCADSDELPEYLRDVLRSPVYDVVVESPVELTERLSDRLGVNFYVKREDRQRVFSFKLRGPYNMMSSLSHEEIDKGVITASAGNHAQGVPFPFPGRRLKCVAKIVMPTTTPNIKLDGVRALGADVVLWGHTFDEAKTHAVELCEKDGLRTIPPFEDPAVIKGQGTIGSEINRQIKRIDAVFVPVGGGGLIAGVAAFFKQIAPQTKIIVVEPYDAASMALSVHAEHRAKLSNVDTFADGATVAVIGEYTFARCQDVVDAMVLVANDGIGAAIKDVFDEGRNIVETSGAAGIAGMYCEMYRIKNDNMVGIVSGANMNFRKLHKVSELAVLGSGHEALLGTYMPGQKGCFKTMAGLVHGSLSFTEITYRFTSHRRSILVLMLKLEPWRYIEKMIEMMKYSGVTVLNISHNELAVIHGKHLVGGSAKVSDEVFVEFIIPEKADLKKFLEVLSPHWNLTLYRYRNQGDLKATILMVIASFLCEIVIRKNQIDDLGYPYEIDQYNDAFNLAVTE

SEQ ID NO: 31807 - DNA, 1311 bp, Corynebacterium glutamicum
  CDS (1)..(1311): transl_table=11
atgagtgaaacatacgtgtctgagaaaagtccaggagtgatggctagcggagcggagctgattcgtgccgccgacattcaaacggcgcaggcacgaatttcctccgtcattgcaccaactccattgcagtattgccctcgtctttctgaggaaaccggagcggaaatctaccttaagcgtgaggatctgcaggatgttcgttcctacaagatccgcggtgcgctgaactctggagcgcagctcacccaagagcagcgcgatgcaggtatcgttgccgcatctgcaggtaaccatgcccagggcgtggcctatgtgtgcaagtccttgggcgttcagggacgcatctatgttcctgtgcagactccaaagcaaaagcgtgaccgcatcatggttcacggcggagagtttgtctccttggtggtcactggcaataacttcgacgaagcatcggctgcagcgcatgaagatgcagagcgcaccggcgcaacgctgatcgagcctttcgatgctcgcaacaccgtcatcggtcagggcaccgtggctgctgagatcttgtcgcagctgacttccatgggcaagagtgcagatcacgtgatggttccagtcggcggtggcggacttcttgcaggtgtggtcagctacatggctgatatggcacctcgcactgcgatcgttggtatcgaaccagcgggagcagcatccatgcaggctgcattgcacaatggtggaccaatcactttggagactgttgatccctttgtggacggcgcagcagtcaaacgtgtcggagatctcaactacaccatcgtggagaagaaccagggtcgcgtgcacatgatgagcgcgaccgagggcgctgtgtgtactgagatgctcgatctttaccaaaacgaaggcatcatcgcggagcctgctggcgcgctgtctatcgctgggttgaaggaaatgtcctttgcacctggttctgtcgtggtgtgcatcatctctggtggcaacaacgatgtgctgcgttatgcggaaatcgctgagcgctccttggtgcaccgcggtttgaagcactacttcttggtgaacttcccgcaaaagcctggtcagttgcgtcacttcctggaagatatcctgggaccggatgatgacatcacgctgtttgagtacctcaagcgcaacaaccgtgagaccggtactgcgttggtgggtattcacttgagtgaagcatcaggattggattctttgctggaacgtatggaggaatcggcaattgattcccgtcgcctcgagccgggcacccctgagtacgaatacttgacctaa

SEQ ID NO: 31808 - protein, 436 aa, Corynebacterium glutamicum
MSETYVSEKSPGVMASGAELIRAADIQTAQARISSVIAPTPLQYCPRLSEETGAEIYLKREDLQDVRSYKIRGALNSGAQLTQEQRDAGIVAASAGNHAQGVAYVCKSLGVQGRIYVPVQTPKQKRDRIMVHGGEFVSLVVTGNNFDEASAAAHEDAERTGATLIEPFDARNTVIGQGTVAAEILSQLTSMGKSADHVMVPVGGGGLLAGVVSYMADMAPRTAIVGIEPAGAASMQAALHNGGPITLETVDPFVDGAAVKRVGDLNYTIVEKNQGRVHMMSATEGAVCTEMLDLYQNEGIIAEPAGALSIAGLKEMSFAPGSVVVCIISGGNNDVLRYAEIAERSLVHRGLKHYFLVNFPQKPGQLRHFLEDILGPDDDITLFEYLKRNNRETGTALVGIHLSEASGLDSLLERMEESAIDSRRLEPGTPEYEYLT

SEQ ID NO: 31809 - DNA, 1545 bp, Escherichia coli
  CDS (1)..(1545): transl_table=11
atggctgactcgcaacccctgtccggtgctccggaaggtgccgaatatttaagagcagtgctgcgcgcgccggtttacgaggcggcgcaggttacgccgctacaaaaaatggaaaaactgtcgtcgcgtcttgataacgtcattctggtgaagcgcgaagatcgccagccagtgcacagctttaagctgcgcggcgcatacgccatgatggcgggcctgacggaagaacagaaagcgcacggcgtgatcactgcttctgcgggtaaccacgcgcagggcgtcgcgttttcttctgcgcggttaggcgtgaaggccctgatcgttatgccaaccgccaccgccgacatcaaagtcgacgcggtgcgcggcttcggcggcgaagtgctgctccacggcgcgaactttgatgaagcgaaagccaaagcgatcgaactgtcacagcagcaggggttcacctgggtgccgccgttcgaccatccgatggtgattgccgggcaaggcacgctggcgctggaactgctccagcaggacgcccatctcgaccgcgtatttgtgccagtcggcggcggcggtctggctgctggcgtggcggtgctgatcaaacaactgatgccgcaaatcaaagtgatcgccgtagaagcggaagactccgcctgcctgaaagcagcgctggatgcgggtcatccggttgatctgccgcgcgtagggctatttgctgaaggcgtagcggtaaaacgcatcggtgacgaaaccttccgtttatgccaggagtatctcgacgacatcatcaccgtcgatagcgatgcgatctgtgcggcgatgaaggatttattcgaagatgtgcgcgcggtggcggaaccctctggcgcgctggcgctggcgggaatgaaaaaatatatcgccctgcacaacattcgcggcgaacggctggcgcatattctttccggtgccaacgtgaacttccacggcctgcgctacgtctcagaacgctgcgaactgggcgaacagcgtgaagcgttgttggcggtgaccattccggaagaaaaaggcagcttcctcaaattctgccaactgcttggcgggcgttcggtcaccgagttcaactaccgttttgccgatgccaaaaacgcctgcatctttgtcggtgtgcgcctgagccgcggcctcgaagagcgcaaagaaattttgcagatgctcaacgacggcggctacagcgtggttgatctctccgacgacgaaatggcgaagctacacgtgcgctatatggtcggcggacgtccatcgcatccgttgcaggaacgcctctacagcttcgaattcccggaatcaccgggcgcgctgctgcgcttcctcaacacgctgggtacgtactggaacatttctttgttccactatcgcagccatggcaccgactacgggcgcgtactggcggcgttcgaacttggcgaccatgaaccggatttcgaaacccggctgaatgagctgggctacgattgccacgacgaaaccaataacccggcgttcaggttctttttggcgggttag

SEQ ID NO: 31810 - protein, 514 aa, Escherichia coli [sequence omitted]

SEQ ID NO: 31811 - DNA, 1251 bp, Lactococcus lactis
  CDS (1)..(1251): transl_table=11
atgataagtgccaaagaggttgaagatgcctatgatttgttaaaagcagttgtcactaaaacacctttacaattagacccctacctttccaataaatatcaagcaaatatttacttaaaagaagaaaatttacagaaagttcgttcttttaaattacgaggagcttattattctatcagtaaattatctgatgagcaacgctctaaaggagtggtttgtgcctccgcaggtaatcacgcacaaggagttgcttttgctgcaaatcaattaaatatttctgcgacaattttcatgcccgttactacacctaaccaaaaaatttcacaagttaaattttttggcgaaagtcatgtaacaattcgtttaattggtgatacttttgatgaatcagccagagcagcaaaagctttttctcaagataatgacaaaccatttatagacccttttgatgatgaaaatgtaattgctggtcaagggacagtggctttagaaatttttgcgcaagctaaaaaacaaggaataagtttagataagatttttgtacagattggtggaggtggtttaattgcaggaattacggcctacagtaaggagcgctatccccaaactgaaattattggagttgaagcaaaaggggcaacaagtatgaaagctgcctactctgctggtcagcccgtcaccttggaacacattgataaatttgctgacggaattgcggttgcgactgttggtcagaaaacttaccaacttattaatgacaaagtgaaacaattgcttgcggttgatgaaggtttaatttctcaaaccatactcgaattgtattcaaaattaggaattgtcgccgaaccagcaggtgcaacatctgttgccgcacttgaacttattaaagatgaaatcaagggtaaaaatattgtctgtatcatcagcggcggaaataatgatattagtcgaatgcaagaaattgaagaaagagctttggtttatgaaggtctaaaacattattttgtcattaactttcctcaaagaccaggagccttaagaacttttgtcagtgatattttagggccaaatgatgatattacccgatttgagtacatcaaaagggctgataaaggtaaagggccttgtcttgttgggattttactttcagatgctagtgattatgattcattgattgatcggattgaaagatttgataatcgttatgttaacttacatggaaatgatagtttatacgaacttttggtctaa

SEQ ID NO: 31812 - protein, 416 aa, Lactococcus lactis
MISAKEVEDAYDLLKAVVTKTPLQLDPYLSNKYQANIYLKEENLQKVRSFKLRGAYYSISKLSDEQRSKGVVCASAGNHAQGVAFAANQLNISATIFMPVTTPNQKISQVKFFGESHVTIRLIGDTFDESARAAKAFSQDNDKPFIDPFDDENVIAGQGTVALEIFAQAKKQGISLDKIFVQIGGGGLIAGITAYSKERYPQTEIIGVEAKGATSMKAAYSAGQPVTLEHIDKFADGIAVATVGQKTYQLINDKVKQLLAVDEGLISQTILELYSKLGIVAEPAGATSVAALELIKDEIKGKNIVCIISGGNNDISRMQEIEERALVYEGLKHYFVINFPQRPGALRTFVSDILGPNDDITRFEYIKRADKGKGPCLVGILLSDASDYDSLIDRIERFDNRYVNLHGNDSLYELLV

SEQ ID NO: 31813 - DNA, 1788 bp, Lycopersicon esculentum
  CDS (1)..(1788)
atggaattcctttgtttagccccaacacgtagtttttccaccaatcccaaattaacaaaaagtattcctagcgatcatactagtaccacgagtcgtattttcacataccaaaacatgcgtggctcaacgatgagaccattagcgttgccgttaaaaatgtcaccaattgtttctgtgccggatattacagctccggtggaaaatgttccggctatcttgccaaaagtcgttcccggagagttgatagtgaataaaccaacggggggcgatagcgatgaattgtttcaatatttagttgatattttggcatcgccagtgtatgatgtagcgatcgaatcgccattagagctagcagagaagctctcggataggctcggagttaatttttatatcaaaagagaagataaacagagggtgttttcattcaagcttagaggagcttacaacatgatgagtaacctctcaagggaggaattagataaaggggttataacagcatcagctggaaatcatgcacaaggtgtagcattagctggtcaaagacttaactgtgtagctaaaattgtcatgcctacaaccaccccacaaatcaagattgatgcggttagagccctgggaggtgatgtagttctttatggtaaaacatttgatgaagctcaaacacacgcgctggaattgagtgaaaaagacgggctcaaatacatcccaccattcgatgatccaggagtcatcaaaggccaaggtacaattggaacagagataaaccgtcaactgaaggacattcacgctgtgtttatacctgttggtggtgggggtttgatagctggtgttgctacctttttcaaacaaattgccccaaatacaaaaattattggagttgagccatatggtgcagcttcaatgacattgtcattgcatgaaggacatagagtgaaattatcaaatgttgatacttttgctgacggtgtagctgttgcactagttggtgaatacacttttgcaaaatgccaagagttaattgatggaatggtacttgttgcaaatgatggtattagtgctgcaataaaggatgtgtatgatgaaggaaggaacatattagagacatcaggtgcagtggccatagctggagctgcagcctattgtgaattttataaaataaaaaatgaaaatattgtagcaattgcaagtggagctaatatggatttcagcaaactacacaaagttacagagttagcagggttaggttcaggcaaagaggctttattggctacttttatggtagaacaacaaggaagcttcaagacatttgttggacttgtgggctctttgaattttactgaattgacatacagattcacttctgaaaggaaaaatgctctaattttgtacagggttaatgttgataaagaatcagatcttgaaaaaatgattgaggatatgaaatcatcaaatatgactactcttaatctctcacataatgaattggttgtagaccatctaaaacatttggttggtggctcagcaaatatcagtgatgaaattttcggtgaatttattgtacctgagaaggctgaaactttaaaaacattcttagacgctttctcccctcgttggaatataactttatgccgttaccgtaatcagggagatataaatgcaagtttgttgatgggattccaagttcctcaagctgagatggatgagttcaaaaatcaagctgataagcttggttatccatatgaacttgataattataatgaggcttttaaccttgtagtaagtgagtga

SEQ ID NO: 31814 - protein, 595 aa, Lycopersicon esculentum
MEFLCLAPTRSFSTNPKLTKSIPSDHTSTTSRIFTYQNMRGSTMRPLALPLKMSPIVSVPDITAPVENVPAILPKVVPGELIVNKPTGGDSDELFQYLVDILASPVYDVAIESPLELAEKLSDRLGVNFYIKREDKQRVFSFKLRGAYNMMSNLSREELDKGVITASAGNHAQGVALAGQRLNCVAKIVMPTTTPQIKIDAVRALGGDVVLYGKTFDEAQTHALELSEKDGLKYIPPFDDPGVIKGQGTIGTEINRQLKDIHAVFIPVGGGGLIAGVATFFKQIAPNTKIIGVEPYGAASMTLSLHEGHRVKLSNVDTFADGVAVALVGEYTFAKCQELIDGMVLVANDGISAAIKDVYDEGRNILETSGAVAIAGAAAYCEFYKIKNENIVAIASGANMDFSKLHKVTELAGLGSGKEALLATFMVEQQGSFKTFVGLVGSLNFTELTYRFTSERKNALILYRVNVDKESDLEKMIEDMKSSNMTTLNLSHNELVVDHLKHLVGGSANISDEIFGEFIVPEKAETLKTFLDAFSPRWNITLCRYRNQGDINASLLMGFQVPQAEMDEFKNQADKLGYPYELDNYNEAFNLVVSE

SEQ ID NO: 31815 - DNA, 1290 bp, Mycobacterium bovis
  CDS (1)..(1290): transl_table=11
gtgtccgccgaactgagccagagcccgagcagctcgccgctgttttcactatctggggcagacatcgaccgtgccgccaagcggatcgcaccggtagtcacgcccaccccgttgcaacctagcgatcggttgtcggcgatcactggcgccacggtctacctcaagcgcgaagacttgcagacggtgcgctcttataagctacgcggagcgtacaacctgttggtgcagttgtccgatgaggaactggccgcgggcgtggtgtgttcttctgcgggcaaccacgcgcagggcttcgcgtatgcgtgtcgctgtctgggtgtgcacggccgggtctacgtacctgccaaaacccccaagcagaagcgtgaccggatccgctaccacggcggggagttcatcgacctgatcgtgggtgggtcgacctatgatctggctgcggcggcggcccttgaggacgtggaacgcaccggggccacgctggtaccgccgtttgacgacctgcgcaccatcgccggccagggcacgatagccgtcgaagtgcttggccagctcgaggacgagccggacctggtggtggtcccggtgggtggcggcggctgcatcgcggggatcaccacctacctggccgagcggacgaccaacaccgcggtgctgggcgtcgagccggctggtgcggccgccatgatggccgcgctcgcggcgggcgagccggtgacgctggaccatgtcgaccagttcgtcgacggcgccgcggtgaaccgggcgggcacgctgacctatgccgcgctagccgccgccggcgacatggtttcgctcaccaccgtcgacgagggtgcggtgtgcacggcgatgctcgatctgtatcagaacgagggcatcatcgccgaaccggccggtgccctgtcggtcgccggtctgttggaagccgacatcgagcccgggtccaccgtggtgtgcctgatttcgggcggcaacaacgacgtgtcccgttacggggaggtgttggagcgctcgctggtccacctgggcctcaagcactatttcctggtcgacttcccgcaggagcccggtgcgctgcgccggtttctcgacgacgtgctcggacccaacgacgacatcaccttgttcgagtacgtcaagcgcaacaaccgggagaccggtgaggcgctggtgggtatcgagctgggatcggccgcggatctagacggtctgctggcccggatgcgggcgaccgacattcacgtcgaggcgttggaaccggggtcgccggcttaccgctatctgctgtag

SEQ ID NO: 31816 - protein, 429 aa, Mycobacterium bovis
MSAELSQSPSSSPLFSLSGADIDRAAKRIAPVVTPTPLQPSDRLSAITGATVYLKREDLQTVRSYKLRGAYNLLVQLSDEELAAGVVCSSAGNHAQGFAYACRCLGVHGRVYVPAKTPKQKRDRIRYHGGEFIDLIVGGSTYDLAAAAALEDVERTGATLVPPFDDLRTIAGQGTIAVEVLGQLEDEPDLVVVPVGGGGCIAGITTYLAERTTNTAVLGVEPAGAAAMMAALAAGEPVTLDHVDQFVDGAAVNRAGTLTYAALAAAGDMVSLTTVDEGAVCTAMLDLYQNEGIIAEPAGALSVAGLLEADIEPGSTVVCLISGGNNDVSRYGEVLERSLVHLGLKHYFLVDFPQEPGALRRFLDDVLGPNDDITLFEYVKRNNRETGEALVGIELGSAADLDGLLARMRATDIHVEALEPGSPAYRYLL

SEQ ID NO: 31817 - DNA, 1284 bp, Mycobacterium leprae
  CDS (1)..(1284): transl_table=11
atgtccgccgaacctagtagaaaccccaggaccccaccggtgtccgcggttgacattgacggtgcggcgaagcggatcgcgccggtggtcacgcctaccccgttgcaacttagcgatcggttgtcggcgatcactggtgcagcggtgtacctcaagcgtgaagacctgcagacggtgcgctcttacaaactgcgcggcgcctacaacctgttggtgcagctgaccgacgaggagatcgccgccggcgttgtgtgctcttcggcgggtaaccatgcacagggtgtcgcgtatgcatgtcggtcactgggtgtgcacggccgtgtctatgtacctgccaagacacccaaacaaaagtgggatcggatccgctaccatggcggggcattcatcgagctgatcgtcgggagatcgacctacgatctcgccgctgccgcggcggtcgacgacattgaacgcaccggcgcgacgttggtacctccttatgacgacgtccgcgtcatcgctggtcagggcaccattgccgtcgagttgctggagcaactcaacaccgagcctgacctagtggtggtcccggtgggcggcggtggctgcatcgccggcatgaccacttacttggccgaacgaacggcgaacactgctgtgcttggtgtcgagccggctggtgccgcggctatgatggccgcgctggccgcgggtgagccggtgacactggactacgtcgatcagttcgtggatggcgctgcggtgaaccgggtgggaacgttgccttatgccgcgttgactgccgcaggtgacatggtgtccatcaccaccgtcgacgagggggcggtgtgcactgcgatgctcgacctttaccagaacgagggcattatagctgagccggcgggcgcactgtcagtagctgggctgctggaaactgacattgaacccgggtccaccgtggtttgcctgatctcgggcggcaacaacgacgtattgcgctacggtgaggtgttggagcgttcgctgatccacctaggtctcaaacactatttcctggtagacttcccccagaagcctggtgccttgcgccgttttcttgacgaagtgcttggacccaacgacgacatcaccttgttcgagtacgtcaagcgcaacaaccgagagaccggcgaggcgctggtaggtatccagctggggtctgctgtcgacttagacgtcctgctggcccggatgcaggggaccgaaatgcacgtcgaaaccctacaaccaggttcgccggcctaccgctacctgttgctttag

SEQ ID NO: 31818 - protein, 427 aa, Mycobacterium leprae
MSAEPSRNPRTPPVSAVDIDGAAKRIAPVVTPTPLQLSDRLSAITGAAVYLKREDLQTVRSYKLRGAYNLLVQLTDEEIAAGVVCSSAGNHAQGVAYACRSLGVHGRVYVPAKTPKQKWDRIRYHGGAFIELIVGRSTYDLAAAAAVDDIERTGATLVPPYDDVRVIAGQGTIAVELLEQLNTEPDLVVVPVGGGGCIAGMTTYLAERTANTAVLGVEPAGAAAMMAALAAGEPVTLDYVDQFVDGAAVNRVGTLPYAALTAAGDMVSITTVDEGAVCTAMLDLYQNEGIIAEPAGALSVAGLLETDIEPGSTVVCLISGGNNDVLRYGEVLERSLIHLGLKHYFLVDFPQKPGALRRFLDEVLGPNDDITLFEYVKRNNRETGEALVGIQLGSAVDLDVLLARMQGTEMHVETLQPGSPAYRYLLL

SEQ ID NO: 31819 - DNA, 1542 bp, Pasteurella multocida
  CDS (1)..(1542): transl_table=11
atggtcaataacctccattcagctcacccaacaggtgcagaatacctcaaagccgtgttgagttctaaagtctatgacgtggcgcaagtgactccgcttcaagacatggcaaaactgtctgaacgtttaggtaataaagtgtttatcaaacgtgaagatcgccaacccgtacacagtttcaaactgcgtggtgcgtatgccatgattgctggcttaagtgccgaacaaaaagcctcgggcgtgattgccgcctcagcgggaaaccatgcacaaggcgtggcgctgtctgccaaacatcttggcttgcgtgccttaatcgtgatgccacaaaacaccccaagtatcaaagtcgatgccgtgcgtggatttggtggtgaagtgctattacatggcgccaatttcgatgaagccaaagccaaagcgattgaattggcggaaagcaaaaatatgacattcattccgccttttgatcaccccgcggtgattgcaggacaaggctcgattgccatggaattgttacaacaaaacagccaaattgatcgtatttttgtccctgttggtggcggtggcttagccgcaggcattgctgtattaattaaacaattaatgcccgaaatcaaagtaattggggttgagtcgaaagattccgcctgcttgtatcgtgctctcaaagcaggtaagcccattgatttagatcgcgttggcttatttgctgacggggtcgcagtgaaacgtattggcgatgagactttccgcgtttgtcagcaatatattgatgatgtagtgttagtagatggtgatgaaatctgcgctgcggtcaaagatatttttgagaatgtgcgcgctattgctgaaccgtcgggggcattatcgcttgctggtttaaaaaaatacgtgaaagagcacaatattcaaggtgaaaccttggtgaatgtattatctggtgccaatttaaatttccataccttacgttatgtgtcagagcgttgtgaaattggtgaacagcacgaagcccttttagccgtgaccattcctgaacaaccagggagtttcttaaaattctgccatattttaggtcatgtccctgttactgaatttaaataccgttatgccgacgacaaacaagcttgtattttcgtgggggtacgcattacagggcaagaagaaaaacaaacgatcatcaatcaattacaacaaaatggttatgatttaattgatttgtctaatgatgatatcgccaaaacgcatgtacgctatatgattggcggacgttcaaacagtcccttaaaagagcgtttatacagttttgaattcccagaacaaaaaggcgccttattaaaattcctcgaaactttggggcaaacacattggaatatttccgtgttccattatcgtgcgcacggggcagattacggtaacgtgcttgctggcttccaattaaatgatgaagatctcgacgcctttaatcagcatttggaaaaactgggttatgtctatcaagatgtcacagaaagccctgcttatcgttatttcttagtgtaa

SEQ ID NO: 31820 - protein, 513 aa, Pasteurella multocida
MVNNLHSAHPTGAEYLKAVLSSKVYDVAQVTPLQDMAKLSERLGNKVFIKREDRQPVHSFKLRGAYAMIAGLSAEQKASGVIAASAGNHAQGVALSAKHLGLRALIVMPQNTPSIKVDAVRGFGGEVLLHGANFDEAKAKAIELAESKNMTFIPPFDHPAVIAGQGSIAMELLQQNSQIDRIFVPVGGGGLAAGIAVLIKQLMPEIKVIGVESKDSACLYRALKAGKPIDLDRVGLFADGVAVKRIGDETFRVCQQYIDDVVLVDGDEICAAVKDIFENVRAIAEPSGALSLAGLKKYVKEHNIQGETLVNVLSGANLNFHTLRYVSERCEIGEQHEALLAVTIPEQPGSFLKFCHILGHVPVTEFKYRYADDKQACIFVGVRITGQEEKQTIINQLQQNGYDLIDLSNDDIAKTHVRYMIGGRSNSPLKERLYSFEFPEQKGALLKFLETLGQTHWNISVFHYRAHGADYGNVLAGFQLNDEDLDAFNQHLEKLGYVYQDVTESPAYRYFLV

SEQ ID NO: 31821 - DNA, 1545 bp, Salmonella typhimurium
  CDS (1)..(1545): transl_table=11
atggcggaatctcaacctctgtcagtcgcgccggaaggggcggagtatctgcgcgcggtgctacgcgcgccagtatacgaagcggcgcaggtgacaccgctgcaaaaaatggaaaagctctcgtcacgtctggacaacgttattctcgtcaaacgcgaagaccggcagccggtacatagctttaagctgcgcggcgcttacgcgatgatggccggattgaccgaagaacaaaaagcccacggcgtgattaccgcgtcggcggggaaccatgcacagggcgtggcgttttcctccgcgcggcttggcgtgaagtcgctgatcgtcatgccaaaagcaacggcggatattaaagtcgatgcggtacgcggttttggcggcgaagtgctgttgcacggcgctaattttgatgaagcgaaagcgaaagctattgaactggcgcagcagcagggttttacttgggtgccgccgtttgatcacccaatggtgatcgccgggcagggcacgctggcgctggaactgcttcagcaggattcgcatctcgatcgtgtctttgtgccggttggcggcggcggcctggcggcgggcgtagcggtactgatcaaacaattgatgccgcaaatcaaagtgattgccgtcgaagcggaggattccgcctgcctgaaagcggcgttggaagccggtcatccagtggatctcccgcgcgttgggttgtttgctgaaggcgtagcggtaaaacgcatcggcgacgaaaccttccgcctgtgccaggaatatctcgacgacattattacagtcgatagcgacgctatctgcgcggcgatgaaagatctgtttgaagatgtgcgtgcggtggcggagccgtccggcgcgctggcgctggcggggatgaagaaatatatcgcccagcacaatattcgcggcgaacgcctggcgcacgtcctttccggcgccaacgtcaacttccacggcttgcgctatgtgtctgaacgctgcgagctgggggaacagcgcgaagcgttactggcggtgaccattccggaagaaaaggggagctttctcaaattctgccagttgcttggcgggcgtatggtcaccgaatttaactaccgttttgccgacgcgaaaaatgcctgtatttttgtcggcgtacgcgtcagtcaggggctggaggagcgaaaagagattatcacccaactgtgcgacggcggttatagcgtagtggatctctccgacgatgaaatggcgaagctgcatgtgcgctatatggtcggcggacgcccctccaagccattacaggagcgtttgtatagtttcgaatttccggagtcgcccggcgcgttgctcaaattcctgcatacgcttggcacgcactggaatatttcgctattccattaccgtagccacggtaccgattatggccgcgtgctggcggcgttcgagttaggcgatcatgagccggatttcgaaacccggctgcatgagctgggctatgaatgccatgatgagagcaataacccggcgttccggttctttctggcgggttaa

SEQ ID NO: 31822 - protein, 514 aa, Salmonella typhimurium
MAESQPLSVAPEGAEYLRAVLRAPVYEAAQVTPLQKMEKLSSRLDNVILVKREDRQPVHSFKLRGAYAMMAGLTEEQKAHGVITASAGNHAQGVAFSSARLGVKSLIVMPKATADIKVDAVRGFGGEVLLHGANFDEAKAKAIELAQQQGFTWVPPFDHPMVIAGQGTLALELLQQDSHLDRVFVPVGGGGLAAGVAVLIKQLMPQIKVIAVEAEDSACLKAALEAGHPVDLPRVGLFAEGVAVKRIGDETFRLCQEYLDDIITVDSDAICAAMKDLFEDVRAVAEPSGALALAGMKKYIAQHNIRGERLAHVLSGANVNFHGLRYVSERCELGEQREALLAVTIPEEKGSFLKFCQLLGGRMVTEFNYRFADAKNACIFVGVRVSQGLEERKEIITQLCDGGYSVVDLSDDEMAKLHVRYMVGGRPSKPLQERLYSFEFPESPGALLKFLHTLGTHWNISLFHYRSHGTDYGRVLAAFELGDHEPDFETRLHELGYECHDESNNPAFRFFLAG

SEQ ID NO: 31823 - DNA, 990 bp, Salmonella typhimurium
  CDS (1)..(990): transl_table=11
atgcacattacatacgatctcccggttgcaattgaagatatcctcgaagcgaaaaaaagactggcggggaagatatataaaacgggaatgcctcgctctaactattttagtgaacgttgcaaaggcgaaatatttctcaagtttgaaaatatgcagcgtacgggttcatttaaaattcgtggcgcttttaacaaacttagctcgttaacggaggcggaaaaacgtaaaggcgtcgtggcctgttccgcaggtaatcatgcacagggcgtttctctttcttgcgcaatgctgggtattgacggcaaagtcgtgatgccgaagggcgcgccaaagtcaaaagtggcggccacctgtgattattcggcggaagtggtgctccacggtgacaacttcaatgacaccatcgctaaggtgagtgaaattgtcgaaaccgaaggccgcatttttattccgccttacgacgatccaaaagtcattgccggacagggcactattggtctggaaattatggaagatctgtacgatgtcgataatgtcatcgtgcctattggcggcggcggtttaattgcaggtattgccattgcgattaaatcgattaacccgaccattaaagttatcggcgtacaggccgaaaatgttcacggtatggcggcgtcttattacactggcgaaataaccacgcaccgaacgaccggcaccctggcggatggttgtgatgtctcccgcccgggtaatttaacctatgaaatcgttcgtgaattagtcgatgacattgtcctggttagcgaagatgaaattcgtaacagcatgatcgctttaattcagcgcaataaggttattactgaaggcgctggcgctctggcttgcgccgcactattaagtgggaaattagatagccatattcagaacagaaaaacggtcagtattatttctggcggcaatatcgatctttctcgggtatcacaaattacgggtttagttgacgcttaa

SEQ ID NO: 31824 - protein, 329 aa, Salmonella typhimurium
MHITYDLPVAIEDILEAKKRLAGKIYKTGMPRSNYFSERCKGEIFLKFENMQRTGSFKIRGAFNKLSSLTEAEKRKGVVACSAGNHAQGVSLSCAMLGIDGKVVMPKGAPKSKVAATCDYSAEVVLHGDNFNDTIAKVSEIVETEGRIFIPPYDDPKVIAGQGTIGLEIMEDLYDVDNVIVPIGGGGLIAGIAIAIKSINPTIKVIGVQAENVHGMAASYYTGEITTHRTTGTLADGCDVSRPGNLTYEIVRELVDDIVLVSEDEIRNSMIALIQRNKVITEGAGALACAALLSGKLDSHIQNRKTVSIISGGNIDLSRVSQITGLVDA

SEQ ID NO: 31825 - DNA, 1653 bp, Arxula adeninivorans
  CDS (1)..(1653)
atgtctaatatatcgactccgcgcatctcggggctgactgaatatacttctcagcctgataaatcccattacgactctatcgaatcccatttcttgcttcctgatggaaccccagactatttaaagctcattctcacttcaaaagtgtacgatgtttgcaacgagacccccgtaactcctgcggtcaatttgtcgtcaaagctgggcgccaacatctttctcaaaagagaggatctccagccggtattttcgttcaagcttcgaggagcttacaacatgatggctcatttgcctcaggagactcgatggaagggtgtcattgcatgctctgctggtaaccatgctcagggagtagcatactcggccaaacatctcaacattcctgccacaattgtcatgcccgtggtgacccctgctatcaagtacaagaacgtggaccgactgggagcaaaggtagtgctccatggtaacgattttgatgccgcaaaggccgagtgcaatcgattgtcggaaaagcacggattgactaatattcctctttttgacaacccctatgtgattgcgggacagggcacaattggagtggagcttctgcgccagattgacgtggaatcgctcaaggctatttttgtgtgcattggtggaggaggacttattgctggagtgggggcctacattaagcgtattgctcctcaggtaaaaatcattggtgtggaaacttatgacgccaatgccatgcgccagtcgctgcagaagggtgaacgaatcactctgtcagaggtaggattgtttgccgacggtgctgcagttaaaattcttggagaggagactttccggttgtgccaacaagtggtagatgaaattgtattggtgtctactgacgagatttgtgctgctattaaggatgtgtttactgagactcgatccatcgtcgagcccgctggtgcgctgtcggtggcaggactcgtcaagtacgttgaatctcaccctgaaattgatcactctgcctccggatacactgccatcttgtcaggagcgaatatggattttgaccgactgcgatttgtttctgaacgagcaaagctcggagagggatccgaggtgttcattgtagccaccatccccgagaagcctggttcgtttggaaagctcattgatctggtccaccctcgagccgttactgagtttagctacagatactccaatggagaactagaaaagagcgacggaaaggcccatgtgtacatttcattttcagttgataatgctaaagctgaagtgccccgcatcctcgatgatttcaagggagctgggttcgatgctattgatatctcccacaatgagtttccaaaaagtcacccaagatacttggtaggagcaaaccagccagttaccaatgagagagtgttccgatttgagttccccgaaagaccaggagctttggtgaaattccttcacggagtcaaatccaagtggaacattactctgttccactaccgaaaccagggatcggacattgcaaaggtcttggctggtatctctgtaccttctcacgagagcgatcaattccagcaattcttggacaatcttgagtacccatatgccgaggagactgacaatgtggtgtacaagcttttttcgcagggagactag

SEQ ID NO: 31826 - protein, 550 aa, Arxula adeninivorans
MSNISTPRISGLTEYTSQPDKSHYDSIESHFLLPDGTPDYLKLILTSKVYDVCNETPVTPAVNLSSKLGANIFLKREDLQPVFSFKLRGAYNMMAHLPQETRWKGVIACSAGNHAQGVAYSAKHLNIPATIVMPVVTPAIKYKNVDRLGAKVVLHGNDFDAAKAECNRLSEKHGLTNIPLFDNPYVIAGQGTIGVELLRQIDVESLKAIFVCIGGGGLIAGVGAYIKRIAPQVKIIGVETYDANAMRQSLQKGERITLSEVGLFADGAAVKILGEETFRLCQQVVDEIVLVSTDEICAAIKDVFTETRSIVEPAGALSVAGLVKYVESHPEIDHSASGYTAILSGANMDFDRLRFVSERAKLGEGSEVFIVATIPEKPGSFGKLIDLVHPRAVTEFSYRYSNGELEKSDGKAHVYISFSVDNAKAEVPRILDDFKGAGFDAIDISHNEFPKSHPRYLVGANQPVTNERVFRFEFPERPGALVKFLHGVKSKWNITLFHYRNQGSDIAKVLAGISVPSHESDQFQQFLDNLEYPYAEETDNVVYKLFSQGD

SEQ ID NO: 31827 - DNA, 1731 bp, Saccharomyces cerevisiae
  CDS (1)..(1731)
atgtcagctactctactaaagcaaccattatgtacggttgttcggcaaggtaaacagtccaaagtgtctggattgaaccttttgagactaaaggctcatttgcacagacaacacctgtcaccttccttgataaaactacactctgaattgaaattggatgagctgcaaactgataacacccctgattacgtccgtttagttttaaggtcctctgtatacgatgttattaatgaatctccaatctctcaaggtgtaggtttgtcttcccgtctaaacacgaatgtcatcttgaaaagagaagatctattgcctgttttctctttcaagcttcgtggtgcctataacatgattgccaagttggacgattctcaaagaaaccagggtgttattgcctgttcagctgggaatcatgcccaaggtgtggcctttgctgctaaacacttgaaaatacctgctactatcgttatgcctgtttgtacaccatctattaagtatcaaaatgtctcgagattagggtctcaagtcgtcctatatggtaacgattttgacgaggctaaggctgaatgtgccaaattggctgaagagcgtggcttgacgaacattcctcctttcgatcatccttatgtcattgccggtcaaggtactgtagctatggaaatcctaagacaagtacgtaccgctaataagatcggtgctgtctttgttcccgtcggcggtggtggtttaattgctggtattggtgcttatttgaaaagggttgctcctcatatcaaaatcattggtgttgaaacttacgatgcggccactttacataattccttgcaacgcaaccagagaactcctttacctgtggtgggtacttttgccgatggtacgtctgtgcgtatgattggtgaagaaacatttagagtcgcccaacaagtggttgatgaagttgttcttgttaacactgacgaaatctgtgctgcagtaaaggatatttttgaagatactagaagtattgtagaaccatctggtgccctttcagtagccggtatgaagaaatacatctctaccgtacatccagaaattgaccacactaaaaacacctatgttcccatcctttctggtgctaacatgaactttgatagattaagatttgtttccgaacgtgctgttcttggtgaaggaaaggaagtcttcatgttagttactttacccgacgtccctggtgcgttcaagaaaatgcaaaagatcatccacccaagatctgtcactgaattctcttaccgttacaatgaacatcgtcatgagtcctctagtgaagtgcccaaggcttacatttacacttctttcagcgtcgttgacagagaaaaggaaatcaagcaagttatgcaacagttgaatgctttaggttttgaagctgtggatatctccgataacgaattggctaaatctcatggtagatacttggttggtggtgcttctaaggttcctaatgaaagaattatttcatttgaattccctgaaagaccaggtgccttgactaggttccttggaggcctaagcgattcttggaatcttactttattccattatagaaaccatggtgccgatatcggtaaggttttagctggtatttccgttcctccaagggaaaacttaaccttccaaaaattcttggaagatttaggctacacttatcatgatgaaactgataacactgtttatcaaaaattcttgaaatattaa

SEQ ID NO: 31828 - protein, 576 aa, Saccharomyces cerevisiae
MSATLLKQPLCTVVRQGKQSKVSGLNLLRLKAHLHRQHLSPSLIKLHSELKLDELQTDNTPDYVRLVLRSSVYDVINESPISQGVGLSSRLNTNVILKREDLLPVFSFKLRGAYNMIAKLDDSQRNQGVIACSAGNHAQGVAFAAKHLKIPATIVMPVCTPSIKYQNVSRLGSQVVLYGNDFDEAKAECAKLAEERGLTNIPPFDHPYVIAGQGTVAMEILRQVRTANKIGAVFVPVGGGGLIAGIGAYLKRVAPHIKIIGVETYDAATLHNSLQRNQRTPLPVVGTFADGTSVRMIGEETFRVAQQVVDEVVLVNTDEICAAVKDIFEDTRSIVEPSGALSVAGMKKYISTVHPEIDHTKNTYVPILSGANMNFDRLRFVSERAVLGEGKEVFMLVTLPDVPGAFKKMQKIIHPRSVTEFSYRYNEHRHESSSEVPKAYIYTSFSVVDREKEIKQVMQQLNALGFEAVDISDNELAKSHGRYLVGGASKVPNERIISFEFPERPGALTRFLGGLSDSWNLTLFHYRNHGADIGKVLAGISVPPRENLTFQKFLEDLGYTYHDETDNTVYQKFLKY

SEQ ID NO: 31829 - DNA, 1149 bp, Synechocystis sp
  CDS (1)..(1149)
atgatttcttgtcattctttcaccatgaccccatccgccccaaattcgacagtgttgcccagtgctacccccgtctgtccccagagttcggcctgtcgttggcgtggattgattgaaacctatcggccctatttaccggtatccgaccagactccagtggtcacccttttagaaggcaatactcccctgattcccgctccggcgatcgccaaacgcattggcaaggacgtaagggtttttgttaaatatgacggcctaaaccccaccggtagtttcaaggaccggggcatgaccatggccatttccaaagccaaggaagcaggggccaaagcggtaatttgtgccagcacaggtaatacttcagcggcggcggcggcctacgctcggcgggccggtttgcgggcttttgtgatcattcccgatggttatgtcgctttgggaaaattaggccaagctttaatttacggtgcggaagtgattgccattgatggtaactttgacgatgcgttgaccaccgtgcggcagttatcggaacattaccccgtaaccttggtaaattccgttaatccctaccgtttggaaggacaaaagaccgccgcgtttgaaattgttgatgtcctcggccaggcccccgattggctctgtatccccgtgggcaatgcgggcaatatcaccgcctactggatgggtttttgtcagtataaagaattgggcaaaggcgatcgcctaccgaggatgatgggtttccaagccgctggttccgctccttttatccaagggcaacccattagccatcccgaaaccctagccactgctattcgtattggcaatcctgccaactgggataaggcctgggccgcttctagggaaagtaatggggaatttcaccccgtcaccgatgccgaaattttggaagcctatcgtatcctagctgccgaagaaggggttttttgtgagcccgccagtgccgcttccgtagctggtttattgaagcaaaaagatcaagttcccgctggagccaccgtggtttgtgtgctgaccggcaacggcttgaaagatccagattgtgctgtgcaaaatagtggcaatcaagtgaaagcgggtttaaaaccagatttggaaattgttgctaaagcgatgggtttttag

SEQ ID NO: 31830 - protein, 382 aa, Synechocystis sp
MISCHSFTMTPSAPNSTVLPSATPVCPQSSACRWRGLIETYRPYLPVSDQTPVVTLLEGNTPLIPAPAIAKRIGKDVRVFVKYDGLNPTGSFKDRGMTMAISKAKEAGAKAVICASTGNTSAAAAAYARRAGLRAFVIIPDGYVALGKLGQALIYGAEVIAIDGNFDDALTTVRQLSEHYPVTLVNSVNPYRLEGQKTAAFEIVDVLGQAPDWLCIPVGNAGNITAYWMGFCQYKELGKGDRLPRMMGFQAAGSAPFIQGQPISHPETLATAIRIGNPANWDKAWAASRESNGEFHPVTDAEILEAYRILAAEEGVFCEPASAASVAGLLKQKDQVPAGATVVCVLTGNGLKDPDCAVQNSGNQVKAGLKPDLEIVAKAMGF

SEQ ID NO: 31831 - DNA, 999 bp, Rhizobium sp
  CDS (1)..(999): transl_table=11
gtgaatgaattgtcgaacttaagtctagaatcgatcgagcgagcgcgtgagcggatcgaagagcacgtcttccgtacccctctgacgacatcaaggtcgctaaccgaacttaccggaactcaggtcagcctcaagctcgagcactatcagcgcactggtagctttaagctgcggggtgcgacaaacgcaattcttcaactcagcccgtcggatcgggcacgtggggttattgcggcatctacgggcaatcacggacgggctctttcctacgccgcaaaagcggtcggctctcgcgccaccatctgcatgtcggatcttgttccagaaaacaaggtttccgagatccggaagcttggcgcgacagttcggatagtgggatcgtcacaagacgatgcgcaagtcgaagtcgagcggctcgtcgcggaggaaggcctcagcatgatcccgcctttcgatcacccgcatatcatcgccggccagcgaaccgtcggtcttgagatcgttgaggcgatgccggacgtcgcgatggtactgcttccactgtcgggtggcggcttggctgcaggcgttgcagcagcggtgaaggcactgcggcctcatgcgaggatcatcggtgtcactatggatcgaggcgccgcgatgaaggccagcatcgaagctgggcatccggtacaagtgaaggagtatcggagcttggctgattctttaggtggaggaatcggcatggccaacgcttggacctttcaaatgtgcagagcccttctggacgatgttgtcctcgttaatgaaggcgaaatagccgcgggaattagacatgcttatgagcatgagcgtcagatactcgagggcgccggcgctgtcggtatcgcagcgcttctctccggcaaggtggctgctcgcggaggttcagtaggagtcgttttgtcaggtcaaaacatcgacatgggcctgcatcgggaggtcattaacggagttgtcagagcgaccgaggaggattga

SEQ ID NO: 31832 - protein, 332 aa, Rhizobium sp
MNELSNLSLESIERARERIEEHVFRTPLTTSRSLTELTGTQVSLKLEHYQRTGSFKLRGATNAILQLSPSDRARGVIAASTGNHGRALSYAAKAVGSRATICMSDLVPENKVSEIRKLGATVRIVGSSQDDAQVEVERLVAEEGLSMIPPFDHPHIIAGQRTVGLEIVEAMPDVAMVLLPLSGGGLAAGVAAAVKALRPHARIIGVTMDRGAAMKASIEAGHPVQVKEYRSLADSLGGGIGMANAWTFQMCRALLDDVVLVNEGEIAAGIRHAYEHERQILEGAGAVGIAALLSGKVAARGGSVGVVLSGQNIDMGLHREVINGVVRATEED

SEQ ID NO: 31833 - DNA, 972 bp, Schizosaccharomyces pombe
  CDS (1)..(972)
atgagcgataacctggtgcttcctacctatgatgatgttgcttcagctagtgagcgaattaagaaattcgccaacaaaaccccagtactcacgtcgagcacagtaaataaagagtttgtggcagaagtgttttttaaatgtgaaaatttccaaaaaatgggtgctttcaaatttcgcggtgcccttaatgctctttctcaactcaatgaagctcaacgtaaagctggtgttttgacgttttcttctggtaatcatgctcaggccattgcactgtcggcaaagatcttgggaattccagcaaaaatcattatgccactcgatgcacccgaagccaaggtcgctgccacgaaaggctatggtggtcaagtaatcatgtatgatagatacaaagatgatagagaaaagatggccaaagaaatttctgaaagagaaggtcttaccattatccctccttacgatcacccccatgtacttgctggtcaaggaaccgcagctaaggaactgtttgaagaggttggccctcttgatgcactttttgtttgtctcggaggcggtggcttgctttctggatcagcacttgctgctcgccattttgctccaaactgcgaagtttatggagttgaacctgaagctggaaacgatgggcaacagtcctttaggaaaggatctatcgtacatattgatacaccaaaaactatagccgatggtgctcaaactcaacatttgggtaactacacgttttccattataaaagaaaaggtcgatgatatattgactgtgtccgacgaggaactaattgactgtcttaagttttatgccgcacgtatgaaaattgtagtcgaacccactggatgtcttagctttgcggcagcgcgcgctatgaaggaaaagctaaagaataaacgaattggtatcattataagtggaggaaacgtagacattgagcgttatgcccatttcttatcacagtaa

SEQ ID NO: 31834 - protein, 323 aa, Schizosaccharomyces pombe
MSDNLVLPTYDDVASASERIKKFANKTPVLTSSTVNKEFVAEVFFKCENFQKMGAFKFRGALNALSQLNEAQRKAGVLTFSSGNHAQAIALSAKILGIPAKIIMPLDAPEAKVAATKGYGGQVIMYDRYKDDREKMAKEISEREGLTIIPPYDHPHVLAGQGTAAKELFEEVGPLDALFVCLGGGGLLSGSALAARHFAPNCEVYGVEPEAGNDGQQSFRKGSIVHIDTPKTIADGAQTQHLGNYTFSIIKEKVDDILTVSDEELIDCLKFYAARMKIVVEPTGCLSFAAARAMKEKLKNKRIGIIISGGNVDIERYAHFLSQ

SEQ ID NO: 31835 - DNA, 981 bp, Saccharomyces cerevisiae
  CDS (1)..(981)
atgattgttcccacttatggagacgttttggatgccagcaacagaattaaagaatatgtaaataaaacaccggttctcacttcacgaatgcttaatgatcgacttggagcacaaatatactttaaaggtgagaatttccaacgagtgggagcgttcaagtttcgtggagcaatgaatgctgtttcaaaattaagtgatgaaaaaagaagtaagggagtaattgccttctcatcaggaaaccatgcacaggctattgctcttagtgcaaaactattaaatgtacctgcaacaattgttatgcccgaggatgcgcccgcccttaaagttgctgctacagccggttacggagcacatatcataaggtataacaggtatactgaagatcgcgagcagattgggcgtcaactagcagccgaacatggttttgcattgattccgccctacgatcatcctgatgttattgcagggcaaggtacgtcggcaaaagagctattagaagaggttggacaacttgatgcattatttgttcctttgggcggtggtgggctcctttcaggatctgcacttgccgctagaagcctttctccaggctgcaaaatttttggggttgaacctgaagctggtaacgatggacaacaatccttcagatcgggttccattgttcatatcaatacgccaaaaactatcgcagatggcgctcaaacacaacacctcggtgagtacacatttgccattattcgcgaaaatgtcgatgatattttaacggttagcgaccaagagctagtaaaatgcatgcactttcttgcggaacgcatgaaggtggttgttgagcccacagcttgtttgggatttgcaggtgcacttctaaaaaaggaagagctagttgggaagaaagtaggcataatactaagtggaggtaatgtagacatgaagagatatgctactttaatctctgggaaggaagatggcccaacgatttag

SEQ ID NO: 31836 - protein, 326 aa, Saccharomyces cerevisiae
MIVPTYGDVLDASNRIKEYVNKTPVLTSRMLNDRLGAQIYFKGENFQRVGAFKFRGAMNAVSKLSDEKRSKGVIAFSSGNHAQAIALSAKLLNVPATIVMPEDAPALKVAATAGYGAHIIRYNRYTEDREQIGRQLAAEHGFALIPPYDHPDVIAGQGTSAKELLEEVGQLDALFVPLGGGGLLSGSALAARSLSPGCKIFGVEPEAGNDGQQSFRSGSIVHINTPKTIADGAQTQHLGEYTFAIIRENVDDILTVSDQELVKCMHFLAERMKVVVEPTACLGFAGALLKKEELVGKKVGIILSGGNVDMKRYATLISGKEDGPTI

SEQ ID NO: 31837 - DNA, 24 bp, Artificial sequence
  Primer sequence
atgcatattacatacgatctgccg

SEQ ID NO: 31838 - DNA, 23 bp, Artificial sequence
  Primer sequence
ttaagcgtcaacgaaaccggtga

SEQ ID NO: 31839 - protein, 516 aa, Artificial sequence
  Consensus
  Variant (3)..(13): Xaa in position 3 to 13 is any amino acid
  Variant (14)..(96): Xaa in position 14 to 96 is any or no amino acid
  Variant (98)..(98): Xaa in position 98 is any amino acid
  Variant (100)..(101): Xaa in position 100 to 101 is any amino acid
  Variant (103)..(106): Xaa in position 103 to 106 is any amino acid
  Variant (107)..(121): Xaa in position 107 to 121 is any or no amino acid
  Variant (124)..(124): Xaa in position 124 is any amino acid
  Variant (127)..(138): Xaa in position 127 to 138 is any amino acid
  Variant (139)..(178): Xaa in position 139 to 178 is any or no amino acid
  Variant (180)..(180): Xaa in position 180 is any amino acid
  Variant (184)..(185): Xaa in position 184 to 185 is any amino acid
  Variant (186)..(189): Xaa in position 186 to 189 is any or no amino acid
  Variant (191)..(204): Xaa in position 191 to 204 is any amino acid
  Variant (206)..(211): Xaa in position 206 to 211 is any amino acid
  Variant (213)..(219): Xaa in position 213 to 219 is any amino acid
  Variant (221)..(257): Xaa in position 221 to 257 is any amino acid
  Variant (258)..(270): Xaa in position 258 to 270 is any or no amino acid
  Variant (273)..(273): Xaa in position 273 is any amino acid
  Variant (275)..(277): Xaa in position 275 to 277 is any amino acid
  Variant (279)..(291): Xaa in position 279 to 291 is any amino acid
  Variant (292)..(340): Xaa in position 292 to 340 is any or no amino acid
  Variant (346)..(347): Xaa in position 346 to 347 is any amino acid
  Variant (349)..(394): Xaa in position 349 to 394 is any amino acid
  Variant (395)..(440): Xaa in position 395 to 440 is any or no amino acid
  Variant (442)..(461): Xaa in position 442 to 461 is any amino acid
  Variant (463)..(469): Xaa in position 463 to 469 is any amino acid
  Variant (471)..(484): Xaa in position 471 to 484 is any amino acid
  Variant (485)..(513): Xaa in position 485 to 513 is any or no amino acid
  Variant (515)..(515): Xaa in position 515 is any amino acid
TPXXXXXXXXXXXXXXXXXXXXXXXXXXXXXXXXXXXXXXXXXXXXXXXXXXXXXXXXXXXXXXXXXXXXXXXXXXXXXXXXXXXXXXXXXXXXXXKXEXXQXXXXXXXXXXXXXXXXXXXFKXRGXXXXXXXXXXXXXXXXXXXXXXXXXXXXXXXXXXXXXXXXXXXXXXXXXXXXSXGNHXXXXXXAXXXXXXXXXXXXXXPXXXXXXKXXXXXXXGXXXXXXXXXXXXXXXXXXXXXXXXXXXXXXXXXXXXXXXXXXXXXXXXXXGQXTXXXEXXXXXXXXXXXXXXXXXXXXXXXXXXXXXXXXXXXXXXXXXXXXXXXXXXXXXXXXXXXXXXGGGGLXXGXXXXXXXXXXXXXXXXXXXXXXXXXXXXXXXXXXXXXXXXXXXXXXXXXXXXXXXXXXXXXXXXXXXXXXXXXXXXXXXXXXXXXXXXXXXXVXXXXXXXXXXXXXXXXXXXXEXXXXXXXAXXXXXXXXXXXXXXXXXXXXXXXXXXXXXXXXXXXXXXXXXXXGXN

SEQ ID NO: 31840 - protein, 224 aa, Artificial sequence
  Consensus
  Variant (1)..(1): Xaa in position 1 is Val, Ile, Leu, Phe or Met
  Variant (2)..(3): Xaa in position 2 to 3 is any amino acid
  Variant (5)..(5): Xaa in position 5 is any amino acid
  Variant (6)..(6): Xaa in position 6 is Glu or Asp
  Variant (7)..(8): Xaa in position 7 to 8 is any amino acid
  Variant (9)..(9): Xaa in position 9 is Gln, Asn, Leu, Thr or Ser
  Variant (10)..(12): Xaa in position 10 to 12 is any amino acid
  Variant (13)..(13): Xaa in position 13 is Ser, Ala or Thr
  Variant (14)..(14): Xaa in position 14 is Phe or Tyr
  Variant (15)..(15): Xaa in position 15 is Lys or Arg
  Variant (16)..(16): Xaa in position 16 is any amino acid
  Variant (18)..(18): Xaa in position 18 is Gly or Leu
  Variant (19)..(35): Xaa in position 19 to 35 is any amino acid
  Variant (36)..(54): Xaa in position 36 to 54 is any or no amino acid
  Variant (55)..(55): Xaa in position 55 is Ser or Thr
  Variant (56)..(56): Xaa in position 56 is any amino acid
  Variant (58)..(58): Xaa in position 58 is Asn or Gly
  Variant (59)..(59): Xaa in position 59 is any amino acid
  Variant (60)..(60): Xaa in position 60 is Ala, Gly or Ser
  Variant (61)..(61): Xaa in position 61 is any amino acid
  Variant (62)..(62): Xaa in position 62 is any or no amino acid
  Variant (63)..(63): Xaa in position 63 is Gly, Ala, Leu, Ser or Cys
  Variant (64)..(64): Xaa in position 64 is any amino acid
  Variant (65)..(65): Xaa in position 65 is Ala or Ser
  Variant (66)..(67): Xaa in position 66 to 67 is any amino acid
  Variant (68)..(68): Xaa in position 68 is Ala, Cys, Gly or Ser
  Variant (69)..(76): Xaa in position 69 to 76 is any amino acid
  Variant (77)..(77): Xaa in position 77 is Ile, Val, Leu or Thr
  Variant (78)..(78): Xaa in position 78 is Val, Phe, Ile, Tyr, Leu, Cys or Ala
  Variant (79)..(79): Xaa in position 79 is Met, Val, Pro, Leu, Ile or Ala
  Variant (80)..(80): Xaa in position 80 is Pro, Ser, Thr, Glu, Lys or Asp
  Variant (81)..(82): Xaa in position 81 to 82 is any amino acid
  Variant (83)..(83): Xaa in position 83 is Thr, Ala, Val, Ile, Lys, Ser or Asn
  Variant (84)..(86): Xaa in position 84 to 86 is any amino acid
  Variant (87)..(87): Xaa in position 87 is Lys, Ile, Val, Thr, Ala or Met
  Variant (88)..(94): Xaa in position 88 to 94 is any amino acid
  Variant (95)..(95): Xaa in position 95 is any or no amino acid
  Variant (96)..(96): Xaa in position 96 is Gly or Ser
  Variant (97)..(97): Xaa in position 97 is Ala, Gly, Lys or Ser
  Variant (98)..(123): Xaa in position 98 to 123 is any amino acid
  Variant (124)..(135): Xaa in position 124 to 135 is any or no amino acid
  Variant (136)..(136): Xaa in position 136 is Ile, Val, Leu or Phe
  Variant (137)..(144): Xaa in position 137 to 144 is any amino acid
  Variant (145)..(145): Xaa in position 145 is Ile, Met, Leu, Val, Trp, Ala or Gln
  Variant (146)..(146): Xaa in position 146 is any amino acid
  Variant (148)..(148): Xaa in position 148 is any amino acid
  Variant (149)..(149): Xaa in position 149 is Gly, Ala, Lys, Ser, Arg or Thr
  Variant (150)..(150): Xaa in position 150 is Thr or Ser
  Variant (151)..(153): Xaa in position 151 to 153 is any amino acid
  Variant (154)..(154): Xaa in position 154 is Glu or Asp
  Variant (155)..(155): Xaa in position 155 is Ile, Leu, Met, Val, Ala, Phe or Trp
  Variant (156)..(162): Xaa in position 156 to 162 is any amino acid
  Variant (163)..(211): Xaa in position 163 to 211 is any or no amino acid
  Variant (212)..(212): Xaa in position 212 is Val, Ile or Leu
  Variant (213)..(214): Xaa in position 213 to 214 is any amino acid
  Variant (215)..(215): Xaa in position 215 is Pro, Ala, Ser, Cys, Gly, Gln or Asn
  Variant (216)..(216): Xaa in position 216 is Val, Ile, Leu, Met, Thr, Cys or Ala
  Variant (217)..(217): Xaa in position 217 is Gly or Ser
  Variant (218)..(218): Xaa in position 218 is any amino acid
  Variant (219)..(219): Xaa in position 219 is Gly or Ala
  Variant (220)..(220): Xaa in position 220 is Gly or Ser
  Variant (221)..(223): Xaa in position 221 to 223 is any amino acid
  Variant (224)..(224): Xaa in position 224 is Gly, Ala or Ser
XXXKXXXXXXXXXXXXRXXXXXXXXXXXXXXXXXXXXXXXXXXXXXXXXXXXXXXXGXXXXXXXXXXXXXXXXXXXXXXXXXXXXXXXXXXXXXXXXXXXXXXXXXXXXXXXXXXXXXXXXXXXXXXXXXXXXXXXXXXXXXXXXXGXXXXXXXXXXXXXXXXXXXXXXXXXXXXXXXXXXXXXXXXXXXXXXXXXXXXXXXXXXXXXXXXXXXXXXXXXXXXX

SEQ ID NO: 31841 - DNA, 1419 bp, Escherichia coli K12; identical to SEQ ID NO: 4337
  CDS (1)..(1419)

SEQ ID NO: 31842 - protein, 472 aa, Escherichia coli K12; identical to SEQ ID NO: 4338

SEQ ID NO: 31843 - DNA, 3951 bp, Homo sapiens (man); identical to SEQ ID NO: 4339
  CDS (82)..(3159)

SEQ ID NO: 31844 - protein, 1025 aa, Homo sapiens (man); identical to SEQ ID NO: 4340

SEQ ID NO: 31845 - DNA, 1239 bp, Escherichia coli; identical to SEQ ID NO: 4341
  CDS (1)..(1239)

SEQ ID NO: 31846 - protein, 412 aa, Escherichia coli; identical to SEQ ID NO: 4342

SEQ ID NO: 31847 - DNA, 1431 bp, Aquifex aeolicus; identical to SEQ ID NO: 4343
  CDS (1)..(1431)

SEQ ID NO: 31848 - protein, 476 aa, Aquifex aeolicus; identical to SEQ ID NO: 4344

SEQ ID NO: 31849 - DNA, 1488 bp, Bacillus halodurans; identical to SEQ ID NO: 4345
  CDS (1)..(1488)

SEQ ID NO: 31850 - protein, 495 aa, Bacillus halodurans; identical to SEQ ID NO: 4346

SEQ ID NO: 31851 - DNA, 1236 bp, Clostridium acetobutylicum; identical to SEQ ID NO: 4347
  CDS (1)..(1236)

SEQ ID NO: 31852 - protein, 411 aa, Clostridium acetobutylicum; identical to SEQ ID NO: 4348

SEQ ID NO: 31853 - DNA, 1419 bp, Salmonella enterica subsp. enterica serovar Typhi; identical to SEQ ID NO: 4349
  CDS (1)..(1419)

SEQ ID NO: 31854 - protein, 472 aa, Salmonella enterica subsp. enterica serovar Typhi; identical to SEQ ID NO: 4350

SEQ ID NO: 31855 - DNA, 1860 bp, Salmonella enterica subsp. enterica serovar Typhi; identical to SEQ ID NO: 4351
  CDS (1)..(1860)

SEQ ID NO: 31856 - protein, 619 aa, Salmonella enterica subsp. enterica serovar Typhi; identical to SEQ ID NO: 4352

SEQ ID NO: 31857 - DNA, 1470 bp, Listeria innocua; identical to SEQ ID NO: 4353
  CDS (1)..(1470)

SEQ ID NO: 31858 - protein, 489 aa, Listeria innocua; identical to SEQ ID NO: 4354

SEQ ID NO: 31859 - DNA, 1470 bp, Listeria monocytogenes; identical to SEQ ID NO: 4355
  CDS (1)..(1470)

SEQ ID NO: 31860 - protein, 489 aa, Listeria monocytogenes; identical to SEQ ID NO: 4356

SEQ ID NO: 31861 - DNA, 1419 bp, Yersinia pestis; identical to SEQ ID NO: 4357
  CDS (1)..(1419)

SEQ ID NO: 31862 - protein, 472 aa, Yersinia pestis; identical to SEQ ID NO: 4358

SEQ ID NO: 31863 - DNA, 1242 bp, Salmonella enterica subsp. enterica serovar Typhi; identical to SEQ ID NO: 4359
  CDS (1)..(1242)

SEQ ID NO: 31864 - protein, 413 aa, Salmonella enterica subsp. enterica serovar Typhi; identical to SEQ ID NO: 4360

SEQ ID NO: 31865 - DNA, 1467 bp, Deinococcus radiodurans; identical to SEQ ID NO: 4361
  CDS (1)..(1467)

SEQ ID NO: 31866 - protein, 488 aa, Deinococcus radiodurans; identical to SEQ ID NO: 4362

SEQ ID NO: 31867 - DNA, 1980 bp, Escherichia coli; identical to SEQ ID NO: 4363
  CDS (1)..(1980)

SEQ ID NO: 31868 - protein, 659 aa, Escherichia coli; identical to SEQ ID NO: 4364

SEQ ID NO: 31869 - DNA, 1419 bp, Pyrococcus horikoshii; identical to SEQ ID NO: 4365
  CDS (1)..(1419)

SEQ ID NO: 31870 - protein, 472 aa, Pyrococcus horikoshii; identical to SEQ ID NO: 4366

SEQ ID NO: 31871 - DNA, 1431 bp, Pyrococcus horikoshii; identical to SEQ ID NO: 4367
  CDS (1)..(1431)

SEQ ID NO: 31872 - protein, 476 aa, Pyrococcus horikoshii; identical to SEQ ID NO: 4368

SEQ ID NO: 31873 - DNA, 1557 bp, Treponema pallidum subsp. pallidum (syphilis spirochete); identical to SEQ ID NO: 4369
  CDS (1)..(1557)

SEQ ID NO: 31874 - protein, 518 aa, Treponema pallidum subsp. pallidum (syphilis spirochete); identical to SEQ ID NO: 4370

SEQ ID NO: 31875 - DNA, 1446 bp, Campylobacter jejuni; identical to SEQ ID NO: 4371
  CDS (1)..(1446)

SEQ ID NO: 31876 - protein, 481 aa, Campylobacter jejuni; identical to SEQ ID NO: 4372

SEQ ID NO: 31877 - DNA, 1446 bp, Caulobacter crescentus; identical to SEQ ID NO: 4373
  CDS (1)..(1446)

SEQ ID NO: 31878 - protein, 481 aa, Caulobacter crescentus; identical to SEQ ID NO: 4374

SEQ ID NO: 31879 - DNA, 1425 bp, Pyrococcus abyssi; identical to SEQ ID NO: 4375
  CDS (1)..(1425)

SEQ ID NO: 31880 - protein, 474 aa, Pyrococcus abyssi; identical to SEQ ID NO: 4376

SEQ ID NO: 31881 - DNA, 1440 bp, Lactococcus lactis subsp. lactis; identical to SEQ ID NO: 4377
  CDS (1)..(1440)

SEQ ID NO: 31882 - protein, 479 aa, Lactococcus lactis subsp. lactis; identical to SEQ ID NO: 4378

SEQ ID NO: 31883 - DNA, 1440 bp, Clostridium acetobutylicum; identical to SEQ ID NO: 4379
  CDS (1)..(1440)

SEQ ID NO: 31884 - protein, 479 aa, Clostridium acetobutylicum; identical to SEQ ID NO: 4380

SEQ ID NO: 31885 - DNA, 3099 bp, Escherichia coli; identical to SEQ ID NO: 4381
  CDS (1)..(3099)

SEQ ID NO: 31886 - protein, 1032 aa, Escherichia coli; identical to SEQ ID NO: 4382

SEQ ID NO: 31887 - DNA, 1470 bp, Vibrio cholerae; identical to SEQ ID NO: 4383
  CDS (1)..(1470)

SEQ ID NO: 31888 - protein, 489 aa, Vibrio cholerae; identical to SEQ ID NO: 4384

SEQ ID NO: 31889 - DNA, 1467 bp, Mycobacterium leprae; identical to SEQ ID NO: 4385
  CDS (1)..(1467)

SEQ ID NO: 31890 - protein, 488 aa, Mycobacterium leprae; identical to SEQ ID NO: 4386

SEQ ID NO: 31891 - DNA, 1935 bp, Escherichia coli; identical to SEQ ID NO: 4387
  CDS (1)..(1935)

SEQ ID NO: 31892 - protein, 644 aa, Escherichia coli; identical to SEQ ID NO: 4388

SEQ ID NO: 31893 - DNA, 1857 bp, Thermotoga maritima; identical to SEQ ID NO: 4389
  CDS (1)..(1857)

SEQ ID NO: 31894 - protein, 618 aa, Thermotoga maritima; identical to SEQ ID NO: 4390

SEQ ID NO: 31895 - DNA, 1416 bp, Vibrio cholerae; identical to SEQ ID NO: 4391
  CDS (1)..(1416)

SEQ ID NO: 31896 - protein, 471 aa, Vibrio cholerae; identical to SEQ ID NO: 4392

SEQ ID NO: 31897 - DNA, 1434 bp, Pseudomonas aeruginosa; identical to SEQ ID NO: 4393
  CDS (1)..(1434)

SEQ ID NO: 31898 - protein, 477 aa, Pseudomonas aeruginosa; identical to SEQ ID NO: 4394

SEQ ID NO: 31899 - DNA, 1368 bp, Pseudomonas aeruginosa; identical to SEQ ID NO: 4395
  CDS (1)..(1368)

SEQ ID NO: 31900 - protein, 455 aa, Pseudomonas aeruginosa; identical to SEQ ID NO: 4396

SEQ ID NO: 31901 - DNA, 1455 bp, Agrobacterium tumefaciens; identical to SEQ ID NO: 4397
  CDS (1)..(1455)

SEQ ID NO: 31902 - protein, 484 aa, Agrobacterium tumefaciens; identical to SEQ ID NO: 4398

SEQ ID NO: 31903 - DNA, 1482 bp, Bacillus subtilis; identical to SEQ ID NO: 4399
  CDS (1)..(1482)

SEQ ID NO: 31904 - protein, 493 aa, Bacillus subtilis; identical to SEQ ID NO: 4400

SEQ ID NO: 31905 - DNA, 1407 bp, Thermotoga maritima; identical to SEQ ID NO: 4401
  CDS (1)..(1407)

SEQ ID NO: 31906 - protein, 468 aa, Thermotoga maritima; identical to SEQ ID NO: 4402

SEQ ID NO: 31907 - DNA, 1485 bp, Xylella fastidiosa; identical to SEQ ID NO: 4403
  CDS (1)..(1485)

SEQ ID NO: 31908 - protein, 494 aa, Xylella fastidiosa; identical to SEQ ID NO: 4404

SEQ ID NO: 31909 - DNA, 2065 bp, Thiobacillus ferrooxidans; identical to SEQ ID NO: 4405
  CDS (336)..(1733)

SEQ ID NO: 31910 - protein, 465 aa, Thiobacillus ferrooxidans; identical to SEQ ID NO: 4406

SEQ ID NO: 31911 - DNA, 7174 bp, Medicago sativa (alfalfa); identical to SEQ ID NO: 4407
  CDS (228)..(6812)

SEQ ID NO: 31912 - protein, 2194 aa, Medicago sativa (alfalfa); identical to SEQ ID NO: 4408

SEQ ID NO: 31913 - DNA, 7231 bp, Saccharomyces cerevisiae; identical to SEQ ID NO: 4409
  CDS (678)..(7115)

SEQ ID NO: 31914 - protein, 2145 aa, Saccharomyces cerevisiae; identical to SEQ ID NO: 4410

SEQ ID NO: 31915 - DNA, 1485 bp, Synechocystis sp; identical to SEQ ID NO: 4411
  CDS (1)..(1485)

SEQ ID NO: 31916 - protein, 494 aa, Synechocystis sp; identical to SEQ ID NO: 4412

SEQ ID NO: 31917 - DNA, 3255 bp, Caenorhabditis elegans; identical to SEQ ID NO: 4413
  CDS (1)..(3255)

SEQ ID NO: 31918 - protein, 1084 aa, Caenorhabditis elegans; identical to SEQ ID NO: 4414

SEQ ID NO: 31919 - DNA, 6624 bp, Caenorhabditis elegans; identical to SEQ ID NO: 4415
  CDS (1)..(6624)

SEQ ID NO: 31920 - protein, 2207 aa, Caenorhabditis elegans; identical to SEQ ID NO: 4416

SEQ ID NO: 31921 - DNA, 6351 bp, Neurospora crassa; identical to SEQ ID NO: 4417
  CDS (1)..(6351)

SEQ ID NO: 31922 - protein, 2116 aa, Neurospora crassa; identical to SEQ ID NO: 4418

SEQ ID NO: 31923 - DNA, 2387 bp, Rhodobacter sphaeroides; identical to SEQ ID NO: 4419
  CDS (587)..(1828)

SEQ ID NO: 31924 - protein, 413 aa, Rhodobacter sphaeroides; identical to SEQ ID NO: 4420

SEQ ID NO: 31925 - DNA, 1800 bp, Pyrococcus sp; identical to SEQ ID NO: 4421
  CDS (144)..(1589)

SEQ ID NO: 31926 - protein, 481 aa, Pyrococcus sp; identical to SEQ ID NO: 4422

SEQ ID NO: 31927 - DNA, 1332 bp, Rhodobacter capsulatus; identical to SEQ ID NO: 4423
  CDS (1)..(1332)

SEQ ID NO: 31928 - protein, 443 aa, Rhodobacter capsulatus; identical to SEQ ID NO: 4424

SEQ ID NO: 31929 - DNA, 4358 bp, Rattus norvegicus; identical to SEQ ID NO: 4425
  CDS (59)..(3136)

SEQ ID NO: 31930 - protein, 1025 aa, Rattus norvegicus; identical to SEQ ID NO: 4426

SEQ ID NO: 31931 - DNA, 2124 bp, Moorella thermoacetica; identical to SEQ ID NO: 4427
  CDS (1)..(2124)

SEQ ID NO: 31932 - protein, 707 aa, Moorella thermoacetica; identical to SEQ ID NO: 4428

SEQ ID NO: 31933 - DNA, 1479 bp, Plectonema boryanum; identical to SEQ ID NO: 4429
  CDS (1)..(1479)

SEQ ID NO: 31934 - protein, 492 aa, Plectonema boryanum; identical to SEQ ID NO: 4430

SEQ ID NO: 31935 - DNA, 2016 bp, Yersinia pseudotuberculosis IP 32953; identical to SEQ ID NO: 4431
  CDS (1)..(2016)

SEQ ID NO: 31936 - protein, 671 aa, Yersinia pseudotuberculosis IP 32953; identical to SEQ ID NO: 4432

SEQ ID NO: 31937 - DNA, 4160 bp, Xenopus laevis; identical to SEQ ID NO: 4433
  CDS (101)..(2923)

SEQ ID NO: 31938 - protein, 940 aa, Xenopus laevis; identical to SEQ ID NO: 4434

SEQ ID NO: 31939 - DNA, 2550 bp, Azoarcus sp; identical to SEQ ID NO: 4435
  CDS (1)..(2550)

SEQ ID NO: 31940 - protein, 849 aa, Azoarcus sp; identical to SEQ ID NO: 4436

SEQ ID NO: 31941 - DNA, 1473 bp, Propionibacterium acnes; identical to SEQ ID NO: 4437
  CDS (1)..(1473)

SEQ ID NO: 31942 - protein, 490 aa, Propionibacterium acnes; identical to SEQ ID NO: 4438

SEQ ID NO: 31943 - DNA, 1458 bp, Leifsonia xyli; identical to SEQ ID NO: 4439
  CDS (1)..(1458)

SEQ ID NO: 31944 - protein, 485 aa, Leifsonia xyli; identical to SEQ ID NO: 4440

SEQ ID NO: 31945 - DNA, 2328 bp, Desulfotalea psychrophila; identical to SEQ ID NO: 4441
  CDS (1)..(2328)

SEQ ID NO: 31946 - protein, 775 aa, Desulfotalea psychrophila; identical to SEQ ID NO: 4442

SEQ ID NO: 31947 - DNA, 1764 bp, Desulfotalea psychrophila; identical to SEQ ID NO: 4443
  CDS (1)..(1764)

SEQ ID NO: 31948 - protein, 587 aa, Desulfotalea psychrophila; identical to SEQ ID NO: 4444

SEQ ID NO: 31949 - DNA, 2226 bp, Desulfotalea psychrophila; identical to SEQ ID NO: 4445
  CDS (1)..(2226)

SEQ ID NO: 31950 - protein, 741 aa, Desulfotalea psychrophila; identical to SEQ ID NO: 4446

SEQ ID NO: 31951 - DNA, 6360 bp, Yarrowia lipolytica CLIB99; identical to SEQ ID NO: 4447
  CDS (1)..(6360)

SEQ ID NO: 31952 - protein, 2119 aa, Yarrowia lipolytica CLIB99; identical to SEQ ID NO: 4448

SEQ ID NO: 31953 - DNA, 6426 bp, Kluyveromyces lactis NRRL Y; identical to SEQ ID NO: 4449
  CDS (1)..(6426)

SEQ ID NO: 31954 - protein, 2141 aa, Kluyveromyces lactis NRRL Y; identical to SEQ ID NO: 4450

SEQ ID NO: 31955 - DNA, 2025 bp, Erwinia carotovora; identical to SEQ ID NO: 4451
  CDS (1)..(2025)

SEQ ID NO: 31956 - protein, 674 aa, Erwinia carotovora; identical to SEQ ID NO: 4452

SEQ ID NO: 31957 - DNA, 1419 bp, Erwinia carotovora; identical to SEQ ID NO: 4453
  CDS (1)..(1419)

SEQ ID NO: 31958 - protein, 472 aa, Erwinia carotovora; identical to SEQ ID NO: 4454

SEQ ID NO: 31959 - DNA, 1422 bp, Acinetobacter sp; identical to SEQ ID NO: 4455
  CDS (1)..(1422)

SEQ ID NO: 31960 - protein, 473 aa, Acinetobacter sp; identical to SEQ ID NO: 4456

SEQ ID NO: 31961 - DNA, 6459 bp, Candida glabrata CBS138; identical to SEQ ID NO: 4457
  CDS (1)..(6459)

SEQ ID NO: 31962 - protein, 2152 aa, Candida glabrata CBS138; identical to SEQ ID NO: 4458

SEQ ID NO: 31963 - DNA, 1464 bp, Staphylococcus aureus; identical to SEQ ID NO: 4459
  CDS (1)..(1464)

SEQ ID NO: 31964 - protein, 487 aa, Staphylococcus aureus; identical to SEQ ID NO: 4460

SEQ ID NO: 31965 - DNA, 1830 bp, Oryza sativa; identical to SEQ ID NO: 4461
  CDS (1)..(1830)

SEQ ID NO: 31966 - protein, 609 aa, Oryza sativa; identical to SEQ ID NO: 4462

SEQ ID NO: 31967 - DNA, 4185 bp, Photobacterium profundum; identical to SEQ ID NO: 4463
  CDS (1)..(4185)

SEQ ID NO: 31968 - protein, 1394 aa, Photobacterium profundum; identical to SEQ ID NO: 4464

SEQ ID NO: 31969 - DNA, 1611 bp, Photobacterium profundum; identical to SEQ ID NO: 4465
  CDS (1)..(1611)

SEQ ID NO: 31970 - protein, 536 aa, Photobacterium profundum; identical to SEQ ID NO: 4466

SEQ ID NO: 31971 - DNA, 3144 bp, Photobacterium profundum; identical to SEQ ID NO: 4467
  CDS (1)..(3144)

SEQ ID NO: 31972 - protein, 1047 aa, Photobacterium profundum; identical to SEQ ID NO: 4468

SEQ ID NO: 31973 - DNA, 1473 bp, Photobacterium profundum; identical to SEQ ID NO: 4469
  CDS (1)..(1473)

SEQ ID NO: 31974 - protein, 490 aa, Photobacterium profundum; identical to SEQ ID NO: 4470

SEQ ID NO: 31975 - DNA, 1413 bp, Photobacterium profundum; identical to SEQ ID NO: 4471
  CDS (1)..(1413)

SEQ ID NO: 31976 - protein, 470 aa, Photobacterium profundum; identical to SEQ ID NO: 4472

SEQ ID NO: 31977 - DNA, 2835 bp, Rhodopseudomonas palustris; identical to SEQ ID NO: 4473
  CDS (1)..(2835)

SEQ ID NO: 31978 - protein, 944 aa, Rhodopseudomonas palustris; identical to SEQ ID NO: 4474

SEQ ID NO: 31979 - DNA, 1455 bp, Rhodopseudomonas palustris; identical to SEQ ID NO: 4475
  CDS (1)..(1455)

SEQ ID NO: 31980 - protein, 484 aa, Rhodopseudomonas palustris; identical to SEQ ID NO: 4476

SEQ ID NO: 31981 - DNA, 3108 bp, Rhodopseudomonas palustris; identical to SEQ ID NO: 4477
  CDS (1)..(3108)

SEQ ID NO: 31982 - protein, 1035 aa, Rhodopseudomonas palustris; identical to SEQ ID NO: 4478

SEQ ID NO: 31983 - DNA, 2022 bp, Rhodopseudomonas palustris; identical to SEQ ID NO: 4479
  CDS (1)..(2022)

SEQ ID NO: 31984 - protein, 673 aa, Rhodopseudomonas palustris; identical to SEQ ID NO: 4480

SEQ ID NO: 31985 - DNA, 3593 bp, Brachydanio rerio; identical to SEQ ID NO: 4481
  CDS (36)..(3104)

SEQ ID NO: 31986 - protein, 1022 aa, Brachydanio rerio; identical to SEQ ID NO: 4482

SEQ ID NO: 31987 - DNA, 1440 bp, uncultured bacterium 314; identical to SEQ ID NO: 4483
  CDS (1)..(1440)

SEQ ID NO: 31988 - protein, 479 aa, uncultured bacterium 314; identical to SEQ ID NO: 4484

SEQ ID NO: 31989 - DNA, 2331 bp, Desulfovibrio vulgaris; identical to SEQ ID NO: 4485
  CDS (1)..(2331)

SEQ ID NO: 31990 - protein, 776 aa, Desulfovibrio vulgaris; identical to SEQ ID NO: 4486

SEQ ID NO: 31991 - DNA, 1431 bp, Desulfovibrio vulgaris; identical to SEQ ID NO: 4487
  CDS (1)..(1431)

SEQ ID NO: 31992 - protein, 476 aa, Desulfovibrio vulgaris; identical to SEQ ID NO: 4488

SEQ ID NO: 31993 - DNA, 2022 bp, Desulfovibrio vulgaris; identical to SEQ ID NO: 4489
  CDS (1)..(2022)

SEQ ID NO: 31994 - protein, 673 aa, Desulfovibrio vulgaris; identical to SEQ ID NO: 4490

SEQ ID NO: 31995 - DNA, 2745 bp, Treponema denticola; identical to SEQ ID NO: 4491
  CDS (1)..(2745)

SEQ ID NO: 31996 - protein, 914 aa, Treponema denticola; identical to SEQ ID NO: 4492

SEQ ID NO: 31997 - DNA, 1830 bp, Treponema denticola; identical to SEQ ID NO: 4493
  CDS (1)..(1830)

SEQ ID NO: 31998 - protein, 609 aa, Treponema denticola; identical to SEQ ID NO: 4494

SEQ ID NO: 31999 - DNA, 1512 bp, Treponema denticola; identical to SEQ ID NO: 4495
  CDS (1)..(1512)

SEQ ID NO: 32000 - protein, 503 aa, Treponema denticola; identical to SEQ ID NO: 4496

SEQ ID NO: 32001 - DNA, 1413 bp, Geobacter sulfurreducens; identical to SEQ ID NO: 4497
  CDS (1)..(1413)

SEQ ID NO: 32002 - protein, 470 aa, Geobacter sulfurreducens; identical to SEQ ID NO: 4498

SEQ ID NO: 32003 - DNA, 2019 bp, Geobacter sulfurreducens; identical to SEQ ID NO: 4499
  CDS (1)..(2019)

SEQ ID NO: 32004 - protein, 672 aa, Geobacter sulfurreducens; identical to SEQ ID NO: 4500

SEQ ID NO: 32005 - DNA, 6588 bp, Ashbya gossypii; identical to SEQ ID NO: 4501
  CDS (1)..(6588)

SEQ ID NO: 32006 - protein, 2195 aa, Ashbya gossypii; identical to SEQ ID NO: 4502

SEQ ID NO: 32007 - DNA, 1383 bp, Wolinella succinogenes; identical to SEQ ID NO: 4503
  CDS (1)..(1383)

SEQ ID NO: 32008 - protein, 460 aa, Wolinella succinogenes; identical to SEQ ID NO: 4504

SEQ ID NO: 32009 - DNA, 1950 bp, Wolinella succinogenes; identical to SEQ ID NO: 4505
  CDS (1)..(1950)

SEQ ID NO: 32010 - protein, 649 aa, Wolinella succinogenes; identical to SEQ ID NO: 4506

SEQ ID NO: 32011 - DNA, 4200 bp, Vibrio vulnificus; identical to SEQ ID NO: 4507
  CDS (1)..(4200)

SEQ ID NO: 32012 - protein, 1399 aa, Vibrio vulnificus; identical to SEQ ID NO: 4508

SEQ ID NO: 32013 - DNA, 1470 bp, Vibrio vulnificus; identical to SEQ ID NO: 4509
  CDS (1)..(1470)

SEQ ID NO: 32014 - protein, 489 aa, Vibrio vulnificus; identical to SEQ ID NO: 4510

SEQ ID NO: 32015 - DNA, 1389 bp, Porphyromonas gingivalis; identical to SEQ ID NO: 4511
  CDS (1)..(1389)

SEQ ID NO: 32016 - protein, 462 aa, Porphyromonas gingivalis; identical to SEQ ID NO: 4512

SEQ ID NO: 32017 - DNA, 1419 bp, Photorhabdus luminescens; identical to SEQ ID NO: 4513
  CDS (1)..(1419)

SEQ ID NO: 32018 - protein, 472 aa, Photorhabdus luminescens; identical to SEQ ID NO: 4514

SEQ ID NO: 32019 - DNA, 1431 bp, Chromobacterium violaceum; identical to SEQ ID NO: 4515
  CDS (1)..(1431)

SEQ ID NO: 32020 - protein, 476 aa, Chromobacterium violaceum; identical to SEQ ID NO: 4516

SEQ ID NO: 32021 - DNA, 1293 bp, Anopheles gambiae str; identical to SEQ ID NO: 4517
  CDS (1)..(1293)

SEQ ID NO: 32022 - protein, 430 aa, Anopheles gambiae str; identical to SEQ ID NO: 4518

SEQ ID NO: 32023 - DNA, 2733 bp, Giardia lamblia ATCC 50803; identical to SEQ ID NO: 4519
  CDS (1)..(2733)

SEQ ID NO: 32024 - protein, 910 aa, Giardia lamblia ATCC 50803; identical to SEQ ID NO: 4520

SEQ ID NO: 32025 - DNA, 8874 bp, Plasmodium yoelii yoelii; identical to SEQ ID NO: 4521
  CDS (1)..(8874)

SEQ ID NO: 32026 - protein, 2957 aa, Plasmodium yoelii yoelii; identical to SEQ ID NO: 4522

SEQ ID NO: 32027 - DNA, 1467 bp, Mycobacterium bovis; identical to SEQ ID NO: 4523
  CDS (1)..(1467)

SEQ ID NO: 32028 - protein, 488 aa, Mycobacterium bovis; identical to SEQ ID NO: 4524

SEQ ID NO: 32029 - DNA, 1503 bp, Rhodopirellula baltica; identical to SEQ ID NO: 4525
  CDS (1)..(1503)

SEQ ID NO: 32030 - protein, 500 aa, Rhodopirellula baltica; identical to SEQ ID NO: 4526

SEQ ID NO: 32031 - DNA, 1710 bp, Prochlorococcus marinus; identical to SEQ ID NO: 4527
  CDS (1)..(1710)

SEQ ID NO: 32032 - protein, 569 aa, Prochlorococcus marinus; identical to SEQ ID NO: 4528

SEQ ID NO: 32033 - DNA, 1479 bp, Bordetella parapertussis; identical to SEQ ID NO: 4529
  CDS (1)..(1479)

SEQ ID NO: 32034 - protein, 492 aa, Bordetella parapertussis; identical to SEQ ID NO: 4530

SEQ ID NO: 32035 - DNA, 1491 bp, Streptomyces avermitilis; identical to SEQ ID NO: 4531
  CDS (1)..(1491)

SEQ ID NO: 32036 - protein, 496 aa, Streptomyces avermitilis; identical to SEQ ID NO: 4532

SEQ ID NO: 32037 - DNA, 1461 bp, Streptomyces avermitilis; identical to SEQ ID NO: 4533
  CDS (1)..(1461)

SEQ ID NO: 32038 - protein, 486 aa, Streptomyces avermitilis; identical to SEQ ID NO: 4534

SEQ ID NO: 32039 - DNA, 3024 bp, Enterococcus faecalis; identical to SEQ ID NO: 4535
  CDS (19)..(3024)

SEQ ID NO: 32040 - protein, 1001 aa, Enterococcus faecalis; identical to SEQ ID NO: 4536

SEQ ID NO: 32041 - DNA, 1437 bp, Enterococcus faecalis; identical to SEQ ID NO: 4537
  CDS (19)..(1437)

SEQ ID NO: 32042 - protein, 472 aa, Enterococcus faecalis; identical to SEQ ID NO: 4538

SEQ ID NO: 32043 - DNA, 1239 bp, Shigella flexneri; identical to SEQ ID NO: 4539
  CDS (1)..(1239)

SEQ ID NO: 32044 - protein, 412 aa, Shigella flexneri; identical to SEQ ID NO: 4540

SEQ ID NO: 32045 - DNA, 1401 bp, Clostridium saccharobutylicum; identical to SEQ ID NO: 4541
  CDS (85)..(1329)

SEQ ID NO: 32046 - protein, 414 aa, Clostridium saccharobutylicum; identical to SEQ ID NO: 4542

SEQ ID NO: 32047 - DNA, 1347 bp, Brevibacillus agri; identical to SEQ ID NO: 4543
  CDS (1)..(1347)

SEQ ID NO: 32048 - protein, 448 aa, Brevibacillus agri; identical to SEQ ID NO: 4544

SEQ ID NO: 32049 - DNA, 3073 bp, Drosophila melanogaster; identical to SEQ ID NO: 4545
  CDS (966)..(2894)

SEQ ID NO: 32050 - protein, 642 aa, Drosophila melanogaster; identical to SEQ ID NO: 4546

SEQ ID NO: 32051 - DNA, 1485 bp, Xylella fastidiosa; identical to SEQ ID NO: 4547
  CDS (1)..(1485)

SEQ ID NO: 32052 - protein, 494 aa, Xylella fastidiosa; identical to SEQ ID NO: 4548

SEQ ID NO: 32053 - DNA, 4269 bp, Vibrio parahaemolyticus; identical to SEQ ID NO: 4549
  CDS (1)..(4269)

SEQ ID NO: 32054 - protein, 1422 aa, Vibrio parahaemolyticus; identical to SEQ ID NO: 4550

SEQ ID NO: 32055 - DNA, 1797 bp, Vibrio parahaemolyticus; identical to SEQ ID NO: 4551
  CDS (1)..(1797)

SEQ ID NO: 32056 - protein, 598 aa, Vibrio parahaemolyticus; identical to SEQ ID NO: 4552

SEQ ID NO: 32057 - DNA, 1470 bp, Vibrio parahaemolyticus; identical to SEQ ID NO: 4553
  CDS (1)..(1470)

SEQ ID NO: 32058 - protein, 489 aa, Vibrio parahaemolyticus; identical to SEQ ID NO: 4554

SEQ ID NO: 32059 - DNA, 1413 bp, Vibrio parahaemolyticus; identical to SEQ ID NO: 4555
  CDS (1)..(1413)

SEQ ID NO: 32060 - protein, 470 aa, Vibrio parahaemolyticus; identical to SEQ ID NO: 4556

SEQ ID NO: 32061 - DNA, 1419 bp, Pseudomonas syringae; identical to SEQ ID NO: 4557
  CDS (1)..(1419)

SEQ ID NO: 32062 - protein, 472 aa, Pseudomonas syringae; identical to SEQ ID NO: 4558

SEQ ID NO: 32063 - DNA, 1419 bp, Pseudomonas putida; identical to SEQ ID NO: 4559
  CDS (1)..(1419)

SEQ ID NO: 32064 - protein, 472 aa, Pseudomonas putida; identical to SEQ ID NO: 4560

SEQ ID NO: 32065 - DNA, 1368 bp, Pseudomonas putida; identical to SEQ ID NO: 4561
  CDS (1)..(1368)

SEQ ID NO: 32066 - protein, 455 aa, Pseudomonas putida; identical to SEQ ID NO: 4562

SEQ ID NO: 32067 - DNA, 1425 bp, Clostridium tetani; identical to SEQ ID NO: 4563
  CDS (1)..(1425)

SEQ ID NO: 32068 - protein, 474 aa, Clostridium tetani; identical to SEQ ID NO: 4564

SEQ ID NO: 32069 - DNA, 1272 bp, Clostridium tetani; identical to SEQ ID NO: 4565
  CDS (1)..(1272)

SEQ ID NO: 32070 - protein, 423 aa, Clostridium tetani; identical to SEQ ID NO: 4566

SEQ ID NO: 32071 - DNA, 1452 bp, Bradyrhizobium japonicum; identical to SEQ ID NO: 4567
  CDS (1)..(1452)

SEQ ID NO: 32072 - protein, 483 aa, Bradyrhizobium japonicum; identical to SEQ ID NO: 4568

SEQ ID NO: 32073 - DNA, 1800 bp, Bradyrhizobium japonicum; identical to SEQ ID NO: 4569
  CDS (1)..(1800)

SEQ ID NO: 32074 - protein, 599 aa, Bradyrhizobium japonicum; identical to SEQ ID NO: 4570

SEQ ID NO: 32075 - DNA, 2292 bp, Bacteroides thetaiotaomicron; identical to SEQ ID NO: 4571
  CDS (1)..(2292)

SEQ ID NO: 32076 - protein, 763 aa, Bacteroides thetaiotaomicron; identical to SEQ ID NO: 4572

SEQ ID NO: 32077 - DNA, 1341 bp, Bacteroides thetaiotaomicron; identical to SEQ ID NO: 4573
  CDS (1)..(1341)

SEQ ID NO: 32078 - protein, 446 aa, Bacteroides thetaiotaomicron; identical to SEQ ID NO: 4574

SEQ ID NO: 32079 - DNA, 4452 bp, Mus musculus; identical to SEQ ID NO: 4575
  CDS (100)..(3177)

SEQ ID NO: 32080 - protein, 1025 aa, Mus musculus; identical to SEQ ID NO: 4576

SEQ ID NO: 32081 - DNA, 1464 bp, Staphylococcus epidermidis; identical to SEQ ID NO: 4577
  CDS (1)..(1464)

SEQ ID NO: 32082 - protein, 487 aa, Staphylococcus epidermidis; identical to SEQ ID NO: 4578

SEQ ID NO: 32083 - DNA, 1437 bp, Streptococcus mutans; identical to SEQ ID NO: 4579
  CDS (1)..(1437)

SEQ ID NO: 32084 - protein, 478 aa, Streptococcus mutans; identical to SEQ ID NO: 4580

SEQ ID NO: 32085 - DNA, 1419 bp, Vibrio vulnificus; identical to SEQ ID NO: 4581
  CDS (1)..(1419)

SEQ ID NO: 32086 - protein, 472 aa, Vibrio vulnificus; identical to SEQ ID NO: 4582

SEQ ID NO: 32087 - DNA, 1407 bp, Shewanella oneidensis; identical to SEQ ID NO: 4583
  CDS (1)..(1407)

SEQ ID NO: 32088 - protein, 468 aa, Shewanella oneidensis; identical to SEQ ID NO: 4584

SEQ ID NO: 32089 - DNA, 4287 bp, Shewanella oneidensis; identical to SEQ ID NO: 4585
  CDS (1)..(4287)

SEQ ID NO: 32090 - protein, 1428 aa, Shewanella oneidensis; identical to SEQ ID NO: 4586

SEQ ID NO: 32091 - DNA, 1485 bp, Oceanobacillus iheyensis; identical to SEQ ID NO: 4587
  CDS (1)..(1485)

SEQ ID NO: 32092 - protein, 494 aa, Oceanobacillus iheyensis; identical to SEQ ID NO: 4588

SEQ ID NO: 32093 - DNA, 3099 bp, Escherichia coli O6; identical to SEQ ID NO: 4589
  CDS (1)..(3099)

SEQ ID NO: 32094 - protein, 1032 aa, Escherichia coli O6; identical to SEQ ID NO: 4590

SEQ ID NO: 32095 - DNA, 1980 bp, Escherichia coli O6; identical to SEQ ID NO: 4591
  CDS (1)..(1980)

SEQ ID NO: 32096 - protein, 659 aa, Escherichia coli O6; identical to SEQ ID NO: 4592

SEQ ID NO: 32097 - DNA, 1239 bp, Escherichia coli O6; identical to SEQ ID NO: 4593
  CDS (1)..(1239)

SEQ ID NO: 32098 - protein, 412 aa, Escherichia coli O6; identical to SEQ ID NO: 4594

SEQ ID NO: 32099 - DNA, 1527 bp, Corynebacterium efficiens; identical to SEQ ID NO: 4595
  CDS (1)..(1527)

SEQ ID NO: 32100 - protein, 508 aa, Corynebacterium efficiens; identical to SEQ ID NO: 4596

SEQ ID NO: 32101 - DNA, 1455 bp, Brucella suis; identical to SEQ ID NO: 4597
  CDS (1)..(1455)

SEQ ID NO: 32102 - protein, 484 aa, Brucella suis; identical to SEQ ID NO: 4598

SEQ ID NO: 32103 - DNA, 1506 bp, Brucella suis; identical to SEQ ID NO: 4599
  CDS (1)..(1506)

SEQ ID NO: 32104 - protein, 501 aa, Brucella suis; identical to SEQ ID NO: 4600

SEQ ID NO: 32105 - DNA, 1536 bp, Bifidobacterium longum; identical to SEQ ID NO: 4601
  CDS (1)..(1536)

SEQ ID NO: 32106 - protein, 511 aa, Bifidobacterium longum; identical to SEQ ID NO: 4602

SEQ ID NO: 32107 - DNA, 9321 bp, Plasmodium falciparum; identical to SEQ ID NO: 4603
  CDS (1)..(9321)

SEQ ID NO: 32108 - protein, 3106 aa, Plasmodium falciparum; identical to SEQ ID NO: 4604

SEQ ID NO: 32109 - DNA, 1734 bp, Chlorobium tepidum; identical to SEQ ID NO: 4605
  CDS (1)..(1734)

SEQ ID NO: 32110 - protein, 577 aa, Chlorobium tepidum; identical to SEQ ID NO: 4606

SEQ ID NO: 32111 - DNA, 1419 bp, Chlorobium tepidum; identical to SEQ ID NO: 4607
  CDS (1)..(1419)

SEQ ID NO: 32112 - protein, 472 aa, Chlorobium tepidum; identical to SEQ ID NO: 4608

SEQ ID NO: 32113 - DNA, 1473 bp, Chlorobium tepidum; identical to SEQ ID NO: 4609
  CDS (1)..(1473)

SEQ ID NO: 32114 - protein, 490 aa, Chlorobium tepidum; identical to SEQ ID NO: 4610

SEQ ID NO: 32115 - DNA, 1749 bp, Chlorobium tepidum; identical to SEQ ID NO: 4611
  CDS (1)..(1749)

SEQ ID NO: 32116 - protein, 582 aa, Chlorobium tepidum; identical to SEQ ID NO: 4612

SEQ ID NO: 32117 - DNA, 1521 bp, Corynebacterium glutamicum; identical to SEQ ID NO: 4613
  CDS (1)..(1521)

SEQ ID NO: 32118 - protein, 506 aa, Corynebacterium glutamicum; identical to SEQ ID NO: 4614

SEQ ID NO: 32119 - DNA, 1482 bp, Xanthomonas campestris; identical to SEQ ID NO: 4615
  CDS (1)..(1482)

SEQ ID NO: 32120 - protein, 493 aa, Xanthomonas campestris; identical to SEQ ID NO: 4616

SEQ ID NO: 32121 - DNA, 1482 bp, Xanthomonas axonopodis; identical to SEQ ID NO: 4617
  CDS (1)..(1482)

SEQ ID NO: 32122 - protein, 493 aa, Xanthomonas axonopodis; identical to SEQ ID NO: 4618

SEQ ID NO: 32123 - DNA, 1410 bp, Methanosarcina mazei; identical to SEQ ID NO: 4619
  CDS (1)..(1410)

SEQ ID NO: 32124 - protein, 469 aa, Methanosarcina mazei; identical to SEQ ID NO: 4620

SEQ ID NO: 32125 - DNA, 1401 bp, Thermoanaerobacter tengcongensis; identical to SEQ ID NO: 4621
  CDS (1)..(1401)

SEQ ID NO: 32126 - protein, 466 aa, Thermoanaerobacter tengcongensis; identical to SEQ ID NO: 4622

SEQ ID NO: 32127 - DNA, 1395 bp, Thermoanaerobacter tengcongensis; identical to SEQ ID NO: 4623
  CDS (1)..(1395)

SEQ ID NO: 32128 - protein, 464 aa, Thermoanaerobacter tengcongensis; identical to SEQ ID NO: 4624

SEQ ID NO: 32129 - DNA, 1410 bp, Methanosarcina acetivorans; identical to SEQ ID NO: 4625
  CDS (1)..(1410)

SEQ ID NO: 32130 - protein, 469 aa, Methanosarcina acetivorans; identical to SEQ ID NO: 4626

SEQ ID NO: 32131 - DNA, 1431 bp, Pyrococcus furiosus; identical to SEQ ID NO: 4627
  CDS (1)..(1431)

SEQ ID NO: 32132 - protein, 476 aa, Pyrococcus furiosus; identical to SEQ ID NO: 4628

SEQ ID NO: 32133 - DNA, 1425 bp, Pyrococcus furiosus; identical to SEQ ID NO: 4629
  CDS (1)..(1425)

SEQ ID NO: 32134 - protein, 474 aa, Pyrococcus furiosus; identical to SEQ ID NO: 4630

SEQ ID NO: 32135 - DNA, 2553 bp, Azoarcus evansii; identical to SEQ ID NO: 4631
  CDS (1)..(2553)

SEQ ID NO: 32136 - protein, 850 aa, Azoarcus evansii; identical to SEQ ID NO: 4632

SEQ ID NO: 32137 - DNA, 1242 bp, Clostridium perfringens; identical to SEQ ID NO: 4633
  CDS (1)..(1242)

SEQ ID NO: 32138 - protein, 413 aa, Clostridium perfringens; identical to SEQ ID NO: 4634

SEQ ID NO: 32139 - DNA, 1407 bp, Clostridium perfringens; identical to SEQ ID NO: 4635
  CDS (1)..(1407)

SEQ ID NO: 32140 - protein, 468 aa, Clostridium perfringens; identical to SEQ ID NO: 4636

SEQ ID NO: 32141 - DNA, 1464 bp, Ralstonia solanacearum; identical to SEQ ID NO: 4637
  CDS (1)..(1464)

SEQ ID NO: 32142 - protein, 487 aa, Ralstonia solanacearum; identical to SEQ ID NO: 4638

SEQ ID NO: 32143 - DNA, 1962 bp, Salmonella typhimurium; identical to SEQ ID NO: 4639
  CDS (1)..(1962)

SEQ ID NO: 32144 - protein, 653 aa, Salmonella typhimurium; identical to SEQ ID NO: 4640

SEQ ID NO: 32145 - DNA, 1437 bp, Rhizobium meliloti; identical to SEQ ID NO: 4641
  CDS (1)..(1437)

SEQ ID NO: 32146 - protein, 478 aa, Rhizobium meliloti; identical to SEQ ID NO: 4642

SEQ ID NO: 32147 - DNA, 1362 bp, Rhizobium meliloti; identical to SEQ ID NO: 4643
  CDS (1)..(1362)

SEQ ID NO: 32148 - protein, 453 aa, Rhizobium meliloti; identical to SEQ ID NO: 4644

SEQ ID NO: 32149 - DNA, 1428 bp, Klebsiella aerogenes; identical to SEQ ID NO: 4645
  CDS (10)..(1428)

SEQ ID NO: 32150 - protein, 472 aa, Klebsiella aerogenes; identical to SEQ ID NO: 4646

SEQ ID NO: 32151 - DNA, 1491 bp, Streptomyces coelicolor; identical to SEQ ID NO: 4647
  CDS (1)..(1491)

SEQ ID NO: 32152 - protein, 496 aa, Streptomyces coelicolor; identical to SEQ ID NO: 4648

SEQ ID NO: 32153 - DNA, 1455 bp, Thermoplasma volcanium; identical to SEQ ID NO: 4649
  CDS (1)..(1455)

SEQ ID NO: 32154 - protein, 484 aa, Thermoplasma volcanium; identical to SEQ ID NO: 4650

SEQ ID NO: 32155 - DNA, 1455 bp, Rhizobium loti; identical to SEQ ID NO: 4651
  CDS (1)..(1455)

SEQ ID NO: 32156 - protein, 484 aa, Rhizobium loti; identical to SEQ ID NO: 4652

SEQ ID NO: 32157 - DNA, 1356 bp, Rhizobium loti; identical to SEQ ID NO: 4653
  CDS (1)..(1356)

SEQ ID NO: 32158 - protein, 451 aa, Rhizobium loti; identical to SEQ ID NO: 4654

SEQ ID NO: 32159 - DNA, 1965 bp, Chromatium vinosum; identical to SEQ ID NO: 4655
  CDS (1)..(1965)

SEQ ID NO: 32160 - protein, 654 aa, Chromatium vinosum; identical to SEQ ID NO: 4656

SEQ ID NO: 32161 - DNA, 1455 bp, Thermoplasma acidophilum; identical to SEQ ID NO: 4657
  CDS (1)..(1455)

SEQ ID NO: 32162 - protein, 484 aa, Thermoplasma acidophilum; identical to SEQ ID NO: 4658

SEQ ID NO: 32163 - DNA, 6651 bp, Arabidopsis thaliana; identical to SEQ ID NO: 4659
  CDS (1)..(6651)

SEQ ID NO: 32164 - protein, 2216 aa, Arabidopsis thaliana; identical to SEQ ID NO: 4660

SEQ ID NO: 32165 - DNA, 1473 bp, Zymomonas mobilis; identical to SEQ ID NO: 4661
  CDS (1)..(1473)

SEQ ID NO: 32166 - protein, 490 aa, Zymomonas mobilis; identical to SEQ ID NO: 4662

SEQ ID NO: 32167 - DNA, 1473 bp, Clostridium saccharobutylicum; identical to SEQ ID NO: 4663
  CDS (1)..(1473)

SEQ ID NO: 32168 - protein, 490 aa, Clostridium saccharobutylicum; identical to SEQ ID NO: 4664

SEQ ID NO: 32169 - DNA, 1521 bp, Corynebacterium glutamicum; identical to SEQ ID NO: 4665
  CDS (1)..(1521)

SEQ ID NO: 32170 - protein, 506 aa, Corynebacterium glutamicum; identical to SEQ ID NO: 4666

SEQ ID NO: 32171 - DNA, 7037 bp, Oryza sativa; identical to SEQ ID NO: 4667
  CDS (262)..(6762)

SEQ ID NO: 32172 - protein, 2166 aa, Oryza sativa; identical to SEQ ID NO: 4668

SEQ ID NO: 32173 - DNA, 4421 bp, Bos taurus; identical to SEQ ID NO: 4669
  CDS (75)..(3152)

SEQ ID NO: 32174 - protein, 1025 aa, Bos taurus; identical to SEQ ID NO: 4670

SEQ ID NO: 32175 - DNA, 6336 bp, Schizosaccharomyces pombe; identical to SEQ ID NO: 4671
  CDS (1)..(6336)

SEQ ID NO: 32176 - protein, 2111 aa, Schizosaccharomyces pombe; identical to SEQ ID NO: 4672

SEQ ID NO: 32177 - DNA, 7056 bp, Saccharomyces cerevisiae; identical to SEQ ID NO: 4673
  CDS (263)..(6697)

SEQ ID NO: 32178 - protein, 2144 aa, Saccharomyces cerevisiae; identical to SEQ ID NO: 4674

SEQ ID NO: 32179 - DNA, 1449 bp, Azospirillum brasilense; identical to SEQ ID NO: 4675
  CDS (1)..(1449)

SEQ ID NO: 32180 - protein, 482 aa, Azospirillum brasilense; identical to SEQ ID NO: 4676

SEQ ID NO: 32181 - DNA, 27 bp, Artificial sequence
  Primer sequence
atgagtcagaatgtttatcaatttatc

SEQ ID NO: 32182 - DNA, 26 bp, Artificial sequence
  Primer sequence
ttaaacttccagccagttcataatac

SEQ ID NO: 32183 - protein, 313 aa, Artificial sequence; identical to SEQ ID NO: 6175
  Consensus
  Variant (3)..(6): Xaa in position 3 to 6 is any amino acid
  Variant (9)..(27): Xaa in position 9 to 27 is any amino acid
  Variant (29)..(35): Xaa in position 29 to 35 is any amino acid
  Variant (37)..(38): Xaa in position 37 to 38 is any amino acid
  Variant (40)..(42): Xaa in position 40 to 42 is any amino acid
  Variant (45)..(45): Xaa in position 45 is any amino acid
  Variant (48)..(74): Xaa in position 48 to 74 is any amino acid
  Variant (76)..(127): Xaa in position 76 to 127 is any amino acid
  Variant (129)..(130): Xaa in position 129 to 130 is any amino acid
  Variant (132)..(132): Xaa in position 132 is any amino acid
  Variant (138)..(139): Xaa in position 138 to 139 is any amino acid
  Variant (141)..(142): Xaa in position 141 to 142 is any amino acid
  Variant (144)..(146): Xaa in position 144 to 146 is any amino acid
  Variant (148)..(161): Xaa in position 148 to 161 is any amino acid
  Variant (164)..(167): Xaa in position 164 to 167 is any amino acid
  Variant (171)..(190): Xaa in position 171 to 190 is any amino acid
  Variant (192)..(200): Xaa in position 192 to 200 is any amino acid
  Variant (202)..(227): Xaa in position 202 to 227 is any amino acid
  Variant (229)..(233): Xaa in position 229 to 233 is any amino acid
  Variant (235)..(256): Xaa in position 235 to 256 is any amino acid
  Variant (258)..(260): Xaa in position 258 to 260 is any amino acid
  Variant (262)..(294): Xaa in position 262 to 294 is any amino acid
  Variant (296)..(296): Xaa in position 296 is any amino acid
  Variant (298)..(298): Xaa in position 298 is any amino acid
  Variant (302)..(302): Xaa in position 302 is any amino acid
  Variant (304)..(305): Xaa in position 304 to 305 is any amino acid
  Variant (307)..(312): Xaa in position 307 to 312 is any amino acid

SEQ ID NO: 32184 - protein, 48 aa, Artificial sequence; identical to SEQ ID NO: 6172
  Consensus
  Variant (1)..(1): Xaa in position 1 is Val, Ile or Ala
  Variant (2)..(2): Xaa in position 2 is Ala or Gly
  Variant (3)..(3): Xaa in position 3 is Ile, Val or Leu
  Variant (4)..(4): Xaa in position 4 is Ile, Val or Phe
  Variant (6)..(6): Xaa in position 6 is Ser, Ala, Gly or Cys
  Variant (9)..(9): Xaa in position 9 is Ala, Ser or Gly
  Variant (10)..(10): Xaa in position 10 is Gly or Ser
  Variant (11)..(11): Xaa in position 11 is Leu, Ile or Met
  Variant (12)..(13): Xaa in position 12 to 13 is any amino acid
  Variant (14)..(14): Xaa in position 14 is Ala, Ser or Gly
  Variant (15)..(16): Xaa in position 15 to 16 is any amino acid
  Variant (17)..(17): Xaa in position 17 is Leu or Met
  Variant (18)..(20): Xaa in position 18 to 20 is any amino acid
  Variant (22)..(25): Xaa in position 22 to 25 is any amino acid
  Variant (26)..(26): Xaa in position 26 is any or no amino acid
  Variant (27)..(27): Xaa in position 27 is Val, Ile or Leu
  Variant (28)..(28): Xaa in position 28 is Phe, Tyr or His
  Variant (29)..(29): Xaa in position 29 is Glu or Asp
  Variant (30)..(30): Xaa in position 30 is Arg, Ala, Lys, Glu or Ser
  Variant (31)..(34): Xaa in position 31 to 34 is any amino acid
  Variant (35)..(36): Xaa in position 35 to 36 is any or no amino acid
  Variant (39)..(42): Xaa in position 39 to 42 is any amino acid
  Variant (43)..(43): Xaa in position 43 is Gly, Glu or Ile
  Variant (44)..(44): Xaa in position 44 is Ile or Val
  Variant (45)..(45): Xaa in position 45 is Pro or Ala
  Variant (46)..(46): Xaa in position 46 is any amino acid
  Variant (47)..(47): Xaa in position 47 is Phe, Tyr, Met or Val
  Variant (48)..(48): Xaa in position 48 is Lys or Arg

SEQ ID NO: 32185 - protein, 19 aa, Artificial sequence
  Consensus
  Variant (1)..(1): Xaa in position 1 is Val, Ala, Thr, Leu or Ile
  Variant (2)..(2): Xaa in position 2 is Val, Ile, Ala or Leu
  Variant (3)..(3): Xaa in position 3 is Val or Ile
  Variant (4)..(4): Xaa in position 4 is Ile, Leu, Val or Phe
  Variant (6)..(6): Xaa in position 6 is Gly or Ala
  Variant (8)..(8): Xaa in position 8 is Asp, Asn, Phe or Met
  Variant (9)..(9): Xaa in position 9 is Thr or Val
  Variant (10)..(10): Xaa in position 10 is Ala or Gly
  Variant (11)..(11): Xaa in position 11 is any amino acid
  Variant (13)..(13): Xaa in position 13 is Cys, Ala, Val or Ser
  Variant (14)..(16): Xaa in position 14 to 16 is any amino acid
  Variant (17)..(17): Xaa in position 17 is Ala, Ser, Leu, Val or Met
  Variant (18)..(18): Xaa in position 18 is any amino acid
  Variant (19)..(19): Xaa in position 19 is Arg, Leu or Val
XXXXGXGXXXXDXXXXXXX

SEQ ID NO: 32186 - protein, 28 aa, Artificial sequence
  Consensus
  Variant (1)..(1): Xaa in position 1 is Val, Ile, Leu, Thr or Cys
  Variant (2)..(2): Xaa in position 2 is Phe, Tyr, Trp, Gly or Leu
  Variant (3)..(4): Xaa in position 3 to 4 is any amino acid
  Variant (5)..(5): Xaa in position 5 is Gly or Lys
  Variant (6)..(6): Xaa in position 6 is Asp or Arg
  Variant (7)..(9): Xaa in position 7 to 9 is any amino acid
  Variant (10)..(10): Xaa in position 10 is Gly or Cys
  Variant (11)..(12): Xaa in position 11 to 12 is any amino acid
  Variant (13)..(20): Xaa in position 13 to 20 is any or no amino acid
  Variant (21)..(21): Xaa in position 21 is Val, Ile, Ala, Thr or Leu
  Variant (22)..(22): Xaa in position 22 is Val, Ile or Leu
  Variant (23)..(23): Xaa in position 23 is any amino acid
  Variant (24)..(24): Xaa in position 24 is Ala, Gly, Cys or Ser
  Variant (25)..(25): Xaa in position 25 is Ile, Val, Met, Ala or Leu
  Variant (26)..(27): Xaa in position 26 to 27 is any amino acid
  Variant (28)..(28): Xaa in position 28 is Gly, Ile or Ala
XXXXXXXXXXXXXXXXXXXXXXXXXXXX

SEQ ID NO: 32187 - DNA, 723 bp, Escherichia coli K12; identical to SEQ ID NO: 2001
  CDS (1)..(723)

SEQ ID NO: 32188 - protein, 240 aa, Escherichia coli K12; identical to SEQ ID NO: 2002

SEQ ID NO: 32189 - DNA, 507 bp, Aquifex aeolicus; identical to SEQ ID NO: 2003
  CDS (1)..(507)

SEQ ID NO: 32190 - protein, 168 aa, Aquifex aeolicus; identical to SEQ ID NO: 2004

SEQ ID NO: 32191 - DNA, 717 bp, Deinococcus radiodurans; identical to SEQ ID NO: 2005
  CDS (1)..(717)

SEQ ID NO: 32192 - protein, 238 aa, Deinococcus radiodurans; identical to SEQ ID NO: 2006

SEQ ID NO: 32193 - DNA, 498 bp, Campylobacter jejuni; identical to SEQ ID NO: 2007
  CDS (1)..(498)

SEQ ID NO: 32194 - protein, 165 aa, Campylobacter jejuni; identical to SEQ ID NO: 2008

SEQ ID NO: 32195 - DNA, 546 bp, Salmonella enterica subsp. enterica serovar Typhi; identical to SEQ ID NO: 2009
  CDS (1)..(546)

SEQ ID NO: 32196 - protein, 181 aa, Salmonella enterica subsp. enterica serovar Typhi; identical to SEQ ID NO: 2010

SEQ ID NO: 32197 - DNA, 522 bp, Salmonella enterica subsp. enterica serovar Typhi; identical to SEQ ID NO: 2011
  CDS (1)..(522)

SEQ ID NO: 32198 - protein, 173 aa, Salmonella enterica subsp. enterica serovar Typhi; identical to SEQ ID NO: 2012

SEQ ID NO: 32199 - DNA, 474 bp, Listeria innocua; identical to SEQ ID NO: 2013
  CDS (1)..(474)

SEQ ID NO: 32200 - protein, 157 aa, Listeria innocua; identical to SEQ ID NO: 2014

SEQ ID NO: 32201 - DNA, 474 bp, Listeria monocytogenes; identical to SEQ ID NO: 2015
  CDS (1)..(474)

SEQ ID NO: 32202 - protein, 157 aa, Listeria monocytogenes; identical to SEQ ID NO: 2016

SEQ ID NO: 32203 - DNA, 525 bp, Yersinia pestis; identical to SEQ ID NO: 2017
  CDS (1)..(525)

SEQ ID NO: 32204 - protein, 174 aa, Yersinia pestis; identical to SEQ ID NO: 2018

SEQ ID NO: 32205 - DNA, 546 bp, Nostoc sp. PCC 7120; identical to SEQ ID NO: 2019
  CDS (1)..(546)

SEQ ID NO: 32206 - protein, 181 aa, Nostoc sp. PCC 7120; identical to SEQ ID NO: 2020

SEQ ID NO: 32207 - DNA, 1479 bp, Thermotoga maritima; identical to SEQ ID NO: 2021
  CDS (1)..(1479)

SEQ ID NO: 32208 - protein, 492 aa, Thermotoga maritima; identical to SEQ ID NO: 2022

SEQ ID NO: 32209 - DNA, 525 bp, Vibrio cholerae; identical to SEQ ID NO: 2023
  CDS (1)..(525)

SEQ ID NO: 32210 - protein, 174 aa, Vibrio cholerae; identical to SEQ ID NO: 2024

SEQ ID NO: 32211 - DNA, 531 bp, Chlamydophila pneumoniae, Chlamydia pneumoniae; identical to SEQ ID NO: 2025
  CDS (1)..(531)

SEQ ID NO: 32212 - protein, 176 aa, Chlamydophila pneumoniae, Chlamydia pneumoniae; identical to SEQ ID NO: 2026

SEQ ID NO: 32213 - DNA, 477 bp, Streptococcus pneumoniae; identical to SEQ ID NO: 2027
  CDS (1)..(477)

SEQ ID NO: 32214 - protein, 158 aa, Streptococcus pneumoniae; identical to SEQ ID NO: 2028

SEQ ID NO: 32215 - DNA, 477 bp, Streptococcus pneumoniae; identical to SEQ ID NO: 2029
  CDS (1)..(477)

SEQ ID NO: 32216 - protein, 158 aa, Streptococcus pneumoniae; identical to SEQ ID NO: 2030

SEQ ID NO: 32217 - DNA, 543 bp, Xylella fastidiosa; identical to SEQ ID NO: 2031
  CDS (1)..(543)

SEQ ID NO: 32218 - protein, 180 aa, Xylella fastidiosa; identical to SEQ ID NO: 2032

SEQ ID NO: 32219 - DNA, 552 bp, Bacillus halodurans; identical to SEQ ID NO: 2033
  CDS (1)..(552)

SEQ ID NO: 32220 - protein, 183 aa, Bacillus halodurans; identical to SEQ ID NO: 2034

SEQ ID NO: 32221 - DNA, 489 bp, Helicobacter pylori; identical to SEQ ID NO: 2035
  CDS (1)..(489)

SEQ ID NO: 32222 - protein, 162 aa, Helicobacter pylori; identical to SEQ ID NO: 2036

SEQ ID NO: 32223 - DNA, 600 bp, Mycobacterium leprae; identical to SEQ ID NO: 2037
  CDS (1)..(600)

SEQ ID NO: 32224 - protein, 199 aa, Mycobacterium leprae; identical to SEQ ID NO: 2038

SEQ ID NO: 32225 - DNA, 543 bp, Haemophilus influenzae; identical to SEQ ID NO: 2039
  CDS (1)..(543)

SEQ ID NO: 32226 - protein, 180 aa, Haemophilus influenzae; identical to SEQ ID NO: 2040

SEQ ID NO: 32227 - DNA, 513 bp, Neisseria meningitidis; identical to SEQ ID NO: 2041
  CDS (1)..(513)

SEQ ID NO: 32228 - protein, 170 aa, Neisseria meningitidis; identical to SEQ ID NO: 2042

SEQ ID NO: 32229 - DNA, 603 bp, Caulobacter crescentus; identical to SEQ ID NO: 2043
  CDS (1)..(603)

SEQ ID NO: 32230 - protein, 200 aa, Caulobacter crescentus; identical to SEQ ID NO: 2044

SEQ ID NO: 32231 - DNA, 531 bp, Mycobacterium tuberculosis; identical to SEQ ID NO: 2045
  CDS (1)..(531)

SEQ ID NO: 32232 - protein, 176 aa, Mycobacterium tuberculosis; identical to SEQ ID NO: 2046

SEQ ID NO: 32233 - DNA, 489 bp, Lactococcus lactis subsp. lactis; identical to SEQ ID NO: 2047
  CDS (1)..(489)

SEQ ID NO: 32234 - protein, 162 aa, Lactococcus lactis subsp. lactis; identical to SEQ ID NO: 2048

SEQ ID NO: 32235 - DNA, 498 bp, Clostridium acetobutylicum; identical to SEQ ID NO: 2049
  CDS (1)..(498)

SEQ ID NO: 32236 - protein, 165 aa, Clostridium acetobutylicum; identical to SEQ ID NO: 2050

SEQ ID NO: 32237 - DNA, 519 bp, Pseudomonas aeruginosa; identical to SEQ ID NO: 2051
  CDS (1)..(519)

SEQ ID NO: 32238 - protein, 172 aa, Pseudomonas aeruginosa; identical to SEQ ID NO: 2052

SEQ ID NO: 32239 - DNA, 522 bp, Buchnera sp; identical to SEQ ID NO: 2053
  CDS (1)..(522)

SEQ ID NO: 32240 - protein, 173 aa, Buchnera sp; identical to SEQ ID NO: 2054

SEQ ID NO: 32241 - DNA, 501 bp, Agrobacterium tumefaciens; identical to SEQ ID NO: 2055
  CDS (1)..(501)

SEQ ID NO: 32242 - protein, 166 aa, Agrobacterium tumefaciens; identical to SEQ ID NO: 2056

SEQ ID NO: 32243 - DNA, 561 bp, Bacillus subtilis; identical to SEQ ID NO: 2057
  CDS (1)..(561)

SEQ ID NO: 32244 - protein, 186 aa, Bacillus subtilis; identical to SEQ ID NO: 2058

SEQ ID NO: 32245 - DNA, 810 bp, Escherichia coli; identical to SEQ ID NO: 2059
  CDS (286)..(810)

SEQ ID NO: 32246 - protein, 174 aa, Escherichia coli; identical to SEQ ID NO: 2060

SEQ ID NO: 32247 - DNA, 522 bp, Erwinia chrysanthemi; identical to SEQ ID NO: 2061
  CDS (1)..(522)

SEQ ID NO: 32248 - protein, 173 aa, Erwinia chrysanthemi; identical to SEQ ID NO: 2062

SEQ ID NO: 32249 - DNA, 1293 bp, Lycopersicon esculentum (tomato); identical to SEQ ID NO: 2063
  CDS (123)..(1025)

SEQ ID NO: 32250 - protein, 300 aa, Lycopersicon esculentum (tomato); identical to SEQ ID NO: 2064

SEQ ID NO: 32251 - DNA, 489 bp, Lactococcus lactis; identical to SEQ ID NO: 2065
  CDS (1)..(489)

SEQ ID NO: 32252 - protein, 162 aa, Lactococcus lactis; identical to SEQ ID NO: 2066

SEQ ID NO: 32253 - DNA, 570 bp, Synechocystis sp; identical to SEQ ID NO: 2067
  CDS (1)..(570)

SEQ ID NO: 32254 - protein, 189 aa, Synechocystis sp; identical to SEQ ID NO: 2068

SEQ ID NO: 32255 - DNA, 693 bp, Corynebacterium glutamicum; identical to SEQ ID NO: 2069
  CDS (101)..(673)

SEQ ID NO: 32256 - protein, 190 aa, Corynebacterium glutamicum; identical to SEQ ID NO: 2070

SEQ ID NO: 32257 - DNA, 522 bp, Erwinia carotovora subsp; identical to SEQ ID NO: 2071
  CDS (1)..(522)

SEQ ID NO: 32258 - protein, 173 aa, Erwinia carotovora subsp; identical to SEQ ID NO: 2072

SEQ ID NO: 32259 - DNA, 522 bp, Erwinia carotovora subsp; identical to SEQ ID NO: 2073
  CDS (1)..(522)

SEQ ID NO: 32260 - protein, 173 aa, Erwinia carotovora subsp; identical to SEQ ID NO: 2074

SEQ ID NO: 32261 - DNA, 543 bp, Acinetobacter sp; identical to SEQ ID NO: 2075
  CDS (1)..(543)

SEQ ID NO: 32262 - protein, 180 aa, Acinetobacter sp; identical to SEQ ID NO: 2076

SEQ ID NO: 32263 - DNA, 633 bp, Bartonella quintana; identical to SEQ ID NO: 2077
  CDS (1)..(633)

SEQ ID NO: 32264 - protein, 210 aa, Bartonella quintana; identical to SEQ ID NO: 2078

SEQ ID NO: 32265 - DNA, 633 bp, Bartonella henselae; identical to SEQ ID NO: 2079
  CDS (1)..(633)

SEQ ID NO: 32266 - protein, 210 aa, Bartonella henselae; identical to SEQ ID NO: 2080

SEQ ID NO: 32267 - DNA, 525 bp, Staphylococcus aureus subsp; identical to SEQ ID NO: 2081
  CDS (1)..(525)

SEQ ID NO: 32268 - protein, 174 aa, Staphylococcus aureus subsp; identical to SEQ ID NO: 2082

SEQ ID NO: 32269 - DNA, 528 bp, Photobacterium profundum; identical to SEQ ID NO: 2083
  CDS (1)..(528)

SEQ ID NO: 32270 - protein, 175 aa, Photobacterium profundum; identical to SEQ ID NO: 2084

SEQ ID NO: 32271 - DNA, 612 bp, Parachlamydia sp; identical to SEQ ID NO: 2085
  CDS (1)..(612)

SEQ ID NO: 32272 - protein, 203 aa, Parachlamydia sp; identical to SEQ ID NO: 2086

SEQ ID NO: 32273 - DNA, 918 bp, Rhodopseudomonas palustris; identical to SEQ ID NO: 2087
  CDS (1)..(918)

SEQ ID NO: 32274 - protein, 305 aa, Rhodopseudomonas palustris; identical to SEQ ID NO: 2088

SEQ ID NO: 32275 - DNA, 612 bp, Rhodopseudomonas palustris; identical to SEQ ID NO: 2089
  CDS (1)..(612)

SEQ ID NO: 32276 - protein, 203 aa, Rhodopseudomonas palustris; identical to SEQ ID NO: 2090

SEQ ID NO: 32277 - DNA, 522 bp, Corynebacterium diphtheriae; identical to SEQ ID NO: 2091
  CDS (1)..(522)

SEQ ID NO: 32278 - protein, 173 aa, Corynebacterium diphtheriae; identical to SEQ ID NO: 2092

SEQ ID NO: 32279 - DNA, 543 bp, Desulfovibrio vulgaris; identical to SEQ ID NO: 2093
  CDS (1)..(543)

SEQ ID NO: 32280 - protein, 180 aa, Desulfovibrio vulgaris; identical to SEQ ID NO: 2094

SEQ ID NO: 32281 - DNA, 528 bp, Desulfovibrio vulgaris; identical to SEQ ID NO: 2095
  CDS (1)..(528)

SEQ ID NO: 32282 - protein, 175 aa, Desulfovibrio vulgaris; identical to SEQ ID NO: 2096

SEQ ID NO: 32283 - DNA, 555 bp, Thermus thermophilus; identical to SEQ ID NO: 2097
  CDS (1)..(555)

SEQ ID NO: 32284 - protein, 184 aa, Thermus thermophilus; identical to SEQ ID NO: 2098

SEQ ID NO: 32285 - DNA, 513 bp, Bacillus cereus; identical to SEQ ID NO: 2099
  CDS (1)..(513)

SEQ ID NO: 32286 - protein, 170 aa, Bacillus cereus; identical to SEQ ID NO: 2100

SEQ ID NO: 32287 - DNA, 531 bp, Mycobacterium paratuberculosis; identical to SEQ ID NO: 2101
  CDS (1)..(531)

SEQ ID NO: 32288 - protein, 176 aa, Mycobacterium paratuberculosis; identical to SEQ ID NO: 2102

SEQ ID NO: 32289 - DNA, 528 bp, Geobacter sulfurreducens; identical to SEQ ID NO: 2103
  CDS (1)..(528)

SEQ ID NO: 32290 - protein, 175 aa, Geobacter sulfurreducens; identical to SEQ ID NO: 2104

SEQ ID NO: 32291 - DNA, 540 bp, Leptospira interrogans; identical to SEQ ID NO: 2105
  CDS (1)..(540)

SEQ ID NO: 32292 - protein, 179 aa, Leptospira interrogans; identical to SEQ ID NO: 2106

SEQ ID NO: 32293 - DNA, 501 bp, Wolinella succinogenes; identical to SEQ ID NO: 2107
  CDS (1)..(501)

SEQ ID NO: 32294 - protein, 166 aa, Wolinella succinogenes; identical to SEQ ID NO: 2108

SEQ ID NO: 32295 - DNA, 561 bp, Porphyromonas gingivalis; identical to SEQ ID NO: 2109
  CDS (1)..(561)

SEQ ID NO: 32296 - protein, 186 aa, Porphyromonas gingivalis; identical to SEQ ID NO: 2110

SEQ ID NO: 32297 - DNA, 525 bp, Photorhabdus luminescens; identical to SEQ ID NO: 2111
  CDS (1)..(525)

SEQ ID NO: 32298 - protein, 174 aa, Photorhabdus luminescens; identical to SEQ ID NO: 2112

SEQ ID NO: 32299 - DNA, 534 bp, Gloeobacter violaceus; identical to SEQ ID NO: 2113
  CDS (1)..(534)

SEQ ID NO: 32300 - protein, 177 aa, Gloeobacter violaceus; identical to SEQ ID NO: 2114

SEQ ID NO: 32301 - DNA, 555 bp, Chromobacterium violaceum; identical to SEQ ID NO: 2115
  CDS (1)..(555)

SEQ ID NO: 32302 - protein, 184 aa, Chromobacterium violaceum; identical to SEQ ID NO: 2116

SEQ ID NO: 32303 - DNA, 576 bp, Synechococcus sp; identical to SEQ ID NO: 2117
  CDS (1)..(576)

SEQ ID NO: 32304 - protein, 191 aa, Synechococcus sp; identical to SEQ ID NO: 2118

SEQ ID NO: 32305 - DNA, 564 bp, Rhodopirellula baltica; identical to SEQ ID NO: 2119
  CDS (1)..(564)

SEQ ID NO: 32306 - protein, 187 aa, Rhodopirellula baltica; identical to SEQ ID NO: 2120

SEQ ID NO: 32307 - DNA, 558 bp, Prochlorococcus marinus subsp; identical to SEQ ID NO: 2121
  CDS (1)..(558)

SEQ ID NO: 32308 - protein, 185 aa, Prochlorococcus marinus subsp; identical to SEQ ID NO: 2122

SEQ ID NO: 32309 - DNA, 579 bp, Prochlorococcus marinus; identical to SEQ ID NO: 2123
  CDS (1)..(579)

SEQ ID NO: 32310 - protein, 192 aa, Prochlorococcus marinus; identical to SEQ ID NO: 2124

SEQ ID NO: 32311 - DNA, 573 bp, Prochlorococcus marinus; identical to SEQ ID NO: 2125
  CDS (1)..(573)

SEQ ID NO: 32312 - protein, 190 aa, Prochlorococcus marinus; identical to SEQ ID NO: 2126

SEQ ID NO: 32313 - DNA, 558 bp, Candidatus Blochmannia floridanus; identical to SEQ ID NO: 2127
  CDS (1)..(558)

SEQ ID NO: 32314 - protein, 185 aa, Candidatus Blochmannia floridanus; identical to SEQ ID NO: 2128

SEQ ID NO: 32315 - DNA, 636 bp, Bordetella bronchiseptica; identical to SEQ ID NO: 2129
  CDS (1)..(636)

SEQ ID NO: 32316 - protein, 211 aa, Bordetella bronchiseptica; identical to SEQ ID NO: 2130

SEQ ID NO: 32317 - DNA, 864 bp, Oryza sativa; identical to SEQ ID NO: 2131
  CDS (1)..(864)

SEQ ID NO: 32318 - protein, 287 aa, Oryza sativa; identical to SEQ ID NO: 2132

SEQ ID NO: 32319 - DNA, 471 bp, Bacillus cereus; identical to SEQ ID NO: 2133
  CDS (1)..(471)

SEQ ID NO: 32320 - protein, 156 aa, Bacillus cereus; identical to SEQ ID NO: 2134

SEQ ID NO: 32321 - DNA, 498 bp, Bacillus anthracis; identical to SEQ ID NO: 2135
  CDS (1)..(498)

SEQ ID NO: 32322 - protein, 165 aa, Bacillus anthracis; identical to SEQ ID NO: 2136

SEQ ID NO: 32323 - DNA, 522 bp, Chlamydophila caviae; identical to SEQ ID NO: 2137
  CDS (1)..(522)

SEQ ID NO: 32324 - protein, 173 aa, Chlamydophila caviae; identical to SEQ ID NO: 2138

SEQ ID NO: 32325 - DNA, 516 bp, Streptomyces avermitilis; identical to SEQ ID NO: 2139
  CDS (1)..(516)

SEQ ID NO: 32326 - protein, 171 aa, Streptomyces avermitilis; identical to SEQ ID NO: 2140

SEQ ID NO: 32327 - DNA, 636 bp, Nitrosomonas europaea; identical to SEQ ID NO: 2141
  CDS (1)..(636)

SEQ ID NO: 32328 - protein, 211 aa, Nitrosomonas europaea; identical to SEQ ID NO: 2142

SEQ ID NO: 32329 - DNA, 507 bp, Enterococcus faecalis; identical to SEQ ID NO: 2143
  CDS (1)..(507)

SEQ ID NO: 32330 - protein, 168 aa, Enterococcus faecalis; identical to SEQ ID NO: 2144

SEQ ID NO: 32331 - DNA, 540 bp, Coxiella burnetii; identical to SEQ ID NO: 2145
  CDS (1)..(540)

SEQ ID NO: 32332 - protein, 179 aa, Coxiella burnetii; identical to SEQ ID NO: 2146

SEQ ID NO: 32333 - DNA, 510 bp, Tropheryma whipplei; identical to SEQ ID NO: 2147
  CDS (1)..(510)

SEQ ID NO: 32334 - protein, 169 aa, Tropheryma whipplei; identical to SEQ ID NO: 2148

SEQ ID NO: 32335 - DNA, 468 bp, Shigella flexneri; identical to SEQ ID NO: 2149
  CDS (1)..(468)

SEQ ID NO: 32336 - protein, 155 aa, Shigella flexneri; identical to SEQ ID NO: 2150

SEQ ID NO: 32337 - DNA, 903 bp, Azoarcus evansii; identical to SEQ ID NO: 2151
  CDS (1)..(903)

SEQ ID NO: 32338 - protein, 300 aa, Azoarcus evansii; identical to SEQ ID NO: 2152

SEQ ID NO: 32339 - DNA, 522 bp, Lactobacillus plantarum; identical to SEQ ID NO: 2153
  CDS (1)..(522)

SEQ ID NO: 32340 - protein, 173 aa, Lactobacillus plantarum; identical to SEQ ID NO: 2154

SEQ ID NO: 32341 - DNA, 504 bp, Clostridium tetani; identical to SEQ ID NO: 2155
  CDS (1)..(504)

SEQ ID NO: 32342 - protein, 167 aa, Clostridium tetani; identical to SEQ ID NO: 2156

SEQ ID NO: 32343 - DNA, 909 bp, Bradyrhizobium japonicum; identical to SEQ ID NO: 2157
  CDS (1)..(909)

SEQ ID NO: 32344 - protein, 302 aa, Bradyrhizobium japonicum; identical to SEQ ID NO: 2158

SEQ ID NO: 32345 - DNA, 735 bp, Bradyrhizobium japonicum; identical to SEQ ID NO: 2159
  CDS (1)..(735)

SEQ ID NO: 32346 - protein, 244 aa, Bradyrhizobium japonicum; identical to SEQ ID NO: 2160

SEQ ID NO: 32347 - DNA, 528 bp, Bacteroides thetaiotaomicron; identical to SEQ ID NO: 2161
  CDS (1)..(528)

SEQ ID NO: 32348 - protein, 175 aa, Bacteroides thetaiotaomicron; identical to SEQ ID NO: 2162

SEQ ID NO: 32349 - DNA, 477 bp, Streptococcus mutans; identical to SEQ ID NO: 2163
  CDS (1)..(477)

SEQ ID NO: 32350 - protein, 158 aa, Streptococcus mutans; identical to SEQ ID NO: 2164

SEQ ID NO: 32351 - DNA, 513 bp, Streptococcus agalactiae; identical to SEQ ID NO: 2165
  CDS (1)..(513)

SEQ ID NO: 32352 - protein, 170 aa, Streptococcus agalactiae; identical to SEQ ID NO: 2166

SEQ ID NO: 32353 - DNA, 603 bp, Brucella suis; identical to SEQ ID NO: 2167
  CDS (1)..(603)

SEQ ID NO: 32354 - protein, 200 aa, Brucella suis; identical to SEQ ID NO: 2168

SEQ ID NO: 32355 - DNA, 912 bp, Thauera aromatica; identical to SEQ ID NO: 2169
  CDS (1)..(912)

SEQ ID NO: 32356 - protein, 303 aa, Thauera aromatica; identical to SEQ ID NO: 2170

SEQ ID NO: 32357 - DNA, 1300 bp, Arabidopsis thaliana; identical to SEQ ID NO: 2171
  CDS (113)..(1024)

SEQ ID NO: 32358 - protein, 303 aa, Arabidopsis thaliana; identical to SEQ ID NO: 2172

SEQ ID NO: 32359 - DNA, 903 bp, Arabidopsis thaliana; identical to SEQ ID NO: 2173
  CDS (1)..(903)

SEQ ID NO: 32360 - protein, 300 aa, Arabidopsis thaliana; identical to SEQ ID NO: 2174

SEQ ID NO: 32361 - DNA, 576 bp, Chlorobium tepidum; identical to SEQ ID NO: 2175
  CDS (1)..(576)

SEQ ID NO: 32362 - protein, 191 aa, Chlorobium tepidum; identical to SEQ ID NO: 2176

SEQ ID NO: 32363 - DNA, 492 bp, Streptococcus pyogenes; identical to SEQ ID NO: 2177
  CDS (1)..(492)

SEQ ID NO: 32364 - protein, 163 aa, Streptococcus pyogenes; identical to SEQ ID NO: 2178

SEQ ID NO: 32365 - DNA, 543 bp, Xanthomonas campestris; identical to SEQ ID NO: 2179
  CDS (1)..(543)

SEQ ID NO: 32366 - protein, 180 aa, Xanthomonas campestris; identical to SEQ ID NO: 2180

SEQ ID NO: 32367 - DNA, 543 bp, Xanthomonas axonopodis; identical to SEQ ID NO: 2181
  CDS (1)..(543)

SEQ ID NO: 32368 - protein, 180 aa, Xanthomonas axonopodis; identical to SEQ ID NO: 2182

SEQ ID NO: 32369 - DNA, 531 bp, Methanosarcina mazei; identical to SEQ ID NO: 2183
  CDS (1)..(531)

SEQ ID NO: 32370 - protein, 176 aa, Methanosarcina mazei; identical to SEQ ID NO: 2184

SEQ ID NO: 32371 - DNA, 516 bp, Thermoanaerobacter tengcongensis; identical to SEQ ID NO: 2185
  CDS (1)..(516)

SEQ ID NO: 32372 - protein, 171 aa, Thermoanaerobacter tengcongensis; identical to SEQ ID NO: 2186

SEQ ID NO: 32373 - DNA, 519 bp, Fusobacterium nucleatum; identical to SEQ ID NO: 2187
  CDS (1)..(519)

SEQ ID NO: 32374 - protein, 172 aa, Fusobacterium nucleatum; identical to SEQ ID NO: 2188

SEQ ID NO: 32375 - DNA, 528 bp, Methanosarcina acetivorans; identical to SEQ ID NO: 2189
  CDS (1)..(528)

SEQ ID NO: 32376 - protein, 175 aa, Methanosarcina acetivorans; identical to SEQ ID NO: 2190

SEQ ID NO: 32377 - DNA, 516 bp, Clostridium perfringens; identical to SEQ ID NO: 2191
  CDS (1)..(516)

SEQ ID NO: 32378 - protein, 171 aa, Clostridium perfringens; identical to SEQ ID NO: 2192

SEQ ID NO: 32379 - DNA, 573 bp, Ralstonia solanacearum; identical to SEQ ID NO: 2193
  CDS (1)..(573)

SEQ ID NO: 32380 - protein, 190 aa, Ralstonia solanacearum; identical to SEQ ID NO: 2194

SEQ ID NO: 32381 - DNA, 579 bp, Rhizobium meliloti; identical to SEQ ID NO: 2195
  CDS (1)..(579)

SEQ ID NO: 32382 - protein, 192 aa, Rhizobium meliloti; identical to SEQ ID NO: 2196

SEQ ID NO: 32383 - DNA, 7122 bp, Rhizobium loti; identical to SEQ ID NO: 2197
  CDS (1)..(7122)

SEQ ID NO: 32384 - protein, 2373 aa, Rhizobium loti; identical to SEQ ID NO: 2198

SEQ ID NO: 32385 - DNA, 612 bp, Rhizobium loti; identical to SEQ ID NO: 2199
  CDS (1)..(612)

SEQ ID NO: 32386 - protein, 203 aa, Rhizobium loti; identical to SEQ ID NO: 2200

SEQ ID NO: 32387 - DNA, 516 bp, Streptomyces coelicolor; identical to SEQ ID NO: 2201
  CDS (1)..(516)

SEQ ID NO: 32388 - protein, 171 aa, Streptomyces coelicolor; identical to SEQ ID NO: 2202

SEQ ID NO: 32389 - DNA, 843 bp, Arabidopsis thaliana; identical to SEQ ID NO: 2203
  CDS (1)..(843)

SEQ ID NO: 32390 - protein, 280 aa, Arabidopsis thaliana; identical to SEQ ID NO: 2204

SEQ ID NO: 32391 - DNA, 1623 bp, Bifidobacterium longum; identical to SEQ ID NO: 2205
  CDS (1)..(1623)

SEQ ID NO: 32392 - protein, 540 aa, Bifidobacterium longum; identical to SEQ ID NO: 2206

SEQ ID NO: 32393 - DNA, 525 bp, Buchnera aphidicola; identical to SEQ ID NO: 2207
  CDS (1)..(525)

SEQ ID NO: 32394 - protein, 174 aa, Buchnera aphidicola; identical to SEQ ID NO: 2208

SEQ ID NO: 32395 - DNA, 510 bp, Corynebacterium efficiens; identical to SEQ ID NO: 2209
  CDS (1)..(510)

SEQ ID NO: 32396 - protein, 169 aa, Corynebacterium efficiens; identical to SEQ ID NO: 2210

SEQ ID NO: 32397 - DNA, 525 bp, Haemophilus ducreyi; identical to SEQ ID NO: 2211
  CDS (1)..(525)

SEQ ID NO: 32398 - protein, 174 aa, Haemophilus ducreyi; identical to SEQ ID NO: 2212

SEQ ID NO: 32399 - DNA, 504 bp, Helicobacter hepaticus; identical to SEQ ID NO: 2213
  CDS (1)..(504)

SEQ ID NO: 32400 - protein, 167 aa, Helicobacter hepaticus; identical to SEQ ID NO: 2214

SEQ ID NO: 32401 - DNA, 552 bp, Oceanobacillus iheyensis; identical to SEQ ID NO: 2215
  CDS (1)..(552)

SEQ ID NO: 32402 - protein, 183 aa, Oceanobacillus iheyensis; identical to SEQ ID NO: 2216

SEQ ID NO: 32403 - DNA, 528 bp, Pasteurella multocida; identical to SEQ ID NO: 2217
  CDS (1)..(528)

SEQ ID NO: 32404 - protein, 175 aa, Pasteurella multocida; identical to SEQ ID NO: 2218

SEQ ID NO: 32405 - DNA, 522 bp, Photorhabdus luminescens; identical to SEQ ID NO: 2219
  CDS (1)..(522)

SEQ ID NO: 32406 - protein, 173 aa, Photorhabdus luminescens; identical to SEQ ID NO: 2220

SEQ ID NO: 32407 - DNA, 519 bp, Pseudomonas putida; identical to SEQ ID NO: 2221
  CDS (1)..(519)

SEQ ID NO: 32408 - protein, 172 aa, Pseudomonas putida; identical to SEQ ID NO: 2222

SEQ ID NO: 32409 - DNA, 519 bp, Pseudomonas syringae; identical to SEQ ID NO: 2223
  CDS (1)..(519)

SEQ ID NO: 32410 - protein, 172 aa, Pseudomonas syringae; identical to SEQ ID NO: 2224

SEQ ID NO: 32411 - DNA, 516 bp, Shewanella oneidensis; identical to SEQ ID NO: 2225
  CDS (1)..(516)

SEQ ID NO: 32412 - protein, 171 aa, Shewanella oneidensis; identical to SEQ ID NO: 2226

SEQ ID NO: 32413 - DNA, 519 bp, Staphylococcus epidermidis; identical to SEQ ID NO: 2227
  CDS (7)..(519)

SEQ ID NO: 32414 - protein, 170 aa, Staphylococcus epidermidis; identical to SEQ ID NO: 2228

SEQ ID NO: 32415 - DNA, 552 bp, Synechococcus elongatus; identical to SEQ ID NO: 2229
  CDS (1)..(552)

SEQ ID NO: 32416 - protein, 183 aa, Synechococcus elongatus; identical to SEQ ID NO: 2230

SEQ ID NO: 32417 - DNA, 519 bp, Vibrio parahaemolyticus; identical to SEQ ID NO: 2231
  CDS (1)..(519)

SEQ ID NO: 32418 - protein, 172 aa, Vibrio parahaemolyticus; identical to SEQ ID NO: 2232

SEQ ID NO: 32419 - DNA, 519 bp, Vibrio vulnificus; identical to SEQ ID NO: 2233
  CDS (1)..(519)

SEQ ID NO: 32420 - protein, 172 aa, Vibrio vulnificus; identical to SEQ ID NO: 2234

SEQ ID NO: 32421 - DNA, 522 bp, Wigglesworthia glossinidia brevipalpis; identical to SEQ ID NO: 2235
  CDS (1)..(522)

SEQ ID NO: 32422 - protein, 173 aa, Wigglesworthia glossinidia brevipalpis; identical to SEQ ID NO: 2236

SEQ ID NO: 32423 - DNA, 543 bp, Xylella fastidiosa; identical to SEQ ID NO: 2237
  CDS (1)..(543)

SEQ ID NO: 32424 - protein, 180 aa, Xylella fastidiosa; identical to SEQ ID NO: 2238

SEQ ID NO: 32425 - DNA, 22 bp, Artificial sequence
  Primer sequence
atggtagcaaggcagcgcgctt

SEQ ID NO: 32426 - DNA, 25 bp, Artificial sequence
  Primer sequence
ttagttgctttccagcatgtgaata

SEQ ID NO: 32427 - protein, 160 aa, Artificial sequence; identical to SEQ ID NO: 2905
  Consensus
  Variant (2)..(2): Xaa in position 2 is any amino acid
  Variant (4)..(5): Xaa in position 4 to 5 is any amino acid
  Variant (7)..(7): Xaa in position 7 is any amino acid
  Variant (10)..(12): Xaa in position 10 to 12 is any amino acid
  Variant (14)..(16): Xaa in position 14 to 16 is any amino acid
  Variant (18)..(25): Xaa in position 18 to 25 is any amino acid
  Variant (27)..(27): Xaa in position 27 is any amino acid
  Variant (29)..(30): Xaa in position 29 to 30 is any amino acid
  Variant (32)..(46): Xaa in position 32 to 46 is any amino acid
  Variant (48)..(50): Xaa in position 48 to 50 is any amino acid
  Variant (53)..(54): Xaa in position 53 to 54 is any amino acid
  Variant (57)..(58): Xaa in position 57 to 58 is any amino acid
  Variant (60)..(78): Xaa in position 60 to 78 is any amino acid
  Variant (82)..(104): Xaa in position 82 to 104 is any amino acid
  Variant (106)..(114): Xaa in position 106 to 114 is any amino acid
  Variant (116)..(124): Xaa in position 116 to 124 is any amino acid
  Variant (127)..(155): Xaa in position 127 to 155 is any amino acid
  Variant (157)..(159): Xaa in position 157 to 159 is any amino acid

SEQ ID NO: 32428 - protein, 26 aa, Artificial sequence
  Consensus
  Variant (2)..(2): Xaa in position 2 is any amino acid
  Variant (3)..(3): Xaa in position 3 is Met, Arg, Pro or Ala
  Variant (4)..(4): Xaa in position 4 is Gly or Ala
  Variant (5)..(5): Xaa in position 5 is Ala, Ser, Val, Cys or Thr
  Variant (8)..(8): Xaa in position 8 is Ser or Thr
  Variant (9)..(9): Xaa in position 9 is any amino acid
  Variant (10)..(10): Xaa in position 10 is Ile, Val, Leu or Thr
  Variant (11)..(11): Xaa in position 11 is Gly, Ala or Ser
  Variant (12)..(13): Xaa in position 12 to 13 is any amino acid
  Variant (14)..(14): Xaa in position 14 is Leu, Val, Ile or Met
  Variant (15)..(15): Xaa in position 15 is Ala, Ser or Asp
  Variant (16)..(19): Xaa in position 16 to 19 is any amino acid
  Variant (20)..(23): Xaa in position 20 to 23 is any or no amino acid
  Variant (24)..(24): Xaa in position 24 is Asp or Glu
  Variant (25)..(25): Xaa in position 25 is any amino acid
  Variant (26)..(26): Xaa in position 26 is Asp or Asn
GXXXXGKXXXXXXXXXXXXXXXXXXX

SEQ ID NO: 32429 - protein, 75 aa, Artificial sequence; identical to SEQ ID NO: 2904
  Consensus
  Variant (1)..(1): Xaa in position 1 is Glu, Trp, Gln or Asp
  Variant (2)..(3): Xaa in position 2 to 3 is any amino acid
  Variant (4)..(4): Xaa in position 4 is Phe, Leu or Tyr
  Variant (5)..(5): Xaa in position 5 is Arg or Leu
  Variant (6)..(7): Xaa in position 6 to 7 is any amino acid
  Variant (9)..(11): Xaa in position 9 to 11 is any amino acid
  Variant (12)..(12): Xaa in position 12 is Leu, Ile, Val, Ala, Phe or Thr
  Variant (13)..(20): Xaa in position 13 to 20 is any amino acid
  Variant (21)..(23): Xaa in position 21 to 23 is any or no amino acid
  Variant (24)..(24): Xaa in position 24 is Val, Ile, Leu or Thr
  Variant (25)..(25): Xaa in position 25 is Leu, Ile or Val
  Variant (26)..(26): Xaa in position 26 is Ala, Ser or Thr
  Variant (27)..(27): Xaa in position 27 is Thr, Leu, Ala, Ser or Pro
  Variant (30)..(30): Xaa in position 30 is Gly or Ser
  Variant (31)..(31): Xaa in position 31 is any amino acid
  Variant (32)..(32): Xaa in position 32 is Val, Ile, Phe, Pro, Tyr or Leu
  Variant (33)..(45): Xaa in position 33 to 45 is any amino acid
  Variant (46)..(53): Xaa in position 46 to 53 is any or no amino acid
  Variant (54)..(54): Xaa in position 54 is Leu, Ile or Val
  Variant (55)..(63): Xaa in position 55 to 63 is any amino acid
  Variant (64)..(64): Xaa in position 64 is Arg, Asn or Asp
  Variant (65)..(69): Xaa in position 65 to 69 is any amino acid
  Variant (70)..(73): Xaa in position 70 to 73 is any or no amino acid
  Variant (74)..(74): Xaa in position 74 is Arg, Lys or Leu
  Variant (75)..(75): Xaa in position 75 is Pro or Gly

SEQ ID NO: 32430 - DNA, 1434 bp, Escherichia coli K12; identical to SEQ ID NO: 4679
  CDS (1)..(1434)

SEQ ID NO: 32431 - protein, 477 aa, Escherichia coli K12 [sequence omitted]

SEQ ID NO: 32432 - DNA, 1314 bp, Pyrococcus abyssi; identical to SEQ ID NO: 4681
  CDS (1)..(1314)

SEQ ID NO: 32433 - protein, 437 aa, Pyrococcus abyssi; identical to SEQ ID NO: 4682

SEQ ID NO: 32434 - DNA, 1425 bp, Chlamydia muridarum, Chlamydia trachomatis MoPn; identical to SEQ ID NO: 4683
  CDS (1)..(1425)

SEQ ID NO: 32435 - protein, 474 aa, Chlamydia muridarum, Chlamydia trachomatis MoPn; identical to SEQ ID NO: 4684

SEQ ID NO: 32436 - DNA, 1434 bp, Clostridium acetobutylicum; identical to SEQ ID NO: 4685
  CDS (1)..(1434)

SEQ ID NO: 32437 - protein, 477 aa, Clostridium acetobutylicum; identical to SEQ ID NO: 4686

SEQ ID NO: 32438 - DNA, 1431 bp, Yersinia pestis; identical to SEQ ID NO: 4687
  CDS (1)..(1431)

SEQ ID NO: 32439 - protein, 476 aa, Yersinia pestis; identical to SEQ ID NO: 4688

SEQ ID NO: 32440 - DNA, 1443 bp, Agrobacterium tumefaciens; identical to SEQ ID NO: 4689
  CDS (1)..(1443)

SEQ ID NO: 32441 - protein, 480 aa, Agrobacterium tumefaciens; identical to SEQ ID NO: 4690

SEQ ID NO: 32442 - DNA, 1479 bp, Nostoc sp. PCC 7120; identical to SEQ ID NO: 4691
  CDS (1)..(1479)

SEQ ID NO: 32443 - protein, 492 aa, Nostoc sp. PCC 7120; identical to SEQ ID NO: 4692

SEQ ID NO: 32444 - DNA, 1419 bp, Nostoc sp. PCC 7120; identical to SEQ ID NO: 4693
  CDS (1)..(1419)

SEQ ID NO: 32445 - protein, 472 aa, Nostoc sp. PCC 7120; identical to SEQ ID NO: 4694

SEQ ID NO: 32446 - DNA, 1431 bp, Haemophilus influenzae; identical to SEQ ID NO: 4695
  CDS (1)..(1431)

SEQ ID NO: 32447 - protein, 476 aa, Haemophilus influenzae; identical to SEQ ID NO: 4696

SEQ ID NO: 32448 - DNA, 1392 bp, Aquifex aeolicus; identical to SEQ ID NO: 4697
  CDS (1)..(1392)

SEQ ID NO: 32449 - protein, 463 aa, Aquifex aeolicus; identical to SEQ ID NO: 4698

SEQ ID NO: 32450 - DNA, 1371 bp, Pyrococcus horikoshii; identical to SEQ ID NO: 4699
  CDS (1)..(1371)

SEQ ID NO: 32451 - protein, 456 aa, Pyrococcus horikoshii; identical to SEQ ID NO: 4700

SEQ ID NO: 32452 - DNA, 1431 bp, Chlamydophila pneumoniae, Chlamydia pneumoniae; identical to SEQ ID NO: 4701
  CDS (1)..(1431)

SEQ ID NO: 32453 - protein, 476 aa, Chlamydophila pneumoniae, Chlamydia pneumoniae; identical to SEQ ID NO: 4702

SEQ ID NO: 32454 - DNA, 1452 bp, Lactococcus lactis subsp. lactis; identical to SEQ ID NO: 4703
  CDS (1)..(1452)

SEQ ID NO: 32455 - protein, 483 aa, Lactococcus lactis subsp. lactis; identical to SEQ ID NO: 4704

SEQ ID NO: 32456 - DNA, 1461 bp, Sinorhizobium meliloti; identical to SEQ ID NO: 4705
  CDS (1)..(1461)

SEQ ID NO: 32457 - protein, 486 aa, Sinorhizobium meliloti; identical to SEQ ID NO: 4706

SEQ ID NO: 32458 - DNA, 1425 bp, Chlamydia trachomatis; identical to SEQ ID NO: 4707
  CDS (1)..(1425)

SEQ ID NO: 32459 - protein, 474 aa, Chlamydia trachomatis; identical to SEQ ID NO: 4708

SEQ ID NO: 32460 - DNA, 1701 bp, Sulfolobus solfataricus; identical to SEQ ID NO: 4709
  CDS (1)..(1701)

SEQ ID NO: 32461 - protein, 566 aa, Sulfolobus solfataricus; identical to SEQ ID NO: 4710

SEQ ID NO: 32462 - DNA, 1566 bp, Methanococcus jannaschii; identical to SEQ ID NO: 4711
  CDS (1)..(1566)

SEQ ID NO: 32463 - protein, 521 aa, Methanococcus jannaschii; identical to SEQ ID NO: 4712

SEQ ID NO: 32464 - DNA, 1431 bp, Bacillus halodurans; identical to SEQ ID NO: 4713
  CDS (1)..(1431)

SEQ ID NO: 32465 - protein, 476 aa, Bacillus halodurans; identical to SEQ ID NO: 4714

SEQ ID NO: 32466 - DNA, 1455 bp, Vibrio cholerae; identical to SEQ ID NO: 4715
  CDS (1)..(1455)

SEQ ID NO: 32467 - protein, 484 aa, Vibrio cholerae; identical to SEQ ID NO: 4716

SEQ ID NO: 32468 - DNA, 1833 bp, Arabidopsis thaliana (mouse-ear cress); identical to SEQ ID NO: 4717
  CDS (1)..(1833)

SEQ ID NO: 32469 - protein, 610 aa, Arabidopsis thaliana (mouse-ear cress); identical to SEQ ID NO: 4718

SEQ ID NO: 32470 - DNA, 1461 bp, Thermotoga maritima; identical to SEQ ID NO: 4719
  CDS (1)..(1461)

SEQ ID NO: 32471 - protein, 486 aa, Thermotoga maritima; identical to SEQ ID NO: 4720

SEQ ID NO: 32472 - DNA, 1542 bp, Pseudomonas aeruginosa; identical to SEQ ID NO: 4721
  CDS (1)..(1542)

SEQ ID NO: 32473 - protein, 513 aa, Pseudomonas aeruginosa; identical to SEQ ID NO: 4722

SEQ ID NO: 32474 - DNA, 3078 bp, Arabidopsis thaliana (mouse-ear cress); identical to SEQ ID NO: 4723
  CDS (1)..(3078)

SEQ ID NO: 32475 - protein, 1025 aa, Arabidopsis thaliana (mouse-ear cress); identical to SEQ ID NO: 4724

SEQ ID NO: 32476 - DNA, 1434 bp, Streptococcus pneumoniae; identical to SEQ ID NO: 4725
  CDS (1)..(1434)

SEQ ID NO: 32477 - protein, 477 aa, Streptococcus pneumoniae; identical to SEQ ID NO: 4726

SEQ ID NO: 32478 - DNA, 2533 bp, Oryza sativa (rice); identical to SEQ ID NO: 4727
  CDS (114)..(1994)

SEQ ID NO: 32479 - protein, 626 aa, Oryza sativa (rice); identical to SEQ ID NO: 4728

SEQ ID NO: 32480 - DNA, 1818 bp, Zea mays (maize); identical to SEQ ID NO: 4729
  CDS (1)..(1818)

SEQ ID NO: 32481 - protein, 605 aa, Zea mays (maize); identical to SEQ ID NO: 4730

SEQ ID NO: 32482 - DNA, 1455 bp, Bacillus subtilis; identical to SEQ ID NO: 4731
  CDS (1)..(1455)

SEQ ID NO: 32483 - protein, 484 aa, Bacillus subtilis; identical to SEQ ID NO: 4732

SEQ ID NO: 32484 - DNA, 2168 bp, Manihot esculenta (cassava); identical to SEQ ID NO: 4733
  CDS (75)..(1901)

SEQ ID NO: 32485 - protein, 608 aa, Manihot esculenta (cassava); identical to SEQ ID NO: 4734

SEQ ID NO: 32486 - DNA, 2035 bp, Pisum sativum (garden pea); identical to SEQ ID NO: 4735
  CDS (82)..(1893)

SEQ ID NO: 32487 - protein, 603 aa, Pisum sativum (garden pea); identical to SEQ ID NO: 4736

SEQ ID NO: 32488 - DNA, 1476 bp, Synechocystis sp; identical to SEQ ID NO: 4737
  CDS (1)..(1476)

SEQ ID NO: 32489 - protein, 491 aa, Synechocystis sp; identical to SEQ ID NO: 4738

SEQ ID NO: 32490 - DNA, 1434 bp, Synechocystis sp; identical to SEQ ID NO: 4739
  CDS (1)..(1434)

SEQ ID NO: 32491 - protein, 477 aa, Synechocystis sp; identical to SEQ ID NO: 4740

SEQ ID NO: 32492 - DNA, 2868 bp, Zea mays (maize); identical to SEQ ID NO: 4741
  CDS (670)..(2868)

SEQ ID NO: 32493 - protein, 732 aa, Zea mays (maize); identical to SEQ ID NO: 4742

SEQ ID NO: 32494 - DNA, 2480 bp, Zea mays (maize); identical to SEQ ID NO: 4743
  CDS (58)..(2154)

SEQ ID NO: 32495 - protein, 698 aa, Zea mays (maize); identical to SEQ ID NO: 4744

SEQ ID NO: 32496 - DNA, 6027 bp, Zea mays (maize); identical to SEQ ID NO: 4745
  CDS (120)..(5144)

SEQ ID NO: 32497 - protein, 1674 aa, Zea mays (maize); identical to SEQ ID NO: 4746

SEQ ID NO: 32498 - DNA, 2991 bp, Zea mays (maize); identical to SEQ ID NO: 4747
  misc_feature (2709)..(2709): n is a, c, g, or t
  CDS (602)..(2470)

SEQ ID NO: 32499 - protein, 622 aa, Zea mays (maize); identical to SEQ ID NO: 4748

SEQ ID NO: 32500 - DNA, 2360 bp, Solanum tuberosum (potato); identical to SEQ ID NO: 4749
  CDS (68)..(1993)

SEQ ID NO: 32501 - protein, 641 aa, Solanum tuberosum (potato); identical to SEQ ID NO: 4750

SEQ ID NO: 32502 - DNA, 2124 bp, Ipomoea batatas (sweet potato); identical to SEQ ID NO: 4751
  CDS (23)..(1849)

SEQ ID NO: 32503 - protein, 608 aa, Ipomoea batatas (sweet potato); identical to SEQ ID NO: 4752

SEQ ID NO: 32504 - DNA, 2287 bp, Sorghum bicolor (sorghum); identical to SEQ ID NO: 4753
  CDS (207)..(2033)

SEQ ID NO: 32505 - protein, 608 aa, Sorghum bicolor (sorghum); identical to SEQ ID NO: 4754

SEQ ID NO: 32506 - DNA, 4110 bp, Schizosaccharomyces pombe; identical to SEQ ID NO: 4755
  CDS (1)..(4110)

SEQ ID NO: 32507 - protein, 1369 aa, Schizosaccharomyces pombe; identical to SEQ ID NO: 4756

SEQ ID NO: 32508 - DNA, 1812 bp, Hordeum vulgare (barley); identical to SEQ ID NO: 4757
  CDS (1)..(1812)

SEQ ID NO: 32509 - protein, 603 aa, Hordeum vulgare (barley); identical to SEQ ID NO: 4758

SEQ ID NO: 32510 - DNA, 2161 bp, Solanum tuberosum (potato); identical to SEQ ID NO: 4759
  CDS (37)..(1860)

SEQ ID NO: 32511 - protein, 607 aa, Solanum tuberosum (potato); identical to SEQ ID NO: 4760

SEQ ID NO: 32512 - DNA, 2825 bp, Triticum aestivum; identical to SEQ ID NO: 4761
  CDS (162)..(2561)

SEQ ID NO: 32513 - protein, 799 aa, Triticum aestivum; identical to SEQ ID NO: 4762

SEQ ID NO: 32514 - DNA, 2771 bp, Triticum aestivum; identical to SEQ ID NO: 4763
  CDS (280)..(2550)

SEQ ID NO: 32515 - protein, 756 aa, Triticum aestivum; identical to SEQ ID NO: 4764

SEQ ID NO: 32516 - DNA, 4121 bp, Zea mays; identical to SEQ ID NO: 4765
  CDS (442)..(3954)

SEQ ID NO: 32517 - protein, 1170 aa, Zea mays; identical to SEQ ID NO: 4766

SEQ ID NO: 32518 - DNA, 3240 bp, Chlamydomonas reinhardtii; identical to SEQ ID NO: 4767
  CDS (138)..(2264)

SEQ ID NO: 32519 - protein, 708 aa, Chlamydomonas reinhardtii; identical to SEQ ID NO: 4768

SEQ ID NO: 32520 - DNA, 3049 bp, Chlamydomonas reinhardtii; identical to SEQ ID NO: 4769
  CDS (190)..(1920)

SEQ ID NO: 32521 - protein, 576 aa, Chlamydomonas reinhardtii; identical to SEQ ID NO: 4770

SEQ ID NO: 32522 - DNA, 2716 bp, Chlamydomonas reinhardtii; identical to SEQ ID NO: 4771
  CDS (93)..(2048)

SEQ ID NO: 32523 - protein, 651 aa, Chlamydomonas reinhardtii; identical to SEQ ID NO: 4772

SEQ ID NO: 32524 - DNA, 2325 bp, Ipomoea batatas; identical to SEQ ID NO: 4773
  CDS (155)..(2047)

SEQ ID NO: 32525 - protein, 630 aa, Ipomoea batatas; identical to SEQ ID NO: 4774

SEQ ID NO: 32526 - DNA, 1440 bp, Erwinia carotovora subsp; identical to SEQ ID NO: 4775
  CDS (1)..(1440)

SEQ ID NO: 32527 - protein, 479 aa, Erwinia carotovora subsp; identical to SEQ ID NO: 4776

SEQ ID NO: 32528 - DNA, 1497 bp, Bacillus thuringiensis serovar konkukian str; identical to SEQ ID NO: 4777
  CDS (1)..(1497)

SEQ ID NO: 32529 - protein, 498 aa, Bacillus thuringiensis serovar konkukian str; identical to SEQ ID NO: 4778

SEQ ID NO: 32530 - DNA, 1431 bp, Mycoplasma mobile; identical to SEQ ID NO: 4779
  CDS (1)..(1431): transl-table=4

SEQ ID NO: 32531 - protein, 476 aa, Mycoplasma mobile; identical to SEQ ID NO: 4780

SEQ ID NO: 32532 - DNA, 1815 bp, Hordeum bulbosum; identical to SEQ ID NO: 4781
  CDS (1)..(1815)

SEQ ID NO: 32533 - protein, 604 aa, Hordeum bulbosum; identical to SEQ ID NO: 4782

SEQ ID NO: 32534 - DNA, 1527 bp, Photobacterium profundum; identical to SEQ ID NO: 4783
  CDS (1)..(1527)

SEQ ID NO: 32535 - protein, 508 aa, Photobacterium profundum; identical to SEQ ID NO: 4784

SEQ ID NO: 32536 - DNA, 1569 bp, Methanococcus maripaludis; identical to SEQ ID NO: 4785
  CDS (1)..(1569)

SEQ ID NO: 32537 - protein, 522 aa, Methanococcus maripaludis; identical to SEQ ID NO: 4786

SEQ ID NO: 32538 - DNA, 1503 bp, Parachlamydia sp; identical to SEQ ID NO: 4787
  CDS (1)..(1503)

SEQ ID NO: 32539 - protein, 500 aa, Parachlamydia sp; identical to SEQ ID NO: 4788

SEQ ID NO: 32540 - DNA, 1452 bp, Rhodopseudomonas palustris; identical to SEQ ID NO: 4789
  CDS (1)..(1452)

SEQ ID NO: 32541 - protein, 483 aa, Rhodopseudomonas palustris; identical to SEQ ID NO: 4790

SEQ ID NO: 32542 - DNA, 1173 bp, Corynebacterium diphtheriae; identical to SEQ ID NO: 4791
  CDS (1)..(1173)

SEQ ID NO: 32543 - protein, 390 aa, Corynebacterium diphtheriae; identical to SEQ ID NO: 4792

SEQ ID NO: 32544 - DNA, 1578 bp, Ostreococcus tauri; identical to SEQ ID NO: 4793
  CDS (1)..(1578)

SEQ ID NO: 32545 - protein, 525 aa, Ostreococcus tauri; identical to SEQ ID NO: 4794

SEQ ID NO: 32546 - DNA, 1725 bp, Ostreococcus tauri; identical to SEQ ID NO: 4795
  CDS (1)..(1725)

SEQ ID NO: 32547 - protein, 574 aa, Ostreococcus tauri; identical to SEQ ID NO: 4796

SEQ ID NO: 32548 - DNA, 2022 bp, Ostreococcus tauri; identical to SEQ ID NO: 4797
  CDS (1)..(2022)

SEQ ID NO: 32549 - protein, 673 aa, Ostreococcus tauri; identical to SEQ ID NO: 4798

SEQ ID NO: 32550 - DNA, 2939 bp, Colocasia esculenta; identical to SEQ ID NO: 4799
  CDS (220)..(2634)

SEQ ID NO: 32551 - protein, 804 aa, Colocasia esculenta; identical to SEQ ID NO: 4800

SEQ ID NO: 32552 - DNA, 1554 bp, Thermoproteus tenax; identical to SEQ ID NO: 4801
  CDS (1)..(1554)

SEQ ID NO: 32553 - protein, 517 aa, Thermoproteus tenax; identical to SEQ ID NO: 4802

SEQ ID NO: 32554 - DNA, 1470 bp, Desulfovibrio vulgaris; identical to SEQ ID NO: 4803
  CDS (1)..(1470)

SEQ ID NO: 32555 - protein, 489 aa, Desulfovibrio vulgaris; identical to SEQ ID NO: 4804

SEQ ID NO: 32556 - DNA, 1323 bp, Thermus thermophilus; identical to SEQ ID NO: 4805
  CDS (1)..(1323)

SEQ ID NO: 32557 - protein, 440 aa, Thermus thermophilus; identical to SEQ ID NO: 4806

SEQ ID NO: 32558 - DNA, 1431 bp, Bacillus cereus; identical to SEQ ID NO: 4807
  CDS (1)..(1431)

SEQ ID NO: 32559 - protein, 476 aa, Bacillus cereus; identical to SEQ ID NO: 4808

SEQ ID NO: 32560 - DNA, 1476 bp, Treponema denticola; identical to SEQ ID NO: 4809
  CDS (1)..(1476)

SEQ ID NO: 32561 - protein, 491 aa, Treponema denticola; identical to SEQ ID NO: 4810

SEQ ID NO: 32562 - DNA, 1173 bp, Mycobacterium paratuberculosis; identical to SEQ ID NO: 4811
  CDS (1)..(1173)

SEQ ID NO: 32563 - protein, 390 aa, Mycobacterium paratuberculosis; identical to SEQ ID NO: 4812

SEQ ID NO: 32564 - DNA, 2486 bp, Phaseolus vulgaris; identical to SEQ ID NO: 4813
  CDS (39)..(2255)

SEQ ID NO: 32565 - protein, 738 aa, Phaseolus vulgaris; identical to SEQ ID NO: 4814

SEQ ID NO: 32566 - DNA, 2570 bp, Phaseolus vulgaris; identical to SEQ ID NO: 4815
  CDS (135)..(2309)

SEQ ID NO: 32567 - protein, 724 aa, Phaseolus vulgaris; identical to SEQ ID NO: 4816

SEQ ID NO: 32568 - DNA, 2444 bp, Phaseolus vulgaris; identical to SEQ ID NO: 4817
  CDS (78)..(2015)

SEQ ID NO: 32569 - protein, 645 aa, Phaseolus vulgaris; identical to SEQ ID NO: 4818

SEQ ID NO: 32570 - DNA, 1827 bp, Hordeum spontaneum; identical to SEQ ID NO: 4819
  CDS (1)..(1827)

SEQ ID NO: 32571 - protein, 608 aa, Hordeum spontaneum; identical to SEQ ID NO: 4820

SEQ ID NO: 32572 - DNA, 1248 bp, Gloeobacter violaceus; identical to SEQ ID NO: 4821
  CDS (1)..(1248)

SEQ ID NO: 32573 - protein, 415 aa, Gloeobacter violaceus; identical to SEQ ID NO: 4822

SEQ ID NO: 32574 - DNA, 3219 bp, Oryza sativa; identical to SEQ ID NO: 4823
  CDS (1)..(3219)

SEQ ID NO: 32575 - protein, 1072 aa, Oryza sativa; identical to SEQ ID NO: 4824

SEQ ID NO: 32576 - DNA, 2547 bp, Oryza sativa; identical to SEQ ID NO: 4825
  CDS (97)..(2022)

SEQ ID NO: 32577 - protein, 641 aa, Oryza sativa; identical to SEQ ID NO: 4826

SEQ ID NO: 32578 - DNA, 1242 bp, Streptomyces avermitilis; identical to SEQ ID NO: 4827
  CDS (1)..(1242)

SEQ ID NO: 32579 - protein, 413 aa, Streptomyces avermitilis; identical to SEQ ID NO: 4828

SEQ ID NO: 32580 - DNA, 2208 bp, Phaseolus vulgaris; identical to SEQ ID NO: 4829
  CDS (144)..(1991)

SEQ ID NO: 32581 - protein, 615 aa, Phaseolus vulgaris; identical to SEQ ID NO: 4830

SEQ ID NO: 32582 - DNA, 2748 bp, Oryza sativa; identical to SEQ ID NO: 4831
  CDS (1)..(2748)

SEQ ID NO: 32583 - protein, 915 aa, Oryza sativa; identical to SEQ ID NO: 4832

SEQ ID NO: 32584 - DNA, 1605 bp, Shewanella oneidensis; identical to SEQ ID NO: 4833
  CDS (1)..(1605)

SEQ ID NO: 32585 - protein, 534 aa, Shewanella oneidensis; identical to SEQ ID NO: 4834

SEQ ID NO: 32586 - DNA, 1173 bp, Corynebacterium efficiens; identical to SEQ ID NO: 4835
  CDS (1)..(1173)

SEQ ID NO: 32587 - protein, 390 aa, Corynebacterium efficiens; identical to SEQ ID NO: 4836

SEQ ID NO: 32588 - DNA, 2340 bp, Colocasia esculenta; identical to SEQ ID NO: 4837
  CDS (155)..(2086)

SEQ ID NO: 32589 - protein, 643 aa, Colocasia esculenta; identical to SEQ ID NO: 4838

SEQ ID NO: 32590 - DNA, 2409 bp, Hordeum vulgare; identical to SEQ ID NO: 4839
  CDS (1)..(2409)

SEQ ID NO: 32591 - protein, 802 aa, Hordeum vulgare; identical to SEQ ID NO: 4840

SEQ ID NO: 32592 - DNA, 2115 bp, Setaria italica; identical to SEQ ID NO: 4841
  CDS (142)..(1959)

SEQ ID NO: 32593 - protein, 605 aa, Setaria italica; identical to SEQ ID NO: 4842

SEQ ID NO: 32594 - DNA, 2081 bp, Triticum aestivum; identical to SEQ ID NO: 4843
  CDS (1)..(1800)

SEQ ID NO: 32595 - protein, 599 aa, Triticum aestivum; identical to SEQ ID NO: 4844

SEQ ID NO: 32596 - DNA, 1230 bp, Corynebacterium glutamicum; identical to SEQ ID NO: 4845
  CDS (1)..(1230)

SEQ ID NO: 32597 - protein, 409 aa, Corynebacterium glutamicum; identical to SEQ ID NO: 4846

SEQ ID NO: 32598 - DNA, 1356 bp, Pyrococcus furiosus; identical to SEQ ID NO: 4847
  CDS (1)..(1356)

SEQ ID NO: 32599 - protein, 451 aa, Pyrococcus furiosus; identical to SEQ ID NO: 4848

SEQ ID NO: 32600 - DNA, 2112 bp, Oryza sativa; identical to SEQ ID NO: 4849
  CDS (61)..(1887)

SEQ ID NO: 32601 - protein, 608 aa, Oryza sativa; identical to SEQ ID NO: 4850

SEQ ID NO: 32602 - DNA, 2496 bp, Oryza sativa; identical to SEQ ID NO: 4851
  CDS (1)..(2496)

SEQ ID NO: 32603 - protein, 831 aa, Oryza sativa; identical to SEQ ID NO: 4852

SEQ ID NO: 32604 - DNA, 1443 bp, Rhizobium loti; identical to SEQ ID NO: 4853
  CDS (1)..(1443)

SEQ ID NO: 32605 - protein, 480 aa, Rhizobium loti; identical to SEQ ID NO: 4854

SEQ ID NO: 32606 - DNA, 2100 bp, Pisum sativum; identical to SEQ ID NO: 4855
  CDS (6)..(1847)

SEQ ID NO: 32607 - protein, 613 aa, Pisum sativum; identical to SEQ ID NO: 4856

SEQ ID NO: 32608 - DNA, 3386 bp, Triticum aestivum; identical to SEQ ID NO: 4857
  CDS (251)..(2995)

SEQ ID NO: 32609 - protein, 914 aa, Triticum aestivum; identical to SEQ ID NO: 4858

SEQ ID NO: 32610 - DNA, 2919 bp, Oryza sativa; identical to SEQ ID NO: 4859
  CDS (165)..(2597)

SEQ ID NO: 32611 - protein, 810 aa, Oryza sativa; identical to SEQ ID NO: 4860

SEQ ID NO: 32612 - DNA, 2394 bp, Oryza sativa; identical to SEQ ID NO: 4861
  CDS (34)..(2118)

SEQ ID NO: 32613 - protein, 694 aa, Oryza sativa; identical to SEQ ID NO: 4862

SEQ ID NO: 32614 - DNA, 2903 bp, Oryza sativa; identical to SEQ ID NO: 4863
  CDS (86)..(2335)

SEQ ID NO: 32615 - protein, 749 aa, Oryza sativa; identical to SEQ ID NO: 4864

SEQ ID NO: 32616 - DNA, 1719 bp, Sulfolobus tokodaii; identical to SEQ ID NO: 4865
  CDS (1)..(1719)

SEQ ID NO: 32617 - protein, 572 aa, Sulfolobus tokodaii; identical to SEQ ID NO: 4866

SEQ ID NO: 32618 - DNA, 2270 bp, Perilla frutescens; identical to SEQ ID NO: 4867
  CDS (172)..(1986)

SEQ ID NO: 32619 - protein, 604 aa, Perilla frutescens; identical to SEQ ID NO: 4868

SEQ ID NO: 32620 - DNA, 1701 bp, Sulfolobus acidocaldarius; identical to SEQ ID NO: 4869
  CDS (1)..(1701)

SEQ ID NO: 32621 - protein, 566 aa, Sulfolobus acidocaldarius; identical to SEQ ID NO: 4870

SEQ ID NO: 32622 - DNA, 2793 bp, Triticum aestivum; identical to SEQ ID NO: 4871
  CDS (135)..(2531)

SEQ ID NO: 32623 - protein, 798 aa, Triticum aestivum; identical to SEQ ID NO: 4872

SEQ ID NO: 32624 - DNA, 5346 bp, Triticum aestivum; identical to SEQ ID NO: 4873
  CDS (29)..(4915)

SEQ ID NO: 32625 - protein, 1628 aa, Triticum aestivum; identical to SEQ ID NO: 4874

SEQ ID NO: 32626 - DNA, 2502 bp, Arabidopsis thaliana; identical to SEQ ID NO: 4875
  CDS (1)..(2379)

SEQ ID NO: 32627 - protein, 792 aa, Arabidopsis thaliana; identical to SEQ ID NO: 4876

SEQ ID NO: 32628 - DNA, 2592 bp, Sorghum bicolor; identical to SEQ ID NO: 4877
  CDS (59)..(1948)

SEQ ID NO: 32629 - protein, 629 aa, Sorghum bicolor; identical to SEQ ID NO: 4878

SEQ ID NO: 32630 - DNA, 1815 bp, Triticum turgidum subsp; identical to SEQ ID NO: 4879
  CDS (1)..(1815)

SEQ ID NO: 32631 - protein, 604 aa, Triticum turgidum subsp; identical to SEQ ID NO: 4880

SEQ ID NO: 32632 - DNA, 2575 bp, Manihot esculenta; identical to SEQ ID NO: 4881
  CDS (50)..(2305)

SEQ ID NO: 32633 - protein, 751 aa, Manihot esculenta; identical to SEQ ID NO: 4882

SEQ ID NO: 32634 - DNA, 2842 bp, Triticum aestivum; identical to SEQ ID NO: 4883
  CDS (89)..(2488)

SEQ ID NO: 32635 - protein, 799 aa, Triticum aestivum; identical to SEQ ID NO: 4884

SEQ ID NO: 32636 - DNA, 1818 bp, Triticum monococcum; identical to SEQ ID NO: 4885
  CDS (1)..(1818)

SEQ ID NO: 32637 - protein, 605 aa, Triticum monococcum; identical to SEQ ID NO: 4886

SEQ ID NO: 32638 - DNA, 2081 bp, Triticum aestivum; identical to SEQ ID NO: 4887
  CDS (120)..(1919)

SEQ ID NO: 32639 - protein, 599 aa, Triticum aestivum; identical to SEQ ID NO: 4888

SEQ ID NO: 32640 - DNA, 2591 bp, Triticum aestivum; identical to SEQ ID NO: 4889
  CDS (256)..(2199)

SEQ ID NO: 32641 - protein, 647 aa, Triticum aestivum; identical to SEQ ID NO: 4890

SEQ ID NO: 32642 - DNA, 1872 bp, Oryza sativa; identical to SEQ ID NO: 4891
  CDS (1)..(1872)

SEQ ID NO: 32643 - protein, 623 aa, Oryza sativa; identical to SEQ ID NO: 4892

SEQ ID NO: 32644 - DNA, 2028 bp, Triticum aestivum; identical to SEQ ID NO: 4893
  CDS (30)..(1754)

SEQ ID NO: 32645 - protein, 574 aa, Triticum aestivum; identical to SEQ ID NO: 4894

SEQ ID NO: 32646 - DNA, 3901 bp, Vigna unguiculata; identical to SEQ ID NO: 4895
  CDS (161)..(3604)

SEQ ID NO: 32647 - protein, 1147 aa, Vigna unguiculata; identical to SEQ ID NO: 4896

SEQ ID NO: 32648 - DNA, 3519 bp, Vigna unguiculata; identical to SEQ ID NO: 4897
  CDS (386)..(3010)

SEQ ID NO: 32649 - protein, 874 aa, Vigna unguiculata; identical to SEQ ID NO: 4898

SEQ ID NO: 32650 - DNA, 2221 bp, Phaseolus vulgaris; identical to SEQ ID NO: 4899
  CDS (30)..(1850)

SEQ ID NO: 32651 - protein, 606 aa, Phaseolus vulgaris; identical to SEQ ID NO: 4900

SEQ ID NO: 32652 - DNA, 2107 bp, Astragalus membranaceus; identical to SEQ ID NO: 4901
  CDS (96)..(1919)

SEQ ID NO: 32653 - protein, 607 aa, Astragalus membranaceus; identical to SEQ ID NO: 4902

SEQ ID NO: 32654 - DNA, 1389 bp, Bradyrhizobium japonicum; identical to SEQ ID NO: 4903
  CDS (1)..(1389)

SEQ ID NO: 32655 - protein, 462 aa, Bradyrhizobium japonicum; identical to SEQ ID NO: 4904

SEQ ID NO: 32656 - DNA, 1530 bp, Agrobacterium tumefaciens; identical to SEQ ID NO: 4905
  CDS (1)..(1530)

SEQ ID NO: 32657 - protein, 509 aa, Agrobacterium tumefaciens; identical to SEQ ID NO: 4906

SEQ ID NO: 32658 - DNA, 1449 bp, Bradyrhizobium japonicum; identical to SEQ ID NO: 4907
  CDS (1)..(1449)

SEQ ID NO: 32659 - protein, 482 aa, Bradyrhizobium japonicum; identical to SEQ ID NO: 4908

SEQ ID NO: 32660 - DNA, 1431 bp, Bacillus cereus; identical to SEQ ID NO: 4909
  CDS (1)..(1431)

SEQ ID NO: 32661 - protein, 476 aa, Bacillus cereus; identical to SEQ ID NO: 4910

SEQ ID NO: 32662 - DNA, 1458 bp, Bacillus stearothermophilus; identical to SEQ ID NO: 4911
  CDS (1)..(1458)

SEQ ID NO: 32663 - protein, 485 aa, Bacillus stearothermophilus; identical to SEQ ID NO: 4912

SEQ ID NO: 32664 - DNA, 1533 bp, Bordetella bronchiseptica; identical to SEQ ID NO: 4913
  CDS (1)..(1533)

SEQ ID NO: 32665 - protein, 510 aa, Bordetella bronchiseptica; identical to SEQ ID NO: 4914

SEQ ID NO: 32666 - DNA, 1428 bp, Chlamydophila caviae; identical to SEQ ID NO: 4915
  CDS (1)..(1428)

SEQ ID NO: 32667 - protein, 475 aa, Chlamydophila caviae; identical to SEQ ID NO: 4916

SEQ ID NO: 32668 - DNA, 1467 bp, Chlorobium tepidum; identical to SEQ ID NO: 4917
  CDS (1)..(1467)

SEQ ID NO: 32669 - protein, 488 aa, Chlorobium tepidum; identical to SEQ ID NO: 4918

SEQ ID NO: 32670 - DNA, 1449 bp, Clostridium perfringens; identical to SEQ ID NO: 4919
  CDS (1)..(1449)

SEQ ID NO: 32671 - protein, 482 aa, Clostridium perfringens; identical to SEQ ID NO: 4920

SEQ ID NO: 32672 - DNA, 1335 bp, Deinococcus radiodurans; identical to SEQ ID NO: 4921
  CDS (1)..(1335)

SEQ ID NO: 32673 - protein, 444 aa, Deinococcus radiodurans; identical to SEQ ID NO: 4922

SEQ ID NO: 32674 - DNA, 1386 bp, Fusobacterium nucleatum; identical to SEQ ID NO: 4923
  CDS (1)..(1386)

SEQ ID NO: 32675 - protein, 461 aa, Fusobacterium nucleatum; identical to SEQ ID NO: 4924

SEQ ID NO: 32676 - DNA, 1377 bp, Gloeobacter violaceus; identical to SEQ ID NO: 4925
  CDS (1)..(1377)

SEQ ID NO: 32677 - protein, 458 aa, Gloeobacter violaceus; identical to SEQ ID NO: 4926

SEQ ID NO: 32678 - DNA, 1440 bp, Lactobacillus plantarum; identical to SEQ ID NO: 4927
  CDS (1)..(1440)

SEQ ID NO: 32679 - protein, 479 aa, Lactobacillus plantarum; identical to SEQ ID NO: 4928

SEQ ID NO: 32680 - DNA, 1488 bp, Nitrosomonas europaea; identical to SEQ ID NO: 4929
  CDS (1)..(1488)

SEQ ID NO: 32681 - protein, 495 aa, Nitrosomonas europaea; identical to SEQ ID NO: 4930

SEQ ID NO: 32682 - DNA, 1434 bp, Oceanobacillus iheyensis; identical to SEQ ID NO: 4931
  CDS (1)..(1434)

SEQ ID NO: 32683 - protein, 477 aa, Oceanobacillus iheyensis; identical to SEQ ID NO: 4932

SEQ ID NO: 32684 - DNA, 1443 bp, Pasteurella multocida; identical to SEQ ID NO: 4933
  CDS (1)..(1443)

SEQ ID NO: 32685 - protein, 480 aa, Pasteurella multocida; identical to SEQ ID NO: 4934

SEQ ID NO: 32686 - DNA, 1506 bp, Prochlorococcus marinus; identical to SEQ ID NO: 4935
  CDS (1)..(1506)

SEQ ID NO: 32687 - protein, 501 aa, Prochlorococcus marinus; identical to SEQ ID NO: 4936

SEQ ID NO: 32688 - DNA, 1500 bp, Prochlorococcus marinus; identical to SEQ ID NO: 4937
  CDS (1)..(1500)

SEQ ID NO: 32689 - protein, 499 aa, Prochlorococcus marinus; identical to SEQ ID NO: 4938

SEQ ID NO: 32690 - DNA, 1452 bp, Prochlorococcus marinus subsp; identical to SEQ ID NO: 4939
  CDS (1)..(1452)

SEQ ID NO: 32691 - protein, 483 aa, Prochlorococcus marinus subsp; identical to SEQ ID NO: 4940

SEQ ID NO: 32692 - DNA, 1560 bp, Pseudomonas putida; identical to SEQ ID NO: 4941
  CDS (1)..(1560)

SEQ ID NO: 32693 - protein, 519 aa, Pseudomonas putida; identical to SEQ ID NO: 4942

SEQ ID NO: 32694 - DNA, 1455 bp, Pseudomonas syringae; identical to SEQ ID NO: 4943
  CDS (1)..(1455)

SEQ ID NO: 32695 - protein, 484 aa, Pseudomonas syringae; identical to SEQ ID NO: 4944

SEQ ID NO: 32696 - DNA, 1626 bp, Ralstonia solanacearum; identical to SEQ ID NO: 4945
  CDS (1)..(1626)

SEQ ID NO: 32697 - protein, 541 aa, Ralstonia solanacearum; identical to SEQ ID NO: 4946

SEQ ID NO: 32698 - DNA, 1446 bp, Rhizobium loti; identical to SEQ ID NO: 4947
  CDS (1)..(1446)

SEQ ID NO: 32699 - protein, 481 aa, Rhizobium loti; identical to SEQ ID NO: 4948

SEQ ID NO: 32700 - DNA, 1443 bp, Rhizobium tropici; identical to SEQ ID NO: 4949
  CDS (1)..(1443)

SEQ ID NO: 32701 - protein, 480 aa, Rhizobium tropici; identical to SEQ ID NO: 4950

SEQ ID NO: 32702 - DNA, 1524 bp, Rhodopirellula baltica; identical to SEQ ID NO: 4951
  CDS (1)..(1524)

SEQ ID NO: 32703 - protein, 507 aa, Rhodopirellula baltica; identical to SEQ ID NO: 4952

SEQ ID NO: 32704 - DNA, 1434 bp, Rhodobacter sphaeroides; identical to SEQ ID NO: 4953
  CDS (1)..(1434)

SEQ ID NO: 32705 - protein, 477 aa, Rhodobacter sphaeroides; identical to SEQ ID NO: 4954

SEQ ID NO: 32706 - DNA, 1434 bp, Salmonella typhimurium; identical to SEQ ID NO: 4955
  CDS (1)..(1434)

SEQ ID NO: 32707 - protein, 477 aa, Salmonella typhimurium; identical to SEQ ID NO: 4956

SEQ ID NO: 32708 - DNA, 1431 bp, Streptococcus mutans; identical to SEQ ID NO: 4957
  CDS (1)..(1431)

SEQ ID NO: 32709 - protein, 476 aa, Streptococcus mutans; identical to SEQ ID NO: 4958

SEQ ID NO: 32710 - DNA, 1425 bp, Synechococcus elongatus; identical to SEQ ID NO: 4959
  CDS (1)..(1425)

SEQ ID NO: 32711 - protein, 474 aa, Synechococcus elongatus; identical to SEQ ID NO: 4960

SEQ ID NO: 32712 - DNA, 1398 bp, Synechococcus sp; identical to SEQ ID NO: 4961
  CDS (1)..(1398)

SEQ ID NO: 32713 - protein, 465 aa, Synechococcus sp; identical to SEQ ID NO: 4962

SEQ ID NO: 32714 - DNA, 1542 bp, Synechococcus sp; identical to SEQ ID NO: 4963
  CDS (1)..(1542)

SEQ ID NO: 32715 - protein, 513 aa, Synechococcus sp; identical to SEQ ID NO: 4964

SEQ ID NO: 32716 - DNA, 1317 bp, Thermus caldophilus; identical to SEQ ID NO: 4965
  CDS (1)..(1317)

SEQ ID NO: 32717 - protein, 438 aa, Thermus caldophilus; identical to SEQ ID NO: 4966

SEQ ID NO: 32718 - DNA, 1458 bp, Vibrio parahaemolyticus; identical to SEQ ID NO: 4967
  CDS (1)..(1458)

SEQ ID NO: 32719 - protein, 485 aa, Vibrio parahaemolyticus; identical to SEQ ID NO: 4968

SEQ ID NO: 32720 - DNA, 1458 bp, Vibrio vulnificus; identical to SEQ ID NO: 4969
  CDS (1)..(1458)

SEQ ID NO: 32721 - protein, 485 aa, Vibrio vulnificus; identical to SEQ ID NO: 4970

SEQ ID NO: 32722 - DNA, 1425 bp, Xanthomonas axonopodis; identical to SEQ ID NO: 4971
  CDS (1)..(1425)

SEQ ID NO: 32723 - protein, 474 aa, Xanthomonas axonopodis; identical to SEQ ID NO: 4972

SEQ ID NO: 32724 - DNA, 1425 bp, Xanthomonas campestris; identical to SEQ ID NO: 4973
  CDS (1)..(1425)

SEQ ID NO: 32725 - protein, 474 aa, Xanthomonas campestris; identical to SEQ ID NO: 4974

SEQ ID NO: 32726 - DNA, 2345 bp, Antirrhinum majus; identical to SEQ ID NO: 4975
  CDS (10)..(1836)

SEQ ID NO: 32727 - protein, 608 aa, Antirrhinum majus; identical to SEQ ID NO: 4976

SEQ ID NO: 32728 - DNA, 2211 bp, Ipomoea batatas; identical to SEQ ID NO: 4977
  CDS (93)..(1919)

SEQ ID NO: 32729 - protein, 608 aa, Ipomoea batatas; identical to SEQ ID NO: 4978

SEQ ID NO: 32730 - DNA, 2988 bp, Pisum sativum; identical to SEQ ID NO: 4979
  CDS (140)..(2398)

SEQ ID NO: 32731 - protein, 752 aa, Pisum sativum; identical to SEQ ID NO: 4980

SEQ ID NO: 32732 - DNA, 2329 bp, Arabidopsis thaliana; identical to SEQ ID NO: 4981
  CDS (67)..(2025)

SEQ ID NO: 32733 - protein, 652 aa, Arabidopsis thaliana; identical to SEQ ID NO: 4982

SEQ ID NO: 32734 - DNA, 4127 bp, Solanum tuberosum; identical to SEQ ID NO: 4983
  CDS (143)..(3835)

SEQ ID NO: 32735 - protein, 1230 aa, Solanum tuberosum; identical to SEQ ID NO: 4984

SEQ ID NO: 32736 - DNA, 25 bp, Artificial sequence
  Primer sequence
atgcaggttttacatgtatgttcag

SEQ ID NO: 32737 - DNA, 26 bp, Artificial sequence
  Primer sequence
ttatttcaagcgatagtaaagctcac

SEQ ID NO: 32738 - protein, 974 aa, Artificial sequence
  Consensus
  Variant (2)..(2): Xaa in position 2 is any amino acid
  Variant (5)..(5): Xaa in position 5 is any amino acid
  Variant (10)..(10): Xaa in position 10 is any amino acid
  Variant (14)..(14): Xaa in position 14 is any amino acid
  Variant (18)..(108): Xaa in position 18 to 108 is any or no amino acid
  Variant (119)..(119): Xaa in position 119 is any amino acid
  Variant (123)..(124): Xaa in position 123 to 124 is any amino acid
  Variant (126)..(151): Xaa in position 126 to 151 is any or no amino acid
  Variant (153)..(153): Xaa in position 153 is any amino acid
  Variant (155)..(155): Xaa in position 155 is any amino acid
  Variant (160)..(160): Xaa in position 160 is any amino acid
  Variant (162)..(171): Xaa in position 162 to 171 is any amino acid
  Variant (173)..(178): Xaa in position 173 to 178 is any amino acid
  Variant (179)..(209): Xaa in position 179 to 209 is any or no amino acid
  Variant (211)..(216): Xaa in position 211 to 216 is any amino acid
  Variant (217)..(218): Xaa in position 217 to 218 is any or no amino acid
  Variant (221)..(223): Xaa in position 221 to 223 is any amino acid
  Variant (227)..(227): Xaa in position 227 is any amino acid
  Variant (229)..(229): Xaa in position 229 is any amino acid
  Variant (231)..(232): Xaa in position 231 to 232 is any amino acid
  Variant (234)..(234): Xaa in position 234 is any amino acid
  Variant (235)..(262): Xaa in position 235 to 262 is any or no amino acid
  Variant (264)..(264): Xaa in position 264 is any amino acid
  Variant (266)..(268): Xaa in position 266 to 268 is any amino acid
  Variant (272)..(275): Xaa in position 272 to 275 is any amino acid
  Variant (279)..(280): Xaa in position 279 to 280 is any amino acid
  Variant (281)..(406): Xaa in position 281 to 406 is any or no amino acid
  Variant (420)..(420): Xaa in position 420 is any amino acid
  Variant (424)..(425): Xaa in position 424 to 425 is any or no amino acid
  Variant (427)..(429): Xaa in position 427 to 429 is any or no amino acid
  Variant (431)..(442): Xaa in position 431 to 442 is any or no amino acid
  Variant (446)..(446): Xaa in position 446 is any amino acid
  Variant (456)..(456): Xaa in position 456 is any amino acid
  Variant (457)..(464): Xaa in position 457 to 464 is any or no amino acid
  Variant (466)..(475): Xaa in position 466 to 475 is any or no amino acid
  Variant (477)..(491): Xaa in position 477 to 491 is any or no amino acid
  Variant (493)..(514): Xaa in position 493 to 514 is any or no amino acid
  Variant (523)..(524): Xaa in position 523 to 524 is any or no amino acid
  Variant (529)..(529): Xaa in position 529 is any amino acid
  Variant (537)..(537): Xaa in position 537 is any amino acid
  Variant (540)..(540): Xaa in position 540 is any amino acid
  Variant (542)..(549): Xaa in position 542 to 549 is any or no amino acid
  Variant (551)..(551): Xaa in position 551 is any or no amino acid
  Variant (553)..(553): Xaa in position 553 is any or no amino acid
  Variant (557)..(557): Xaa in position 557 is any or no amino acid
  Variant (560)..(560): Xaa in position 560 is any amino acid
  Variant (561)..(567): Xaa in position 561 to 567 is any or no amino acid
  Variant (569)..(569): Xaa in position 569 is any amino acid
  Variant (577)..(578): Xaa in position 577 to 578 is any amino acid
  Variant (579)..(579): Xaa in position 579 is any or no amino acid
  Variant (583)..(584): Xaa in position 583 to 584 is any amino acid
  Variant (586)..(587): Xaa in position 586 to 587 is any or no amino acid
  Variant (589)..(607): Xaa in position 589 to 607 is any or no amino acid
  Variant (609)..(612): Xaa in position 609 to 612 is any or no amino acid
  Variant (614)..(641): Xaa in position 614 to 641 is any or no amino acid
  Variant (643)..(645): Xaa in position 643 to 645 is any or no amino acid
  Variant (647)..(647): Xaa in position 647 is any or no amino acid
  Variant (651)..(652): Xaa in position 651 to 652 is any amino acid
  Variant (656)..(656): Xaa in position 656 is any amino acid
  Variant (658)..(663): Xaa in position 658 to 663 is any or no amino acid
  Variant (668)..(668): Xaa in position 668 is any amino acid
  Variant (673)..(674): Xaa in position 673 to 674 is any amino acid
  Variant (682)..(683): Xaa in position 682 to 683 is any amino acid
  Variant (686)..(687): Xaa in position 686 to 687 is any amino acid
  Variant (690)..(692): Xaa in position 690 to 692 is any amino acid
  Variant (693)..(704): Xaa in position 693 to 704 is any or no amino acid
  Variant (715)..(715): Xaa in position 715 is any amino acid
  Variant (716)..(729): Xaa in position 716 to 729 is any or no amino acid
  Variant (732)..(733): Xaa in position 732 to 733 is any or no amino acid
  Variant (735)..(736): Xaa in position 735 to 736 is any amino acid
  Variant (738)..(739): Xaa in position 738 to 739 is any amino acid
  Variant (740)..(740): Xaa in position 740 is any or no amino acid
  Variant (742)..(743): Xaa in position 742 to 743 is any amino acid
  Variant (745)..(748): Xaa in position 745 to 748 is any or no amino acid
  Variant (750)..(752): Xaa in position 750 to 752 is any or no amino acid
  Variant (754)..(754): Xaa in position 754 is any or no amino acid
  Variant (756)..(758): Xaa in position 756 to 758 is any amino acid
  Variant (762)..(762): Xaa in position 762 is any amino acid
  Variant (764)..(764): Xaa in position 764 is any amino acid
  Variant (782)..(844): Xaa in position 782 to 844 is any or no amino acid
  Variant (847)..(847): Xaa in position 847 is any amino acid
  Variant (858)..(859): Xaa in position 858 to 859 is any amino acid
  Variant (864)..(864): Xaa in position 864 is any amino acid
  Variant (868)..(868): Xaa in position 868 is any amino acid
  Variant (870)..(871): Xaa in position 870 to 871 is any amino acid
  Variant (872)..(892): Xaa in position 872 to 892 is any or no amino acid
  Variant (894)..(894): Xaa in position 894 is any or no amino acid
  Variant (897)..(897): Xaa in position 897 is any amino acid
  Variant (900)..(901): Xaa in position 900 to 901 is any amino acid
  Variant (903)..(905): Xaa in position 903 to 905 is any amino acid
  Variant (907)..(908): Xaa in position 907 to 908 is any amino acid
  Variant (911)..(911): Xaa in position 911 is any amino acid
  Variant (915)..(916): Xaa in position 915 to 916 is any or no amino acid
  Variant (918)..(942): Xaa in position 918 to 942 is any or no amino acid
  Variant (944)..(945): Xaa in position 944 to 945 is any or no amino acid
  Variant (947)..(952): Xaa in position 947 to 952 is any or no amino acid
  Variant (955)..(956): Xaa in position 955 to 956 is any amino acid
  Variant (961)..(962): Xaa in position 961 to 962 is any amino acid
  Variant (965)..(966): Xaa in position 965 to 966 is any amino acid
  Variant (968)..(969): Xaa in position 968 to 969 is any amino acid
  Variant (972)..(973): Xaa in position 972 to 973 is any amino acid
MXVLXVAAEXAPWXKTGXXXXXXXXXXXXXXXXXXXXXXXXXXXXXXXXXXXXXXXXXXXXXXXXXXXXXXXXXXXXXXXXXXXXXXXXXXXXXXXXXXXXXXXXXXXGLGDVVGALPXALAXXGXXXXXXXXXXXXXXXXXXXXXXXXXXHXVXVVLPXYXXXXXXXXXXVXXXXXXXXXXXXXXXXXXXXXXXXXXXXXXXXXXXXXVXXXXXXXXGVXXXFIDXPXFXXRXXXXXXXXXXXXXXXXXXXXXXXXXXXXXYXDXXXRFAXXXXAALXXXXXXXXXXXXXXXXXXXXXXXXXXXXXXXXXXXXXXXXXXXXXXXXXXXXXXXXXXXXXXXXXXXXXXXXXXXXXXXXXXXXXXXXXXXXXXXXXXXXXXXXXXXXXXXXXXXXXXXXXXXXXXXXVVHANDWHTALLPXYLKXXYXXXGXXXXXXXXXXXXKSVXTIHNLAYQGXXXXXXXXXLXXXXXXXXXXLXXXXXXXXXXXXXXXGXXXXXXXXXXXXXXXXXXXXXXINFLKAGIXXADRVXTVSPTYAXEIXTXXXXXXXXEXGXGLDXLLXXXXXXXXLXGIVNGIDXXXWNPXXDXXLXXXXXXXXXXXXXXXXXXXYXXXXLXXXXXXXXXXXXXXXXXXXXXXXXXXXXKXXXKXALQXXLGLXVXXXXXXPLIGXIGRLXXQKGVDLIXXAIXXLLXXXXXXXXXXXXXXXVQLVLLGTGDXXXXXXXXXXXXXXXLEXXLXXLXXXYXXKXXXXVXXXVXFXXXLAHXIXAGADILLMPSRFEPCGLXXXXXXXXXXXXXXXXXXXXXXXXXXXXXXXXXXXXXXXXXXXXXXXXXXXXXXXXXXXXXXXQLXAMRYGTVPIVXXTGGLXDTVXDXXXXXXXXXXXXXXXXXXXXXXXGXGFXFDXXDXXXLXXALXRALXXYXXXXXXXXXXXXXXXXXXXXXXXXXWXXLXXXXXXGMXXDFSWXXSAXXYXXLYXXL

SEQ ID NO: 32739 - protein, 56 aa, Artificial sequence; identical to SEQ ID NO: 6176
  Consensus
  Variant (1)..(1): Xaa in position 1 is Gly or Ala
  Variant (2)..(4): Xaa in position 2 to 4 is any amino acid
  Variant (5)..(5): Xaa in position 5 is Ala, Ser or Cys
  Variant (6)..(7): Xaa in position 6 to 7 is any amino acid
  Variant (8)..(8): Xaa in position 8 is Val, Ile, Leu or Ala
  Variant (9)..(9): Xaa in position 9 is any amino acid
  Variant (10)..(10): Xaa in position 10 is Thr, Ala or Val
  Variant (13)..(14): Xaa in position 13 to 14 is any amino acid
  Variant (15)..(15): Xaa in position 15 is Tyr, Met or His
  Variant (16)..(16): Xaa in position 16 is Ala, Ser, Leu, Lys or Val
  Variant (17)..(17): Xaa in position 17 is any amino acid
  Variant (18)..(18): Xaa in position 18 is Glu, Gln or Asp
  Variant (19)..(19): Xaa in position 19 is Ile, Leu, Val or Glu
  Variant (20)..(28): Xaa in position 20 to 28 is any amino acid
  Variant (29)..(43): Xaa in position 29 to 43 is any or no amino acid
  Variant (44)..(44): Xaa in position 44 is Gly, Val or Tyr
  Variant (45)..(45): Xaa in position 45 is Ile or Val
  Variant (46)..(46): Xaa in position 46 is any amino acid
  Variant (49)..(49): Xaa in position 49 is Ile, Met, Val, Leu or Cys
  Variant (51)..(52): Xaa in position 51 to 52 is any amino acid
  Variant (53)..(53): Xaa in position 53 is any or no amino acid
  Variant (54)..(54): Xaa in position 54 is Trp, Tyr, Phe or Leu
  Variant (55)..(55): Xaa in position 55 is any amino acid
  Variant (56)..(56): Xaa in position 56 is Pro or Glu

SEQ ID NO: 32740 - protein, 65 aa, Artificial sequence; identical to SEQ ID NO: 6177
  Consensus
  Variant (1)..(1): Xaa in position 1 is Lys, Arg or Phe
  Variant (2)..(4): Xaa in position 2 to 4 is any amino acid
  Variant (5)..(5): Xaa in position 5 is Lys, Arg, Ala or Glu
  Variant (6)..(7): Xaa in position 6 to 7 is any amino acid
  Variant (8)..(8): Xaa in position 8 is Leu, Val or Ile
  Variant (9)..(11): Xaa in position 9 to 11 is any amino acid
  Variant (12)..(12): Xaa in position 12 is Leu, Val, Phe, Met or Thr
  Variant (13)..(13): Xaa in position 13 is any amino acid
  Variant (14)..(14): Xaa in position 14 is Leu, Ile, Phe or Val
  Variant (15)..(19): Xaa in position 15 to 19 is any amino acid
  Variant (20)..(22): Xaa in position 20 to 22 is any or no amino acid
  Variant (23)..(23): Xaa in position 23 is Leu, Val, Ile or Met
  Variant (24)..(24): Xaa in position 24 is Ile, Val, Phe, Leu, Tyr or Met
  Variant (25)..(26): Xaa in position 25 to 26 is any amino acid
  Variant (27)..(27): Xaa in position 27 is Ile or Val
  Variant (28)..(28): Xaa in position 28 is Gly, Ser, Thr, Cys or Ala
  Variant (30)..(30): Xaa in position 30 is Leu, Ile or Phe
  Variant (31)..(32): Xaa in position 31 to 32 is any amino acid
  Variant (33)..(33): Xaa in position 33 is any or no amino acid
  Variant (37)..(37): Xaa in position 37 is any amino acid
  Variant (38)..(38): Xaa in position 38 is Asp, His or Glu
  Variant (39)..(39): Xaa in position 39 is any amino acid
  Variant (40)..(40): Xaa in position 40 is Ile, Leu, Val, Met, Ala or Thr
  Variant (41)..(54): Xaa in position 41 to 54 is any amino acid
  Variant (55)..(59): Xaa in position 55 to 59 is any or no amino acid
  Variant (60)..(60): Xaa in position 60 is Val, Ile, Ala, Leu or Tyr
  Variant (61)..(61): Xaa in position 61 is Leu, Ile, Val, Met or Cys
  Variant (62)..(62): Xaa in position 62 is Leu, Val, Ile or Ala
  Variant (64)..(64): Xaa in position 64 is any amino acid
  Variant (65)..(65): Xaa in position 65 is Gly, Ala, Ser, Pro or Cys

SEQ ID NO: 32741 - protein, 51 aa, Artificial sequence; identical to SEQ ID NO: 6178
  Consensus
  Variant (1)..(1): Xaa in position 1 is Phe, Tyr, Leu or His
  Variant (2)..(5): Xaa in position 2 to 5 is any amino acid
  Variant (6)..(6): Xaa in position 6 is Ala, Ser, Ile or Val
  Variant (7)..(7): Xaa in position 7 is His, Arg or Gln
  Variant (8)..(8): Xaa in position 8 is any amino acid
  Variant (9)..(9): Xaa in position 9 is Ile, Val, Leu, Met or Ala
  Variant (10)..(10): Xaa in position 10 is any amino acid
  Variant (11)..(11): Xaa in position 11 is Ala, Gly or Thr
  Variant (12)..(12): Xaa in position 12 is Gly, Ala or Ser
  Variant (13)..(13): Xaa in position 13 is any amino acid
  Variant (15)..(16): Xaa in position 15 to 16 is any amino acid
  Variant (17)..(17): Xaa in position 17 is Leu, Ile, Val, Ala, Met or Cys
  Variant (18)..(18): Xaa in position 18 is Met, Ile, Val, His or Cys
  Variant (19)..(19): Xaa in position 19 is Pro or Thr
  Variant (21)..(21): Xaa in position 21 is any amino acid
  Variant (22)..(22): Xaa in position 22 is Phe or Tyr
  Variant (24)..(24): Xaa in position 24 is Pro or Ala
  Variant (25)..(25): Xaa in position 25 is Cys, Phe or Leu
  Variant (27)..(27): Xaa in position 27 is Leu or Ile
  Variant (28)..(28): Xaa in position 28 is any amino acid
  Variant (29)..(29): Xaa in position 29 is Gln, Asn or Pro
  Variant (30)..(30): Xaa in position 30 is Leu, Met or Ile
  Variant (31)..(31): Xaa in position 31 is any amino acid
  Variant (32)..(32): Xaa in position 32 is Ala, Gly or Ser
  Variant (33)..(33): Xaa in position 33 is Met, Leu or Gln
  Variant (34)..(34): Xaa in position 34 is any amino acid
  Variant (35)..(35): Xaa in position 35 is Tyr, Phe, Cys or Leu
  Variant (36)..(36): Xaa in position 36 is Gly, Ala or Asn
  Variant (37)..(37): Xaa in position 37 is Thr, Ser, Ala or Cys
  Variant (38)..(38): Xaa in position 38 is Val, Ile, Leu, Pro or Ala
  Variant (39)..(39): Xaa in position 39 is Pro, Cys or Val
  Variant (40)..(40): Xaa in position 40 is Ile, Val, Leu or Ala
  Variant (41)..(41): Xaa in position 41 is Val, Ala or Cys
  Variant (42)..(42): Xaa in position 42 is Arg, His, Ala, Ser or Thr
  Variant (43)..(43): Xaa in position 43 is any amino acid
  Variant (44)..(44): Xaa in position 44 is Thr or Val
  Variant (47)..(47): Xaa in position 47 is Leu or Ile
  Variant (48)..(48): Xaa in position 48 is any amino acid
  Variant (49)..(49): Xaa in position 49 is Asp or Glu
  Variant (50)..(50): Xaa in position 50 is Thr, Ser or Val
  Variant (51)..(51): Xaa in position 51 is Val or Ile

SEQ ID NO: 32742 - DNA, 1026 bp, Escherichia coli K12
  CDS (1)..(1026): transl_table=11
atgaaagcgttatccaaactgaaagcggaagagggcatctggatgaccgacgttcctgtaccggaactcgggcataacgatctgctgattaaaatccgtaaaacagccatctgcgggactgacgttcacatctataactgggatgagtggtcgcaaaaaaccatcccggtgccgatggtcgtgggccatgaatatgtcggtgaagtggtaggtattggtcaggaagtgaaaggcttcaagatcggcgatcgcgtttctggcgaaggccatatcacctgtggtcattgccgcaactgtcgtggtggtcgtacccatttgtgccgcaacacgataggcgttggtgttaatcgcccgggctgctttgccgaatatctggtgatcccggcattcaacgccttcaaaatccccgacaatatttccgatgacttagccgcaatttttgatcccttcggtaacgccgtgcataccgcgctgtcgtttgatctggtgggcgaagatgtgctggtttctggtgcaggcccgattggtattatggcagcggcggtggcgaaacacgttggtgcacgcaatgtggtgatcactgatgttaacgaataccgccttgagctggcgcgtaaaatgggtatcacccgtgcggttaacgtcgccaaagaaaatctcaatgacgtgatggcggagttaggcatgaccgaaggttttgatgtcggtctggaaatgtccggtgcgccgccagcgtttcgtaccatgcttgacaccatgaatcacggcggccgtattgcgatgctgggtattccgccgtctgatatgtctatcgactggaccaaagtgatctttaaaggcttgttcattaaaggtatttacggtcgtgagatgtttgaaacctggtacaagatggcggcgctgattcagtctggcctcgatctttcgccgatcattacccatcgtttctctatcgatgatttccagaagggctttgacgctatgcgttcgggccagtccgggaaagttattctgagctgggattaa

SEQ ID NO: 32743 - protein, 341 aa, Escherichia coli K12
MKALSKLKAEEGIWMTDVPVPELGHNDLLIKIRKTAICGTDVHIYNWDEWSQKTIPVPMVVGHEYVGEVVGIGQEVKGFKIGDRVSGEGHITCGHCRNCRGGRTHLCRNTIGVGVNRPGCFAEYLVIPAFNAFKIPDNISDDLAAIFDPFGNAVHTALSFDLVGEDVLVSGAGPIGIMAAAVAKHVGARNVVITDVNEYRLELARKMGITRAVNVAKENLNDVMAELGMTEGFDVGLEMSGAPPAFRTMLDTMNHGGRIAMLGIPPSDMSIDWTKVIFKGLFIKGIYGREMFETWYKMAALIQSGLDLSPIITHRFSIDDFQKGFDAMRSGQSGKVILSWD

SEQ ID NO: 32744 - DNA, 1113 bp, Deinococcus radiodurans R1
  CDS (1)..(1113): transl_table=11
gtgacttctcccagctcgaccgcaacttccagcccgaccacgaccaccgcccccacccctgcccggatgcgggccctgagcaagcagcagcccggcgagggcatctggatgatcgaaaccgaggtgccgacgcccggtcccaacgacctgctgattcgaattcgcaaggggagcatctgtggaaccgacgtgcacatctacaagtgggacgactgggcgagccagacggtgccggtgccgatggtcgtcgggcacgaatacgtgggtgtggtcgcgggcatgggctcggaagtgcgcggcttcgaaatcggcgaccgggtgagcggcgagggccacgtcacctgcgggcactgccgcaactgccgcgccgggcgccgccacctgtgccgcaacacgcagggggtgggcgtcaaccgccccggctccttcgccgagtatctggtgctgcccgccttcaatgccttcaagctgcccgacgacattcccgacgatgtcgccgctattttcgaccccttcggcaacgcggtgcacacggcgctgagcttcgacctggtgggcgaggacgtgctgattaccggcgccgggcccatcggctgcatggccgccgccgtcgcccggcacgtgggcgcccgcaacgtggtgattaccgacgtgaatgactaccgtctcgacctcgcgcggcagatgggcgtgacccgcgccgtgaatgtggcccgcgaggacctctggacggtggcgacgcaggaactcgacatgcacgagggcttcgacgtgggcatggaaatgagcggctcggggcctgccttcgcgcagatggtcagcgtgatgaacaacggcggcaaagtcgcgctgctcggcattccctcgggcgaggtgcagatcgattggaacgccgtcatcttcaagatgctcaccatcaagggcatctatggccgcgagatgttcgaaacctggtacaagatggccgccctgattcagtcgggcctggacctcacgccggtcatcacccaccactacggcatcggcgactttcagcagggcttcgacgccatgctcagcgggcagagcggcaaagtgattctggactgggagacggaagagcaaagcgcctga

SEQ ID NO: 32745 - protein, 370 aa, Deinococcus radiodurans R1
MTSPSSTATSSPTTTTAPTPARMRALSKQQPGEGIWMIETEVPTPGPNDLLIRIRKGSICGTDVHIYKWDDWASQTVPVPMVVGHEYVGVVAGMGSEVRGFEIGDRVSGEGHVTCGHCRNCRAGRRHLCRNTQGVGVNRPGSFAEYLVLPAFNAFKLPDDIPDDVAAIFDPFGNAVHTALSFDLVGEDVLITGAGPIGCMAAAVARHVGARNVVITDVNDYRLDLARQMGVTRAVNVAREDLWTVATQELDMHEGFDVGMEMSGSGPAFAQMVSVMNNGGKVALLGIPSGEVQIDWNAVIFKMLTIKGIYGREMFETWYKMAALIQSGLDLTPVITHHYGIGDFQQGFDAMLSGQSGKVILDWETEEQSA

SEQ ID NO: 32746 - DNA, 1062 bp, Bacillus subtilis subsp. subtilis str. 168
  CDS (1)..(1062): transl_table=11
atgactcacacagtacctcaaaacatgaaagcggctgttatgcacaacacaagagagatcaaaattgaaacattgcctgtgcctgatatcaatcatgatgaagtgttgattaaggtgatggctgtcggaatttgcggatctgatctgcattactatacaaatggccgaataggcaactatgttgtggaaaaaccatttatccttgggcatgaatgtgcgggtgaaattgccgctgtcggatcatctgtcgatcaattcaaggtgggagaccgcgtcgctgtagagccgggtgttacgtgcggacgctgtgaggcgtgcaaagaaggacgctataatctttgcccggatgtacagtttttggctacaccgccggtagacggtgcgtttgtccaatatattaaaatgcgtcaggactttgtttttttaatcccagactcactttcttatgaagaagctgctttgatcgagccgttttctgtcggtatccatgcggcggccagaacgaagctacagcccggatcaacgattgcgattatggggatgggccctgttgggttaatggctgttgccgcagctaaagcatttggggcaggcacaatcattgtcaccgacttagagccgctgcggttagaagctgcgaaaaaaatgggagcgactcacattattaatatacgtgaacaggatgcacttgaagagattaaaacgatcacgaatgatagaggcgttgatgttgcttgggaaacagcagggaatccagcggcattgcaatccgcactggcttctgtgcgccggggcggaaaattggcgattgtcggtttgccttcacagaacgagattccgctcaacgtgccgtttattgcggataatgagattgatatttacgggatcttccgttatgccaatacgtatccaaagggaatcgaatttcttgcttcaggcattgtggacacgaagcatctagtaacggaccaatattcgctggagcagacgcaagatgcgatggagcgggcgcttcaatttaagaatgaatgtttaaaagtgatggtgtatccaaatcgctga

SEQ ID NO: 32747 - protein, 353 aa, Bacillus subtilis subsp. subtilis str. 168
MTHTVPQNMKAAVMHNTREIKIETLPVPDINHDEVLIKVMAVGICGSDLHYYTNGRIGNYVVEKPFILGHECAGEIAAVGSSVDQFKVGDRVAVEPGVTCGRCEACKEGRYNLCPDVQFLATPPVDGAFVQYIKMRQDFVFLIPDSLSYEEAALIEPFSVGIHAAARTKLQPGSTIAIMGMGPVGLMAVAAAKAFGAGTIIVTDLEPLRLEAAKKMGATHIINIREQDALEEIKTITNDRGVDVAWETAGNPAALQSALASVRRGGKLAIVGLPSQNEIPLNVPFIADNEIDIYGIFRYANTYPKGIEFLASGIVDTKHLVTDQYSLEQTQDAMERALQFKNECLKVMVYPNR

SEQ ID NO: 32748 - DNA, 1044 bp, Caenorhabditis elegans
  CDS (1)..(1044)
atgtctcaagacaatttatcagcggtactttatggcgtagatgatcttcgtctggagcaagttccaattccaaagcctgggccaaatcaggtgcttgttaaagttcacactgttggaatttgtggaagtgatgttcactattggacgcacggagcaatcgggccatttgtcgtaaaagaaccaatgatcgttggtcatgaaacgtctgggattgtttctgaagttggaaatgaggtgaaacatcttaaagttggtgacagaattgcaatggaaccaggccttccatgcaaactttgtgagcactgcaaaactggaagatacaatttgtgcccggaaatgagattctttgctactccaccagttcatggaaccctatccagatttgtggtgcacgacgctgatttttgcttcaaactcccagataacctttcatttgaagacggggctcttattgaaccactttccgttgcgattcatgcgtgtcgacgtggaaatgttcaaatgggacaccgagttcttgttctcggagccggtcctattggagttttaaacctcattaccgctaaagctgtaggagctggaaaagtagttattactgatttagatgatggcagacttgcgctcgcaaagaaacttggggcagatgcaacaattaacgttaaaggaaagtcattggacgcagttaaatcggagatcattaccgcactgggtgatcagcagccggatgtctgtattgagtgtactggcgcacagccgagtatcgagacagctataacgaccaccaaatcaggtggagtcatagttcttgtcggattgggagcagaccgagttgaaataccaataattgaatcagcaactagagaagttgacatgcgtgggattttcagatatgtaaactgctacccaacagcaatcgaactcatttcatctggaaaactaaatttgtcggggctaacacgtgctcactataaacttgaagaaacacaagaagcattcaaaagaacacagaaggctgatgtcatcaaagtatttattcaatgctga

SEQ ID NO: 32749 - protein, 347 aa, Caenorhabditis elegans
MSQDNLSAVLYGVDDLRLEQVPIPKPGPNQVLVKVHTVGICGSDVHYWTHGAIGPFVVKEPMIVGHETSGIVSEVGNEVKHLKVGDRIAMEPGLPCKLCEHCKTGRYNLCPEMRFFATPPVHGTLSRFVVHDADFCFKLPDNLSFEDGALIEPLSVAIHACRRGNVQMGHRVLVLGAGPIGVLNLITAKAVGAGKVVITDLDDGRLALAKKLGADATINVKGKSLDAVKSEIITALGDQQPDVCIECTGAQPSIETAITTTKSGGVIVLVGLGADRVEIPIIESATREVDMRGIFRYVNCYPTAIELISSGKLNLSGLTRAHYKLEETQEAFKRTQKADVIKVFIQC

SEQ ID NO: 32750 - DNA, 1047 bp, Pseudomonas putida
  CDS (1)..(1047): transl_table=11
atgctcgcgataaggaaaactaaagcagggccaggagggctatctgtcgatgatgtggccgcccctaaagaggcccacagtactgacgtgctggtgaaagttgaagcggccggtatctgtggtactgacttgttgatctataaatggggcgagttcgccaaaagaatgaaactccccactatcttgggtcatgaagttagcggggtgattgaacaggtcggatctgacgttaaaggtctaaggcctgggatgcgcgtcagtctggagagtcatctcccttgtggaacgtgctacacgtgtcgacgcggttgggcgcatgtttgtcctaagacgcggtatccgggggtcgactttgatggaggcttcgcgtctttcgttgtggttccggaaagcgtgtgttggccggtgccgtgcggaattcctccgctccaggcggcaatgatggagccgttcgggcttgcggtgcatgcaagtctggagggttctggggtttcgggattgaatgttcttgtttctggttgcggtccgatcggacttatgaacattgcagccgccaaagcactgggagcaagcaaggtcattgcaccggacattcatcctctgcgcctcactgcagcagccaaaatgggggcggatgaatgcattaatgcaactgaagagagcgtttataagactgtgcgttcgctgctcggtgagaggggagtagatgttgcaattgactattctgggcaagcagcggcgttaaaggagcttattcaatccatcacccatggtggtgagttgcgactgatgggcgtcccgtcacatgatattttgctcaacttagaggagtggcttttcaaaggccttattgtacgtggcctgcatggcaggcgtctgtatgaaagatgggagcgttcaactagcttattggttacagggcgtgttgatttgtcttcgctcgtatcgcatcgattgccactatcggcggcagaggatgcgttcgaaatggccctaaatggtcagtccttgaaaatcctgtttgagcccaatggctcatgtatctaa

SEQ ID NO: 32751 - protein, 348 aa, Pseudomonas putida
MLAIRKTKAGPGGLSVDDVAAPKEAHSTDVLVKVEAAGICGTDLLIYKWGEFAKRMKLPTILGHEVSGVIEQVGSDVKGLRPGMRVSLESHLPCGTCYTCRRGWAHVCPKTRYPGVDFDGGFASFVVVPESVCWPVPCGIPPLQAAMMEPFGLAVHASLEGSGVSGLNVLVSGCGPIGLMNIAAAKALGASKVIAPDIHPLRLTAAAKMGADECINATEESVYKTVRSLLGERGVDVAIDYSGQAAALKELIQSITHGGELRLMGVPSHDILLNLEEWLFKGLIVRGLHGRRLYERWERSTSLLVTGRVDLSSLVSHRLPLSAAEDAFEMALNGQSLKILFEPNGSCI

SEQ ID NO: 32752 - DNA, 1053 bp, Thermoanaerobacter tengcongensis MB4
  CDS (1)..(1053): transl_table=11
atgtctattatggatggacttatgaccgccgtggtaaaacaataccacaaagaaggggcagatatagtaaaaaaggaaataccaaagataggccctgatgaagttttgataaaagttaaagctacttctatttgcggcacagacgttcacatatacgtctggaatgaatgggcaaaaagtagaataaaacctccaaaaacgatgggacacgaatttgtaggagaggttgtagaaattggagaaaatgtcacatcagtaaaagtgggagacttagtaagcgcagaaactcatatagtatgcggaaagtgcagagcctgcagaaccggcaacgctcacatatgtgaaaataccctcattttaggcgttgacacagatggagcttttgcagaatacatcaaagttcctgaaagcaatgtgtggataaacgacaaaaacatacctctagagatactatccatacaggaacctcttggaaacgcagtccacactgttttttcaggagacgtagttggaaaatctgtagctgtcataggatgcggcccaataggaatgatggcaataccacttcttaaaagaacaggtgctgcagcaatattcgcgattgaacctgctgactacaggagagagttggctcacaagcttggtgcaacaagggttataaatcctctccgcgaagacgttgtcagcataataaaaagtgaaacagaaggctatggagcagatgtagttttggacttttcaggtaacccaaccgccataaggcagggtctagagtacattgcaaaaggtggcagaatgtctattctaggccttcctgacaatgaagttccaattgacatcacaaataatgtggtattcaaaggaataactatacaaggcataactggaagaagaatgtacgatacctggtacaccgtaaagggcttactaaaatcaggtcttgcagaagatttaaagccaataatcacccacacattccctcttaccgaataccagaagggaatggaactcatgataaaagggcagtgcggtaaagtcgtattatatccgtaa

SEQ ID NO: 32753 - protein, 350 aa, Thermoanaerobacter tengcongensis MB4
MSIMDGLMTAVVKQYHKEGADIVKKEIPKIGPDEVLIKVKATSICGTDVHIYVWNEWAKSRIKPPKTMGHEFVGEVVEIGENVTSVKVGDLVSAETHIVCGKCRACRTGNAHICENTLILGVDTDGAFAEYIKVPESNVWINDKNIPLEILSIQEPLGNAVHTVFSGDVVGKSVAVIGCGPIGMMAIPLLKRTGAAAIFAIEPADYRRELAHKLGATRVINPLREDVVSIIKSETEGYGADVVLDFSGNPTAIRQGLEYIAKGGRMSILGLPDNEVPIDITNNVVFKGITIQGITGRRMYDTWYTVKGLLKSGLAEDLKPIITHTFPLTEYQKGMELMIKGQCGKVVLYP

SEQ ID NO: 32754 - DNA, 1035 bp, Oceanobacillus iheyensis HTE831
  CDS (1)..(1035): transl_table=11
atgaaggcattagtgaaaacagagctagggcatggtaatctacacattcaaaatgttgaagaaccaagcgtatctagtcatcaagtgaaaataaaagtagcttatgcaggtatttgcggttcggatattcatacgtacgaaggtcattataaagtagctgctccggtaactttaggacatgagttttccggtcggattgtagaggttggtgaaggagttaccgattttaaagtcggtgatcgtgttacttcagaaacaactttttctatttgtggagaatgtcgctattgtcaaactggtgattataatttatgcaatcatcgtaaagggttaggtacgcagcaaaatggtggatttacgaattacttgattgctagagaagaaagtcttcaccatttgcccgacgaagtggatgatcgttctgcatccatgacagaaccattagcatgtacgtatcatgctattcaaaaaataaatattaagccaggagatttagtcgttgtgcttggaccaggtccaattggtttgttagcagctcaggttgctaaaagctatggagctaccgtcatgatgtccggactcgataatgacaaaattcgtctggataaagcgaaagaagttggcattgactacgttatcaacattcaagaagaagatataaaggaaaaaattgcagctttaacggatggttatggagtggatgtagtattagaatgttctggttcgattcatgctgctaatcaaggtctcgacttactacggaaaaaaggaagctacgcacaagtaggaatttttccagactcacatgtgaagtttgatatggaaaaagtcattcaaaaagaaatacatgttgtaggaagtagaagtcaaaaatcagcagattgggaaccatcacttcagttaatgaaagaaaagaaagtagatgcaaaagccttagtaacgcatgaattcactattgatcagtgggatgaagcataccaagcgataaaagacggagaggcaataaaagtactattaaaaccattacaagattaa

SEQ ID NO: 32755 - protein, 344 aa, Oceanobacillus iheyensis HTE831
MKALVKTELGHGNLHIQNVEEPSVSSHQVKIKVAYAGICGSDIHTYEGHYKVAAPVTLGHEFSGRIVEVGEGVTDFKVGDRVTSETTFSICGECRYCQTGDYNLCNHRKGLGTQQNGGFTNYLIAREESLHHLPDEVDDRSASMTEPLACTYHAIQKINIKPGDLVVVLGPGPIGLLAAQVAKSYGATVMMSGLDNDKIRLDKAKEVGIDYVINIQEEDIKEKIAALTDGYGVDVVLECSGSIHAANQGLDLLRKKGSYAQVGIFPDSHVKFDMEKVIQKEIHVVGSRSQKSADWEPSLQLMKEKKVDAKALVTHEFTIDQWDEAYQAIKDGEAIKVLLKPLQD

SEQ ID NO: 32756 - DNA, 1056 bp, Oceanobacillus iheyensis HTE831
  CDS (1)..(1056): transl_table=11
atgaaggcagcagtttggtatggtaaacacgatattcgtgtagagaataaggaagaacctataattaaacctggaaaggttaaaataaaagtagcatggacaggcatttgtggaagtgacctgcatgcttatcacggcgctgagggagtcgttcaagttggcgaacctcatcctgtaactggtgaaatggcaccattgacgcttgggcatgagttttctggtgtaattcatgaaattggtgaaggtgtaagcggtttatctgttggagatcgtgtagcgattgagccggctattaagtgtggcaagtgtgagaattgtgtacgaggaaactacaacttgtgtgaacacaatggctttgttggcttacaatctgacggtgcttttgctgagtatgcaattgttgatccacatatggttcacaagcttccagataatatatcgtttgaagaagctacagcaattgagcctacagctgtgtctttccacgcgcttaaattaagcaatatgaaagcaggcgatacggtagcggtctttggtgttggcccaattggtcttacggcgattctatgtgcgaaggcagctggtgcgtctcgtatttatgcgattgatgtttccaatgagcgtcttgagatggctcaaaagcttggcgcaactacggttattaatgcgatagaagagaatgcggcagaaaagatatatgctgaaacaggaagtggcgttactatcgcatttgattgtgcaggagctgaagcgactgtgaacagtgcaattgattcacttgctaaaggcggacaacttgtcattgtgtccattattccagaaccgatcaaagtaaatcttttgcaggcgaacttaaaagaaataaacattcttgcaactatcggttacagagatgtgtataaagacgttattgctatggtggaatcaggacagctggatcttaaaccgatcatcactaaaaaaatcggtttggatgatattatcgaagaaggcttccacgcccttacaaatgataagagccaagcaaaaattcttgtgagcccaacaggggtttaa

SEQ ID NO: 32757 - protein, 351 aa, Oceanobacillus iheyensis HTE831
MKAAVWYGKHDIRVENKEEPIIKPGKVKIKVAWTGICGSDLHAYHGAEGVVQVGEPHPVTGEMAPLTLGHEFSGVIHEIGEGVSGLSVGDRVAIEPAIKCGKCENCVRGNYNLCEHNGFVGLQSDGAFAEYAIVDPHMVHKLPDNISFEEATAIEPTAVSFHALKLSNMKAGDTVAVFGVGPIGLTAILCAKAAGASRIYAIDVSNERLEMAQKLGATTVINAIEENAAEKIYAETGSGVTIAFDCAGAEATVNSAIDSLAKGGQLVIVSIIPEPIKVNLLQANLKEINILATIGYRDVYKDVIAMVESGQLDLKPIITKKIGLDDIIEEGFHALTNDKSQAKILVSPTGV

SEQ ID NO: 32758 - DNA, 1041 bp, Rhodopirellula baltica SH 1
  CDS (1)..(1041): transl_table=11
atgaaggcattgttgctgaccgaatacaaaaacatgcaggtgacggatgtggatgagcccgaggtgggcccagatgacgttttggtccaagtcgaagcgtgtgggatctgcggcagtgacattcatggatacgatggcagcaccgggcgtcgtatcccgcctttggtgatggggcacgaggctgccggggtggtggttcaggtcggcgaaaacgtccgcgatttggaactcggagcccgcgtcacgtttgattcgatggtgtcctgcggaaactgtgagttttgtcgcgaagggcacgggaacctttgtgacaaccgaatggttctcggcgtttcctgtggtgattaccgacgtcatggtgcgttcgcggaacgcatctcggttccgcgtcggatagtctatcgattacccgacactttgcccttcgaacacgcagctttggtcgaagcggtcagcgtcgcggtccatgcagcggaagtcactccgatcaagctaggtgataccgccgttgtggttggtgctggcatgatcggattgttggctgtgcaagccgtgcgagcagcgggtgcgacgcaggtcatcgcggtggatctaaacgacaaacgcctggaaacagccggaacgttgggagccgacgtgttgttgcgagccgatcaagtggacgtgccggaaaaggttcgcgaactgaccggtggccgcggggcagacgtggcattggaagtcgtcggtgcgacgccgacggtcaaaacagcgattgaatccgttcgcaagggtggagcggtcacgttggtcggcaacgtctcgccgacgatcgaattgcctttgcagtcagtcgttacgcgagaaattcgattgcagggcacatgtggttgcaacggtgaatacccacagtgcatcgatttgatgaatcgcggcgtcatcaacgttgaacctttgatcacggccaaaatttctttggcggacggtcccaaatggtttgaccgcctgcacgccggtgatgcggagcaaatgaaggtgttggtttgtcctcgttcggagtga

SEQ ID NO: 32759 - protein, 346 aa, Rhodopirellula baltica SH 1
MKALLLTEYKNMQVTDVDEPEVGPDDVLVQVEACGICGSDIHGYDGSTGRRIPPLVMGHEAAGVVVQVGENVRDLELGARVTFDSMVSCGNCEFCREGHGNLCDNRMVLGVSCGDYRRHGAFAERISVPRRIVYRLPDTLPFEHAALVEAVSVAVHAAEVTPIKLGDTAVVVGAGMIGLLAVQAVRAAGATQVIAVDLNDKRLETAGTLGADVLLRADQVDVPEKVRELTGGRGADVALEVVGATPTVKTAIESVRKGGAVTLVGNVSPTIELPLQSVVTREIRLQGTCGCNGEYPQCIDLMNRGVINVEPLITAKISLADGPKWFDRLHAGDAEQMKVLVCPRSE

SEQ ID NO: 32760 - DNA, 1029 bp, Legionella pneumophila subsp. pneumophila str. Philadelphia 1
  CDS (1)..(1029): transl_table=11
atgacaatgaaatcattggttaaagcaaaaaaagagcctggaatttggatgcaggatattcctgttcctgaatatggagtaaacgatgttttaataaaaattaaaaggactgcaatttgtggtacagatatccatatttattcctgggatgaatgggcgcaagccacaattcctgttcctatgaccgtagggcatgaattttatggtgaaatagtagaggttggaaaagaagtacaaggtttgaaagttggacagagagtttctggtgaaggtcatattacctgtggtttttgcagaaattgtcgtgccggcaagcgtcatttatgtcgtaataccctgggagtgggggtgaatcgaccaggatgctttgctgagtatctggcgcttcctgctaccaatgtcatcgctctccctgacaacattacagaagagcaagcggctattctcgatccttttggaaatgctgctcattgtgcattggcatttgatgtagtaggcgaagacgttttgattactggtgcaggccccataggaataatggccgcagccatcgtaagacatattggcgcacggcatgttgttatcaccgatgttaacgatcatcgattggaactggccaggcaaatgggtgtcagccgagcggttaatgtcaaataccaaaaattaagtgatgtggctaatgagctaggaatgcttgagggttttgatgttggtctggaaatgtccgggaaccctatggcattaaacgatatgatgaaagcgatgaatcatggtggtcatgtggctttattgggtatcccaccacaagaaacccctatagattggaaccaggttatctttaaaggattggttattaagggtatttatggtcgagaaatgtttgaaacctggtataagatgattgctatgttacagagcggtttaaatatttctcccgttattactcataatttcccagtagatgaatatcagcacgcatttcaaattatggcatcgggccagtcagggaaagttatactgaactggtag

SEQ ID NO: 32761 - protein, 342 aa, Legionella pneumophila subsp. pneumophila str. Philadelphia 1
MTMKSLVKAKKEPGIWMQDIPVPEYGVNDVLIKIKRTAICGTDIHIYSWDEWAQATIPVPMTVGHEFYGEIVEVGKEVQGLKVGQRVSGEGHITCGFCRNCRAGKRHLCRNTLGVGVNRPGCFAEYLALPATNVIALPDNITEEQAAILDPFGNAAHCALAFDVVGEDVLITGAGPIGIMAAAIVRHIGARHVVITDVNDHRLELARQMGVSRAVNVKYQKLSDVANELGMLEGFDVGLEMSGNPMALNDMMKAMNHGGHVALLGIPPQETPIDWNQVIFKGLVIKGIYGREMFETWYKMIAMLQSGLNISPVITHNFPVDEYQHAFQIMASGQSGKVILNW

SEQ ID NO: 32762 - DNA, 984 bp, Photobacterium profundum SS9
  CDS (1)..(984): transl_table=11
atgaatgaagtagacaagcctgaaatgggccataatgatctacttattcgtattaagaaaaccgctatttgtggtacagatgtacatatctacaactgggatgaatggtcacaaaagacgattccagttccaatggttgtaggtcatgaatatgttggcgaagttgttggtattggccaagaagttcgtggttttacaatcggtgatcgtgtgtctggtgaaggtcatattacatgtggtcattgccgtaattgtcgtggtggtcgtacacacctttgtcgtaatacgacaggcgttggtgttaaccgtgatggcgcatttgctgagtttttggttattcctgcattcaatgcgttcaagatccctgcaggtatctctgacgatctagcatcaatcttcgacccgtttggcaatgctgttcatactgcattatcattcgatcttgttggtgaagatgtgctaattacaggtgctggtcctattggtattatggctgctgctgtcgctaaacacgttggtgcacgccatgttgtgattaccgatgtgaacgaataccgtctagatcttgctcgtaaaatgggcgtgactcgcgctgttaacgtagcaaacgaaaaacttgaagatgtaatgtctgaacttggcatgacagaaggttttgacgttggtttagaaatgtctggcgtaccatcagcatttaacggcatgctagctagcatgaaccacggtggtaaagtggcgttgttgggtattccaccatcagacatggcagtagattggacccaagttatctttaaaggtttggttattaaaggtatctacggccgtgaaatgtttgaaacttggtacaagatggcaagcttgattcaatcaggcttagatctaacaccaattatcacgcaccattacaaaattgatgatttccaaaaaggctttgacatgatgcgttcaggcatgtcaggtaaagttattctcgattgggaataa

SEQ ID NO: 32763 - protein, 327 aa, Photobacterium profundum SS9
MNEVDKPEMGHNDLLIRIKKTAICGTDVHIYNWDEWSQKTIPVPMVVGHEYVGEVVGIGQEVRGFTIGDRVSGEGHITCGHCRNCRGGRTHLCRNTTGVGVNRDGAFAEFLVIPAFNAFKIPAGISDDLASIFDPFGNAVHTALSFDLVGEDVLITGAGPIGIMAAAVAKHVGARHVVITDVNEYRLDLARKMGVTRAVNVANEKLEDVMSELGMTEGFDVGLEMSGVPSAFNGMLASMNHGGKVALLGIPPSDMAVDWTQVIFKGLVIKGIYGREMFETWYKMASLIQSGLDLTPIITHHYKIDDFQKGFDMMRSGMSGKVILDWE

SEQ ID NO: 32764 - DNA, 1044 bp, Silicibacter pomeroyi DSS-3
  CDS (1)..(1044): transl_table=11
atgcgatccaacacgatgaaagcgctggagaaatccaagcctgaggaagggttgtggatggtgcaggcaccggtgcccgagatcggccctgacgatgtgctgatcaagatcaagaagaccggcatttgcggcaccgatatccatatctggaactgggacgaatgggccgcgcacacggtgccggtgccgatgatcaccggccatgaatttgcgggcgagatcgtcgagctgggccgtgatgtcaccggcctcagcatcggtcagcgggtctcgggcgaggggcatctgatcggcaccgaaagccggcagagccgggcaggcaagttccacctggacccgggcacgcgcgggatcggtgtcaacgtgcagggggcctttgcgcaatatctgcgactgcccgccttcaacgtggtgccgctgcccgaggatatcccggacgagatcggcgccatcctcgacccgctgggcaatgcggtgcacaccgcgctgagtttcgacctcttgggcgaggatgtgctgatcaccggtgccgggccgatcggcatcatggcggcggcggtggccaaacatgccggcgcccgccatgtggtgatcaccgatatcaacgccgaccggctgaaactggcgcagcacgtggtgcccagggcgcggaccgtcgatgtcacgcgcgaggatctgggcgacgtggtccacgagcttggcctgaaacaggggttcgatgtcgggctggaaatgtcgggctcgcaagcggcgctcgaccagatggtcgaggcgctggtgatgggcggcaagatcgcgttgctgggtattccgccgggcaagtcgccggtggactggtcgcgcatcgtgttcaaggcgatcaccatcaagggtgtctatggccgcgagatgttcgagacctggtacaagatgatcgccatgttgcagaacgggctggatgtgagccgggtgatcacccatcgttttggcgtcgatgagttccgcgaagggtttgcggcgatgaaatcgggcctcagcggcaaggtggtgctggactggacctga

SEQ ID NO: 32765 - protein, 347 aa, Silicibacter pomeroyi DSS-3
MRSNTMKALEKSKPEEGLWMVQAPVPEIGPDDVLIKIKKTGICGTDIHIWNWDEWAAHTVPVPMITGHEFAGEIVELGRDVTGLSIGQRVSGEGHLIGTESRQSRAGKFHLDPGTRGIGVNVQGAFAQYLRLPAFNVVPLPEDIPDEIGAILDPLGNAVHTALSFDLLGEDVLITGAGPIGIMAAAVAKHAGARHVVITDINADRLKLAQHVVPRARTVDVTREDLGDVVHELGLKQGFDVGLEMSGSQAALDQMVEALVMGGKIALLGIPPGKSPVDWSRIVFKAITIKGVYGREMFETWYKMIAMLQNGLDVSRVITHRFGVDEFREGFAAMKSGLSGKVVLDWT

SEQ ID NO: 32766 - DNA, 1074 bp, Staphylococcus haemolyticus JCSC1435
  CDS (1)..(1074): transl_table=11
atgagtgaaactattccggagaaaatgaacgttgcattaatgcatgaaccttatgatattgaaattgtcgaaagagatatgccaaaagtaggacctaaagatgtcttaatcaagatgatggcagtaggtgtttgtggttctgacgttcactattatgcacatggtcgtgttggtgaattcgtagtcgaaaaaccaatcgtattaggacatgaatgtgctggtatggtagcacaagttggggatgaagtaacagactttaaagtaggagatcgtgttgctatcgaaccaggtgaaccttgccgtgaatgtgaatattgtaaatctggacaatataatttatgtccacatatggaatttatggcgacaccaccatacgatggtgcgttctgtgaatacgtaagccatccggcagacttcctttatcatttaccagactcagtgacttatgaacaagcaacccttgttgaaccattctcagtaggtttacaagcatgtaagcgtgcggatattaaaccaggatcaactgttgtgattatgggtatgggtccagttggtttaatggcagttgtagctgctaaagcttatggcgcaacaaacattatcgtttcagacttagaagataatcgtttagaagcggctaaacgtttaggggcaacaacagcaataaatattaaaaatgaagacgtcgttgaacgcattaaagaattaacagacggtcaaggtgttaactatgcaatcgaaacagcaggtaacccgatcgccttaagaagcgcattaaattcattaaaagatggcggtactttagctattgttggtttacctcaagaagatatgaacgaaatcaatgtgccatttattgcgaaccatgaaattaatattgtgggtgtcttcagatacgcgaatacgtacccacaaggcattcaaattttaagtacaacagatgctgatatcgactcattattcacacatcaattcgaactaaatgatacgaaagaagccatggaattaacacgtacaagtaaaggtgatgccttgaaagtaatggtgtacccaaacggtttcttagataaataa

SEQ ID NO: 32767 - protein, 357 aa, Staphylococcus haemolyticus JCSC1435
MSETIPEKMNVALMHEPYDIEIVERDMPKVGPKDVLIKMMAVGVCGSDVHYYAHGRVGEFVVEKPIVLGHECAGMVAQVGDEVTDFKVGDRVAIEPGEPCRECEYCKSGQYNLCPHMEFMATPPYDGAFCEYVSHPADFLYHLPDSVTYEQATLVEPFSVGLQACKRADIKPGSTVVIMGMGPVGLMAVVAAKAYGATNIIVSDLEDNRLEAAKRLGATTAINIKNEDVVERIKELTDGQGVNYAIETAGNPIALRSALNSLKDGGTLAIVGLPQEDMNEINVPFIANHEINIVGVFRYANTYPQGIQILSTTDADIDSLFTHQFELNDTKEAMELTRTSKGDALKVMVYPNGFLDK

SEQ ID NO: 32768 - DNA, 1026 bp, Colwellia psychrerythraea 34H
  CDS (1)..(1026): transl_table=11
atgaaatctttagctaaattaaaagcagaaccgggcatttggttaacgcgaaccgaaaaaccaaaactaggtcataatgatctgctaatcaaaattaaaaaaacggccatttgtggtacagatatccacatttataattgggatgaatgggcacaaaaaacagtgcctacgcctatggttgttggacatgagtacgcaggtgaagtggttggtatcggccaagaagttaaaggctttactttaggtgaccgggtttctggtgaaggccatattacttgtggtcattgccgtaattgtcgtggtggcagaactcatttatgtcgtaataccgttggtgttggggtcaatcgtgcggggtcatttgcagagtatctagtgatacctgcatacaatgcctttaaattacctgacgaaatttctgatgatttagcgtcaatttttgacccctttggtaatgcagttcataccgcattgtcatttgatttagtgggtgaggatgtattaatcaccggtgctggccctattggtattatggctgcagccgttgctaaacatgtaggtgctcgtcatgtcgttattaccgatattaacgaatatcgtcttgaccttgcaagaaaaatgggcgctactcgtgctgttgatgtgagtaaagaaagcttaaaagatgtcatgaccgatttggggatgaccgagggttttgatgttggtatggaaatgtcaggtgttccaatggcattcactagcatgttagaaagcatgaataatggtggtaaaattgccatgctgggtattcctggtagcgatatggctattgattggagccaagttatttttaaagggcttaccattaaaggtatttatggtcgtgaaatgttcgaaacttggtataagatggcaagtttgattcaatctggtttagatctcaccccgattattacccatcactacaatatcgatgactttcagcaaggctttgatatgatgcgttctggtcaatctggcaaggtcattttagattggacttaa

SEQ ID NO: 32769 - protein, 341 aa, Colwellia psychrerythraea 34H
MKSLAKLKAEPGIWLTRTEKPKLGHNDLLIKIKKTAICGTDIHIYNWDEWAQKTVPTPMVVGHEYAGEVVGIGQEVKGFTLGDRVSGEGHITCGHCRNCRGGRTHLCRNTVGVGVNRAGSFAEYLVIPAYNAFKLPDEISDDLASIFDPFGNAVHTALSFDLVGEDVLITGAGPIGIMAAAVAKHVGARHVVITDINEYRLDLARKMGATRAVDVSKESLKDVMTDLGMTEGFDVGMEMSGVPMAFTSMLESMNNGGKIAMLGIPGSDMAIDWSQVIFKGLTIKGIYGREMFETWYKMASLIQSGLDLTPIITHHYNIDDFQQGFDMMRSGQSGKVILDWT

SEQ ID NO: 32770 - DNA, 1071 bp, Staphylococcus saprophyticus subsp. saprophyticus ATCC 15305
  CDS (1)..(1071): transl_table=11
atggaaaaaaatataccagaaacaatgaatatctcattattaaataagccatttgatatggaaatgaaagaagttaaagtgccgaagataggcgcaacagatgtcttggtaaaagtgatggctgtaggggtatgtggctcagacgtacattattatgagcacggacgtgtaggtgaatttgtagttgaaaaacctctcattctaggacatgagtgttcaggtgtagtgaccgatgtaggtagtaatgtaacaagatttaaagtcggggatagagtagcgattgaacctggtgtgccttgtggtgaatgcgagtattgtaaatcaggaaaatacaatctatgtccggatgtagaatttcttgcaacaccgccagttgacggtgcatttagtcaatatatcagccatcctgagggctttttattccatataccagaagcattatcatacgaagaggcaacccttaatgaaccattttctgtaggtgtgcaagcttgtaaaagagccaatgttcaaccaggctcaacagtggttattatgggaatgggaccagtagggctcatggcagttgtggcagccaaggcatttggtgctacaaaaattattgtatctgatcttgaaaaaatacgtctagacgaagcattaaaattaggtgcaacacatgcaattaatattaaagaagaaggtgtggctacacgaattaatgaaattacaaaaggtaaaggtgttaattatgcatttgagacagcgggtaacccaattgctctacaaaatgctttagctgctttaaacaatggtggtacattagctattgttggtttacctcaacaagaaaatattgagttaaacattccttttatagcaaatcatgaaatcaatattgtaggtatttttagatacgcaaatacgtatgatatgggtctagaaatgttggcgtccacatcagcagatttaaacacgatgttcacggatgcttatgatttaaatgaggcaaaagaagcgatggaacaggcgagaacgaataagagtggatcattaaaagtaatggtttatcctaatggtaaacctgaataa

SEQ ID NO: 32771 - protein, 356 aa, Staphylococcus saprophyticus subsp. saprophyticus ATCC 15305
MEKNIPETMNISLLNKPFDMEMKEVKVPKIGATDVLVKVMAVGVCGSDVHYYEHGRVGEFVVEKPLILGHECSGVVTDVGSNVTRFKVGDRVAIEPGVPCGECEYCKSGKYNLCPDVEFLATPPVDGAFSQYISHPEGFLFHIPEALSYEEATLNEPFSVGVQACKRANVQPGSTVVIMGMGPVGLMAVVAAKAFGATKIIVSDLEKIRLDEALKLGATHAINIKEEGVATRINEITKGKGVNYAFETAGNPIALQNALAALNNGGTLAIVGLPQQENIELNIPFIANHEINIVGIFRYANTYDMGLEMLASTSADLNTMFTDAYDLNEAKEAMEQARTNKSGSLKVMVYPNGKPE

SEQ ID NO: 32772 - DNA, 1029 bp, Burkholderia vietnamiensis G4
  CDS (1)..(1029): transl_table=11
atgaaagcactggcaaagctcgaacgcgctccgggtctcacgttgacgcgcgtgaagcgtcccgaggtcggacacaacgacgtgctgatcaagatccgccgcacggcgatctgcggcaccgacatccatatctggaagtgggacgactgggcgcagaagacgatccccgtgccgatgcatgtcggccacgaatacgtcggcgagatcgtcgagatggggcaggaagtgcgcggcttcgcgatcggtgaccgcgtgtccggcgaagggcacatcacctgcggtttctgccgtaactgtcgtgcggggcgtcggcatctgtgccgcaataccgtcggcgtcggcgtgaaccgcgagggcgcgttcgccgaatatctggcgattcccgcattcaacgcgttcaagattccgccggagatctccgacgatctcgcgtcgatcttcgatccgttcggcaacgcgacgcatacggcgctgtcgttcaacctcgtcggcgaggacgtgttgatcaccggcgcggggccgatcggcatcatggccgtggcaatcgccaagcatgtcggcgcgcgcaatgtcgtgatcaccgacatcaacgactatcggctggagcttgcgcgcaagatgggcgcgacgcgtgctgtcaacgtcgcgcgcgagtcgctgcgcgacgtgatggccgagctgcgcatgactgaaggcttcgatgtcgggctcgagatgtcgggcgtgccgagcgcattcacgagcctgctcgaagcgatgaatcacggcggcaaggtcgcgctgctcggcattccgcccgcgcagacggcaatcgactggaatcaggtgatcttcaaggggctcgagatcaagggcatctacggccgcgaaatgttcgagacctggtacaagatggtcgcgatgctccagagtgggctcgacctgtcgccgatcgtcacgcatcgctttgccgtcgacgattacgagaaaggcttcgccgcgatgctgtccggtgaaagcggcaaggtgattctcgactggaccgcgtga

SEQ ID NO: 32773 - protein, 342 aa, Burkholderia vietnamiensis G4
MKALAKLERAPGLTLTRVKRPEVGHNDVLIKIRRTAICGTDIHIWKWDDWAQKTIPVPMHVGHEYVGEIVEMGQEVRGFAIGDRVSGEGHITCGFCRNCRAGRRHLCRNTVGVGVNREGAFAEYLAIPAFNAFKIPPEISDDLASIFDPFGNATHTALSFNLVGEDVLITGAGPIGIMAVAIAKHVGARNVVITDINDYRLELARKMGATRAVNVARESLRDVMAELRMTEGFDVGLEMSGVPSAFTSLLEAMNHGGKVALLGIPPAQTAIDWNQVIFKGLEIKGIYGREMFETWYKMVAMLQSGLDLSPIVTHRFAVDDYEKGFAAMLSGESGKVILDWTA

SEQ ID NO: 32774 - DNA, 1026 bp, Shewanella amazonensis SB2B
  CDS (1)..(1026): transl_table=11
atgaaagcacttgctaaactcaagcctgaagaaggcatttggatggttgatgcccccaagccggaaatgggccataacgatctgctgattaagatccgtaaaaccgccatttgtggcaccgacgtgcatatctacaactgggacgagtggtcgcaaaaaaccattcccgtgcctatggtagtaggtcacgaatatgtcggcgaagtggtgggaattggccaggaagtccgcggcttcaagattggcgaccgcgtatccggtgaaggccatatcacctgtggccattgccgtaactgccgcgccggccgcactcatctgtgccgcaataccacgggcgtgggtgtaaaccgtgaaggctcattcgccgagtatctggtgatcccagcctttaacgcgttcaaaatccccgatgatatcagtgacgatctggctgccatttttgacccattcggtaatgccgttcacacggcgctgtcattcgacctggtaggggaagacgtgcttatcacaggcgccggccccatcggtatcatggctgctgccgtgtgccgtcacgtgggcgcccgccatgtggtgatcaccgacgtgaacgaatatcgtctggaactggctcgaaagatgggtgctacccgtgcggtgaacgtggccaaggaaaacctcaaagacgtgatgaaagacctcggcatgaccgaaggcttcgacgttggcctggaaatgtccggcgtacctgccgccttccatgccatgctggataccatgaaccacggcggcaaaatcgccatgctgggtattcccggcggcgaaatggccatcgactggagcaaggtgatcttcaagggactcatcatcaagggcatctacggccgtgaaatgtttgagacctggtacaagatggccagcctgctgcaatcgggcctggacttgtcccccattgttacccaccacttcaaggtggacgacttccagcaaggcttcgacgccatgcgttccggtcagtccggtaaagtcatcctcagctgggattaa

SEQ ID NO: 32775 - protein, 341 aa, Shewanella amazonensis SB2B
MKALAKLKPEEGIWMVDAPKPEMGHNDLLIKIRKTAICGTDVHIYNWDEWSQKTIPVPMVVGHEYVGEVVGIGQEVRGFKIGDRVSGEGHITCGHCRNCRAGRTHLCRNTTGVGVNREGSFAEYLVIPAFNAFKIPDDISDDLAAIFDPFGNAVHTALSFDLVGEDVLITGAGPIGIMAAAVCRHVGARHVVITDVNEYRLELARKMGATRAVNVAKENLKDVMKDLGMTEGFDVGLEMSGVPAAFHAMLDTMNHGGKIAMLGIPGGEMAIDWSKVIFKGLIIKGIYGREMFETWYKMASLLQSGLDLSPIVTHHFKVDDFQQGFDAMRSGQSGKVILSWD

SEQ ID NO: 32776 - DNA, 1047 bp, Pseudomonas putida
  CDS (1)..(1047): transl_table=11
atgctcgcgataaggaaaactaaagcagggccaggagggctatctgtcgatgatgtggccgcccctaaagaggcccacagtactgacgtgctggtgaaagttgaagcggccggtatctgtggtactgacttgttgatctataaatggggcgagttcgccaaaagaatgaaactccccactatcttgggtcatgaagttagcggggtgattgaacaggtcggatctgacgttaaaggtctaaggcctgggatgcgcgtcagtctggagagtcatctcccttgtggaacgtgctacacgtgtcgacgcggttgggcgcatgtttgtcctaatacgcggtatccgggggtcgactttgatggaggcttcgcgtctttcgtcgtggttccggagagcgtgtgttggccggtgccgtgcggaattcctccgctccaggcggcaatgatggagccgttcgggcttgcggtgcatgcaagtctggaaggttctggggtttcgggattgaatgttcttgtttctggttgcggtccgatcggacttatgaacattgcagccgccaaagcactgggagcaagcaaggtcattgcaactgacattcatcctctgcgcctcactgcagcagccaaaatgggggcggatgaatgcattaatgcaactgaagagagcgtttataagactgtgcgttcgctgctcggtgagaggggagtagatgttgcaattgactattccgggcaagcagcggcgttaaaggagcttattcaatccatcacccatggtggtgagttgcgactgatgggcgtcccgtcacatgatattttgctcaacctagaggagtggctttttaaaggccttattgtacgtggcctgcatggcaggcgtctgtttgaaacatgggagcgttcaactagcttactggttacagggcgtgttgatttgtcttcgctcgtatcgcatcgattgccactatcggcggcagaggatgcgttcgaaatggccttaaatggtcagtccttgaaaatcctgtttgagcccaatggcacatgtatctaa

SEQ ID NO: 32777 - protein, 348 aa, Pseudomonas putida
MLAIRKTKAGPGGLSVDDVAAPKEAHSTDVLVKVEAAGICGTDLLIYKWGEFAKRMKLPTILGHEVSGVIEQVGSDVKGLRPGMRVSLESHLPCGTCYTCRRGWAHVCPNTRYPGVDFDGGFASFVVVPESVCWPVPCGIPPLQAAMMEPFGLAVHASLEGSGVSGLNVLVSGCGPIGLMNIAAAKALGASKVIATDIHPLRLTAAAKMGADECINATEESVYKTVRSLLGERGVDVAIDYSGQAAALKELIQSITHGGELRLMGVPSHDILLNLEEWLFKGLIVRGLHGRRLFETWERSTSLLVTGRVDLSSLVSHRLPLSAAEDAFEMALNGQSLKILFEPNGTCI

SEQ ID NO: 32778 - DNA, 1047 bp, Pseudomonas sp
  CDS (1)..(1047): transl_table=11
atgctcgcgataaggaaaactaaagcagggccaggagggctatctgtcgatgatgtggccgcccctaaagaggcccacagtactgacgtgctggtgaaagttgaagcggccggtatctgtggtactgacttgttgatctataaatggggcgagttcgccaaaagaatgaaactccccactatcttgggtcatgaagttagcggggtgattgaacaggtcggatctgacgttaaaggtctaaggcctgggatgcgcgtcagtctggagagtcatctcccttgtggaacgtgctacacgtgtcgacgcggttgggcgcatgtttgtcctaagacgcggtatccgggggtcgactttgatggaggcttcgcgtctttcgttgtggttccggaaagcgtgtgttggccggtgccgtgcggaattcctccgctccaggcggcaatgatggagccgttcgggcttgcggtgcatgcaagtctggagggttctggggtttcgggattgaatgttcttgtttctggttgcggtccgatcggacttatgaacattgcagccgccaaagcactgggagcaagcaaggtcattgcaacggacattcatcctctgcgcctcactgcagcagccaaaatgggggcggatgaatgcattaatgcagctgaagagagcgtttataagactgtgcgttcgctgctcggtgagaggggagtagatgttgcaattgactattctgggcaagcagcggcgttaaaggagcttattcaatccatcacccatggtggtgagttgcgactgatgggcgtcccgtcacatgatattttgctcaacttagaggagtggcttttcaaaggccttattgtacgtggcctgcatggcaggcgcctgtatgaaacatgggagcgttcaactagcttattggttacagggcgtgttgatttgtcttcgctcgtatcgcatcgattgccactatcggcggcagaggatgcgttcgaaatggccctaaatggtcagtccttgaaaatcctgtttgagcccaatggctcatgtatctaa

SEQ ID NO: 32779 - protein, 348 aa, Pseudomonas sp
MLAIRKTKAGPGGLSVDDVAAPKEAHSTDVLVKVEAAGICGTDLLIYKWGEFAKRMKLPTILGHEVSGVIEQVGSDVKGLRPGMRVSLESHLPCGTCYTCRRGWAHVCPKTRYPGVDFDGGFASFVVVPESVCWPVPCGIPPLQAAMMEPFGLAVHASLEGSGVSGLNVLVSGCGPIGLMNIAAAKALGASKVIATDIHPLRLTAAAKMGADECINAAEESVYKTVRSLLGERGVDVAIDYSGQAAALKELIQSITHGGELRLMGVPSHDILLNLEEWLFKGLIVRGLHGRRLYETWERSTSLLVTGRVDLSSLVSHRLPLSAAEDAFEMALNGQSLKILFEPNGSCI

SEQ ID NO: 32780 - DNA, 1047 bp, Pseudomonas putida
  CDS (1)..(1047): transl_table=11
atgctcgcgataaggaaaactaaagcagggccaggagggctatctgtcgatgatgtggccgcccctaaagaggcccacagtactgacgtgctggtgaaagttgaagcggccggtatctgtggtactgacttgttgatctataaatggggcgagttcgccaaaagaatgaaactccccactatcttgggtcatgaagttagcggggtgattgaacaggtcggatctgacgttaaaggtctaaggcctgggatgcgcgtcagtctggagagtcatctcccttgtggaacgtgctacacgtgtcgacgcggttgggcgcatgtttgtcctaatacgcggtatccgggggtcgactttgatggaggcttcgcgtctttcgtcgtggttccggagagcgtgtgttggccggtgccgtgcggaattcctccgctccaggcggcaatgatggagccgttcgggcttgcggtgcatgcaagtctggaaggttctggggtttcgggattgaatgttcttgtttctggttgcggtccgatcggacttatgaacattgcagccgccaaagcactgggagcaagcaaggtcattgcaactgacattcatcctctgcgcctcactgcagcagccaaaatgggggcggatgaatgcattaatgcaactgaagagagcgtttataagactgtgcgttcgctgctcggtgagaggggagtagatgttgcaattgactattccgggcaagcagcggcgttaaaggagcttattcaatccatcacccatggtggtgagttgcgactgatgggcgtcccgtcacatgatattttgctcaacctagaggagtggctttttaaaggccttattgtacgtggcctgcatggcaggcgtctgtttgaaacatgggagcgttcaactagcttactggttacagggcgtgttgatttgtcttcgctcgtatcgcatcgattgccactatcggcggcagaggatgcgttcgaaatggccttaaatggtgagtccttgaaaatcctgtttgagcccaatggcacatgtatctaa

SEQ ID NO: 32781 - protein, 348 aa, Pseudomonas putida
MLAIRKTKAGPGGLSVDDVAAPKEAHSTDVLVKVEAAGICGTDLLIYKWGEFAKRMKLPTILGHEVSGVIEQVGSDVKGLRPGMRVSLESHLPCGTCYTCRRGWAHVCPNTRYPGVDFDGGFASFVVVPESVCWPVPCGIPPLQAAMMEPFGLAVHASLEGSGVSGLNVLVSGCGPIGLMNIAAAKALGASKVIATDIHPLRLTAAAKMGADECINATEESVYKTVRSLLGERGVDVAIDYSGQAAALKELIQSITHGGELRLMGVPSHDILLNLEEWLFKGLIVRGLHGRRLFETWERSTSLLVTGRVDLSSLVSHRLPLSAAEDAFEMALNGESLKILFEPNGTCI

SEQ ID NO: 32782 - DNA, 1077 bp, Aspergillus niger
  CDS (1)..(1077)
atgagcacccagaacaccaacgctcagaatctttccttcgtcctcgagggaattcaccgcgtcaaattcgaagaccggccaatcccagagatcaacaatcctcacgacgtactggtgaatgtcaggttcacaggtatatgtggtagtgatgttcattattgggaacatggctccattggccaattcattgtcaaggatcccatggtcctgggacatgaatcttccggtgttgtcagcaaggttggctctgccgttaccagtctaaaggtaggagactgcgttgcaatggaaccaggaatcccatgtcgccgctgcgaaccatgcaaggcggggaaatataatctctgcgtgaaaatggctttcgcagcgacacctccatatgatggtaccttggccaagtattacgtcctgcccgaggacttttgctataagcttcctgaaagcatcaccctacaggagggtgcgatcatggagccccttagtgtcgccgtccatatcgttaaacaggctgggatcaacccgggtcaatcagtggtagtctttggtgctggccccgtcggacttctctgctgtgctgtggcgaaggcttacggtgcgtccaaggttatcgcggttgacattcaaaagggtaggctagactttgcgaagaagtatgcagcaactgccacgtttgagccagctaaagccgcagcgttggagaacgctcaacggataataaccgagaatgatctaggctcgggtgcagatgttgccattgacgcttcaggagcagagccctcggttcatacaggcattcacgttctgcgtgctgggggaacatatgtccagggcggtatgggtagaagcgaaatcacctttccaataatggcggcttgcaccaaagaactgaacgtcaagggcagcttccgttatgggagtggtgactataagcttgcagtctccttagtaagcgctggaaaggtgaacgtgaaggaattgatcacgggtgtcgtcaagttcgaggacgccgagcgagcattcgaagaagttagagctggaaagggcatcaaaacgcttattgctggtgtcgattcatag

SEQ ID NO: 32783 - protein, 358 aa, Aspergillus niger
MSTQNTNAQNLSFVLEGIHRVKFEDRPIPEINNPHDVLVNVRFTGICGSDVHYWEHGSIGQFIVKDPMVLGHESSGVVSKVGSAVTSLKVGDCVAMEPGIPCRRCEPCKAGKYNLCVKMAFAATPPYDGTLAKYYVLPEDFCYKLPESITLQEGAIMEPLSVAVHIVKQAGINPGQSVVVFGAGPVGLLCCAVAKAYGASKVIAVDIQKGRLDFAKKYAATATFEPAKAAALENAQRIITENDLGSGADVAIDASGAEPSVHTGIHVLRAGGTYVQGGMGRSEITFPIMAACTKELNVKGSFRYGSGDYKLAVSLVSAGKVNVKELITGVVKFEDAERAFEEVRAGKGIKTLIAGVDS

SEQ ID NO: 32784 - DNA, 1044 bp, Caenorhabditis briggsae
  CDS (1)..(1044)
atgtccgaagacaacctatcagctgtccttcatggggttgatgacctccgtctggagcaggttccaattccgaaaccaggatccaaacaggtcttggtccgagttcatactgtaggaatatgtggaagtgatgtgcattattggactcatggagccattggaccgtttgtggttaaagagccaatgattgttggccatgaaacatcaggagttgtatcagagatcggaagtgaggtgcaacacttgaaagttggtgatcgaattgcaatggaaccaggattgccatgcaaactttgtgagcattgtaaaactggaagatacaatttgtgtcctgaaatgagatttttcgccactcccccaatcaatggaacgctatccagatatgtcgtccatgatgctgacttttgcttcaagctacctgataatctctctttcgaagatggagctctgctagaaccactctcggttgctattcattcctgtcgtcgtggaaatgttcaaatgggtcatagagttttagtcctcggagctggtccgatcggtgttctaaatctgctaactgccaaatcagtgggagctggaaaagttgttatcaccgacctagacgacggtcgtctttccctcgccaagaagctgggagcagatgctacgattaatgtaaaaggcaagtcgttggaggccgtaagagcggagatcatcagcgcgttgggtggacagcagccacatgtctgtgtcgagtgtaccggtgcgcagccgagtattgagacggcgataactactaccaaatcaggtggagtcatagttcttgttggtctgggagccgatagagttgaaattccaattatcgaatcggccacaagagaggttgatatacgaggaatcttcagatatgttaattgttacccaactgccattgaacttcttagctctggaaaactggatctctcgggactgagtcgtgcccattacaaacttgaagagaccttggaagcctttaagagaactcaaaaagctgatgttatcaaagtctttattcaatgttaa

SEQ ID NO: 32785 - protein, 347 aa, Caenorhabditis briggsae
MSEDNLSAVLHGVDDLRLEQVPIPKPGSKQVLVRVHTVGICGSDVHYWTHGAIGPFVVKEPMIVGHETSGVVSEIGSEVQHLKVGDRIAMEPGLPCKLCEHCKTGRYNLCPEMRFFATPPINGTLSRYVVHDADFCFKLPDNLSFEDGALLEPLSVAIHSCRRGNVQMGHRVLVLGAGPIGVLNLLTAKSVGAGKVVITDLDDGRLSLAKKLGADATINVKGKSLEAVRAEIISALGGQQPHVCVECTGAQPSIETAITTTKSGGVIVLVGLGADRVEIPIIESATREVDIRGIFRYVNCYPTAIELLSSGKLDLSGLSRAHYKLEETLEAFKRTQKADVIKVFIQC

SEQ ID NO: 32786 - DNA, 1107 bp, Malus domestica
  CDS (1)..(1107)
atgggcaagggaggccaatcctgcaatggcatggttagagatgtcaaacctgtggagaaggaaaacatggctgcttggctcgttgatgttaacaccatcaagatcctacctttcaagctccccactattggaccgaatgatgttcaaattcgaattaaggctgtcggcatttgcggaagtgatgttcactacctcaagaccatgaaatgtgcggattttgaggttaaagagccgatggtgatcggacatcagtgtgctgggatcgtagacaaagttgggagcgaggtgaagcatctggtgcccggtgaccgagtggcggttgagcccggcatcagctgcgcacattgccagcagtgcaaaggaggccgctacaatctctgtcccgacatgaagtttttcgccaccccaccggttcacggtgccttggctaatcagattgtcgaccctgcagatctgtgctttaaactgcccgaaaacgtgagcttggaggaaggagcaatgtgtgagcccttgagtgttggggttcacgcttgtcggcgagccaatgttggtcccgaaacaactgttctgatcgtcggtgcagggccgattgggctggtttccgtgctcgctgctcgtgctttcggagcaccaagaattgtcatcgtagatatggatagtaagcgtttagccgtggccaagtctctgggagctgatggaaccgtcaaagtttcacgaaaaatggaggatttagatgacgaagttgccaagattaaagaaaccatgggagccgaagttgatgtgaccttcgactgtgtgggtttcaacaaaaccatgtctacgggcctcaatgctactcgtcccggcggcaaagtttgccttgtaggaatggggcacagcatgatgacagtccctctgacagccgctgcagccagggaggttgacgtggttggagttttccggtgtaagaacacatggcctctttgccttgagtttttgagaagcgggaagatcgacgtgaagccgcttattacccaccggtttggatttaccgagaaggaggtggaagaagcatttgcaaccagtgctcgtgggggtgacgccattaaagtcatgtttaatctatag

SEQ ID NO: 32787 - protein, 368 aa, Malus domestica
MGKGGQSCNGMVRDVKPVEKENMAAWLVDVNTIKILPFKLPTIGPNDVQIRIKAVGICGSDVHYLKTMKCADFEVKEPMVIGHQCAGIVDKVGSEVKHLVPGDRVAVEPGISCAHCQQCKGGRYNLCPDMKFFATPPVHGALANQIVDPADLCFKLPENVSLEEGAMCEPLSVGVHACRRANVGPETTVLIVGAGPIGLVSVLAARAFGAPRIVIVDMDSKRLAVAKSLGADGTVKVSRKMEDLDDEVAKIKETMGAEVDVTFDCVGFNKTMSTGLNATRPGGKVCLVGMGHSMMTVPLTAAAAREVDVVGVFRCKNTWPLCLEFLRSGKIDVKPLITHRFGFTEKEVEEAFATSARGGDAIKVMFNL

SEQ ID NO: 32788 - DNA, 1032 bp, Bacillus halodurans
  CDS (1)..(1032): transl_table=11
atgaaagcattagtaaaaacacaacatggcacgggccattttgccgtgcaagagaaacccgaaccaactccagggaaacatcaagtaaaaatcaaagtaaagtacacaggcgtttgtggttcagatattcatacctatgagggccattatcctgtagccgctccagtcacacttggtcatgaattttcaggtgagatcgttgaactcggtgaaggtgtaacaggctttaacgttggcgaccgagtaacatcagaaacgacctactcgatttgcggtaaatgctcatattgcacctcgggtgactataatctttgctctcaccggaaaggacttgggaatcagcaggatggcagttttgctaaatacgtaatcgcgcgacaagagagtttgcaccatctccctgctggtgtggatgatcgctcagcagccatgacagagcccctcgcatgtacacatcatgcgattgcaaaaaccagcatcaacaaaggggacttagttgtcgttactggtcctggtccgattggtttgttagcagctcaagttgcaaaaagtcacggtggaacagtgattattacaggtctatccaatgatcaagtccgattaaaaaaagcaaaggaagtcgggatcgattacgccatcgatacacaggaagtggacataaaagagcttgtctccgagcttacagacggctatggtgcagatgtcgttttagaatgttctggcgctgtgccagccgcaaaacaagggattgatcttttacgcaagaaaggacaatatgcccaagtcggcttatttgcccagcccgagatccaatttaattttgagaaaattattcaaaaagagatttccgtcgttgggagtagaagtcaaaaacctgcggattgggagcctgccctctcacttcttaatgaaaaaaaagtaaatgccaaaacactcgtcacccatgaatacacaatttctgaatgggataaggcctatcacgcgattaaaagtggtgaggctatcaaagtattattgacacctattgattag

SEQ ID NO: 32789 - protein, 343 aa, Bacillus halodurans
MKALVKTQHGTGHFAVQEKPEPTPGKHQVKIKVKYTGVCGSDIHTYEGHYPVAAPVTLGHEFSGEIVELGEGVTGFNVGDRVTSETTYSICGKCSYCTSGDYNLCSHRKGLGNQQDGSFAKYVIARQESLHHLPAGVDDRSAAMTEPLACTHHAIAKTSINKGDLVVVTGPGPIGLLAAQVAKSHGGTVIITGLSNDQVRLKKAKEVGIDYAIDTQEVDIKELVSELTDGYGADVVLECSGAVPAAKQGIDLLRKKGQYAQVGLFAQPEIQFNFEKIIQKEISVVGSRSQKPADWEPALSLLNEKKVNAKTLVTHEYTISEWDKAYHAIKSGEAIKVLLTPID

SEQ ID NO: 32790 - DNA, 1062 bp, Bacillus subtilis; identical to SEQ ID NO: 32746
  CDS (1)..(1062)

SEQ ID NO: 32791 - protein, 353 aa, Bacillus subtilis; identical to SEQ ID NO: 32747

SEQ ID NO: 32792 - DNA, 1044 bp, Bacillus subtilis
  CDS (1)..(1044): transl_table=11
atgcagagtggaaagatgaaagctctaatgaaaaaggacggggcgttcggtgctgtgctgactgaagttcccattcctgagattgataaacatgaagtcctcataaaagtgaaagccgcttccatatgcggcacggatgtccacatttataattgggatcaatgggcacgtcagagaatcaaaacaccctatgttttcggccatgagttcagcggcatcgtagagggcgtgggagagaatgtcagcagtgtaaaagtgggagagtatgtgtctgcggaaacacacattgtctgtggtgaatgtgtcccttgcctaacaggaaaatctcatgtgtgtaccaatactgctataatcggagtggacacggcaggctgttttgcggagtatgtaaaagttccagctgataacatttggagaaatcccgctgatatggacccgtcgattgcttccattcaagagcctttaggaaatgcagttcataccgtactcgagagccagcctgcaggaggaacgactgcagtcattggatgcggaccgattggtcttatggctgttgcggttgcaaaagcagcaggagcttctcaggtgatagcgattgataagaatgaatacaggctgaggcttgcaaaacaaatgggagcgacttgtactgtttctattgaaaaagaagacccgctcaaaattgtaagcgctttaacgagtggagaaggagcagatcttgtttgtgagatgtcgggccatccctcagcgattgcccaaggtcttgcgatggctgcgaatggcggaagatttcatattctcagcttgccggaacatccggtgacaattgatttgacgaataaagtggtatttaaagggcttaccatccaaggaatcacaggaagaaaaatgttttcaacatggcgccaggtgtctcagttgatcagttcaaacatgatcgatcttgcacctgttattacccatcagtttccattagaggagtttgaaaaaggtttcgaactgatgagaagcgggcagtgcggaaaagtaattttaattccataa

SEQ ID NO: 32793 - protein, 347 aa, Bacillus subtilis
MQSGKMKALMKKDGAFGAVLTEVPIPEIDKHEVLIKVKAASICGTDVHIYNWDQWARQRIKTPYVFGHEFSGIVEGVGENVSSVKVGEYVSAETHIVCGECVPCLTGKSHVCTNTAIIGVDTAGCFAEYVKVPADNIWRNPADMDPSIASIQEPLGNAVHTVLESQPAGGTTAVIGCGPIGLMAVAVAKAAGASQVIAIDKNEYRLRLAKQMGATCTVSIEKEDPLKIVSALTSGEGADLVCEMSGHPSAIAQGLAMAANGGRFHILSLPEHPVTIDLTNKVVFKGLTIQGITGRKMFSTWRQVSQLISSNMIDLAPVITHQFPLEEFEKGFELMRSGQCGKVILIP

SEQ ID NO: 32794 - DNA, 1032 bp, Burkholderia mallei
  CDS (1)..(1032): transl_table=11
atgaaagcgctggcgaaactcgaacgcgggccgggcctcacgctcacccgtgtgaaaaagccggaggtcggccacaacgacgtcctcatcaagatccgccgcaccgcaatctgcggcaccgacatccatatctggaagtgggacgactgggcgcagaagacgattccggtgccgatgcacgtcggccacgagtacgtcggcgagatcgtcgagatgggccaggaagtgcgcggcttctcgatcggcgatcgcgtatccggcgaaggccacatcacgtgcggcttctgtcggaactgccgcgcggggcggcgccatttgtgccgcaacacggtgggcgtcggcgtgaatcgcgaaggcgcgttcgccgagtacctcgcgattcccgcgttcaacgcgttcaagattccgcccgagatctccgacgatctcgccgcgatcttcgatccgttcggcaacgcgacgcacaccgcgctgtcgttcaacctcgtcggcgaggacgtgctgatcacgggtgcggggccgatcggcgtgatggcggtggcgatcgcgaagcacgtcggcgcgcgcaacgtcgtcatcaccgacatcaacgactatcgcctcgaactcgcgcgcaagatgggcgcgacacgcgcggtgaacgtgtcgcgcgaatcgctgcgcgacgtgatggccgacctgcacatgacggagggcttcgacgtcgggctcgagatgtccggcgtgccgagcgcgttcacgtcgctgctcgaatcgatgaatcacggcggcaaggtcgcgctgctcggcattccgcccgcgcagaccgcgatcgactggaaccaggtgatcttcaagggcctcgagatcaagggcatctatgggcgcgagatgttcgagacgtggtacaagatggtcgcgatgctgcaaagcgggctcgatctttcgccgatcatcacgcaccgcttcgccgtggacgactacgagaaaggtttcgctgcgatgctgtcgggcgaaagcggcaaggtgattctcgactgggccgacgcgtga

SEQ ID NO: 32795 - protein, 343 aa, Burkholderia mallei
MKALAKLERGPGLTLTRVKKPEVGHNDVLIKIRRTAICGTDIHIWKWDDWAQKTIPVPMHVGHEYVGEIVEMGQEVRGFSIGDRVSGEGHITCGFCRNCRAGRRHLCRNTVGVGVNREGAFAEYLAIPAFNAFKIPPEISDDLAAIFDPFGNATHTALSFNLVGEDVLITGAGPIGVMAVAIAKHVGARNVVITDINDYRLELARKMGATRAVNVSRESLRDVMADLHMTEGFDVGLEMSGVPSAFTSLLESMNHGGKVALLGIPPAQTAIDWNQVIFKGLEIKGIYGREMFETWYKMVAMLQSGLDLSPIITHRFAVDDYEKGFAAMLSGESGKVILDWADA

SEQ ID NO: 32796 - DNA, 1026 bp, Chromobacterium violaceum
  CDS (1)..(1026): transl_table=11
atgaaggcgcttgccaagctgaaggccgctcccggcctggaaatgaccgatgttccgctgccggaagtcggccacaacgatctgttgatcaagatcgtcaagaccgcgatctgcggcaccgacatccatatctggaactgggacgagtggtcgcagaagaccatcccggtgccgatgcacgtcgggcacgagtacgtcggcgtcgtcgccggcatgggttcggaagtgcagggcttcaagatcggccagcgcgtgtccggcgaaggccacatcacctgcggctattgccgcaactgccgcgccggccgccgccacctgtgccgcaacaccaccggcgtcggcgtcaaccgcgaaggcgcgttcgccgaatacctggtgattccggccttcaatgccttcccgatcccggacgacatctccgacgacctggcctccatcttcgacccgttcggcaatgccgtgcacaccgcgctgtcgttcaacctggtgggcgaggacgtgctgatcacaggcgccggcccgatcggcatcatggcggtggccatcgccaagcatgtcggcgcgcgccatgtcgtcatcaccgacgtcaacgactaccggctggagctggcgaagaagatgggcgccacccgtgccgtcaacgtcgcccgcgaggacctgaaggcggtgatgcaggagctgcacatgagcgagggcttcgacgtgggcctggaaatgtccggcaatccgcaggctttccgccagatgctggaaacgatgaaccacggcggcaaggtggcgctgctgggcattccgccgtccaataccgccatcgactggaaccaggtgatcttcaagggcctggaaatcaagggcatttacggccgcgagatgttcgagacctggtacaagatggtggccctgatccagtccggcctggacatcagtcctatcatcacccaccacttcaaggtggacgagttcgagcagggcttcgccgcgatgctgtccggccagagcggcaaggtgatcctggactggcgctga

SEQ ID NO: 32797 - protein, 341 aa, Chromobacterium violaceum
MKALAKLKAAPGLEMTDVPLPEVGHNDLLIKIVKTAICGTDIHIWNWDEWSQKTIPVPMHVGHEYVGVVAGMGSEVQGFKIGQRVSGEGHITCGYCRNCRAGRRHLCRNTTGVGVNREGAFAEYLVIPAFNAFPIPDDISDDLASIFDPFGNAVHTALSFNLVGEDVLITGAGPIGIMAVAIAKHVGARHVVITDVNDYRLELAKKMGATRAVNVAREDLKAVMQELHMSEGFDVGLEMSGNPQAFRQMLETMNHGGKVALLGIPPSNTAIDWNQVIFKGLEIKGIYGREMFETWYKMVALIQSGLDISPIITHHFKVDEFEQGFAAMLSGQSGKVILDWR

SEQ ID NO: 32798 - DNA, 1029 bp, Coxiella burnetii
  CDS (1)..(1029): transl_table=11
atgaaagtactttccaaactaaaaccagcccctggcctctggctccacaaggcaccaacgcctaaacccggccgggacgaagtattaattaaaattaaaaaaaccgccatttgcggcacggatttgcatatttataaatgggatgaatgggcgcaaaaaaccattcctgtccccatgcacgtcggccatgaatttgttggtgaaatcgtggaggtaggcgaggccgctagcgcgttggcggttggagatcgggtttcaggggaaggacacatcacgtgcggggattgtcgtaattgtcgcgccggtaagcgccatttgtgtcgctacaccgtaggcgttggcgtaaatcgtcccggcgcgtttgcggaatatttagttatccccgctaaaaatgcgtataaaattccggcaaaaattagcgatgatatcgctgccattttagatcctttcggcaacgccgcacattccgcgttggagtttgatttagtgggcgaagatgtattaattaccggcgcaggccccgtcggattgatgtcagcagccattgcgcggcacgtcggggcgcggcatgtagtgataacggatgtcaatgattaccgtttagctttagccgaaaaagtgggcgtaaccgctgccgttaactcgacaaaaactcccttaacggagacgatgaaaaatcttgggatgacagagggttttgatgtcggtcttgaaatgtcaggaaacgctgaggcttttcgcagcatgttaacggtaatgaataacggcgggaaaatcgcctttttgggtatcccaccggaaccgtttgcgattgattggaatcaagtcgttttcaaaagcttattgataaaagggatttatggacgccgcatgtttgagacgtggtataaaatgactaatttattactaagcgggttagacatttcacccatcatcacgcatgagtttccgatgaaggattttcaacaagcatttgatgtaatgctgtcgggtaaaacaggcaaagtgattttgaattgggagcaatga

SEQ ID NO: 32799 - protein, 342 aa, Coxiella burnetii
MKVLSKLKPAPGLWLHKAPTPKPGRDEVLIKIKKTAICGTDLHIYKWDEWAQKTIPVPMHVGHEFVGEIVEVGEAASALAVGDRVSGEGHITCGDCRNCRAGKRHLCRYTVGVGVNRPGAFAEYLVIPAKNAYKIPAKISDDIAAILDPFGNAAHSALEFDLVGEDVLITGAGPVGLMSAAIARHVGARHVVITDVNDYRLALAEKVGVTAAVNSTKTPLTETMKNLGMTEGFDVGLEMSGNAEAFRSMLTVMNNGGKIAFLGIPPEPFAIDWNQVVFKSLLIKGIYGRRMFETWYKMTNLLLSGLDISPIITHEFPMKDFQQAFDVMLSGKTGKVILNWEQ

SEQ ID NO: 32800 - DNA, 1047 bp, Deinococcus radiodurans
  CDS (1)..(1047)
atgcgggccctgagcaagcagcagcccggcgagggcatctggatgatcgaaaccgaggtgccgacgcccggtcccaacgacctgctgattcgaattcgcaaggggagcatctgtggaaccgacgtgcacatctacaagtgggacgactgggcgagccagacggtgccggtgccgatggtcgtcgggcacgaatacgtgggtgtggtcgcgggcatgggctcggaagtgcgcggcttcgaaatcggcgaccgggtgagcggcgagggccacgtcacctgcgggcactgccgcaactgccgcgccgggcgccgccacctgtgccgcaacacgcagggggtgggcgtcaaccgccccggctccttcgccgagtatctggtgctgcccgccttcaatgccttcaagctgcccgacgacattcccgacgatgtcgccgctattttcgaccccttcggcaacgcggtgcacacggcgctgagcttcgacctggtgggcgaggacgtgctgattaccggcgccgggcccatcggctgcatggccgccgccgtcgcccggcacgtgggcgcccgcaacgtggtgattaccgacgtgaatgactaccgtctcgacctcgcgcggcagatgggcgtgacccgcgccgtgaatgtggcccgcgaggacctctggacggtggcgacgcaggaactcgacatgcacgagggcttcgacgtgggcatggaaatgagcggctcggggcctgccttcgcgcagatggtcagcgtgatgaacaacggcggcaaagtcgcgctgctcggcattccctcgggcgaggtgcagatcgattggaacgccgtcatcttcaagatgctcaccatcaagggcatctatggccgcgagatgttcgaaacctggtacaagatggccgccctgattcagtcgggcctggacctcacgccggtcatcacccaccactacggcatcggcgactttcagcagggcttcgacgccatgctcagcgggcagagcggcaaagtgattctggactgggagacggaagagcaaagcgcctga

SEQ ID NO: 32801 - protein, 348 aa, Deinococcus radiodurans
MRALSKQQPGEGIWMIETEVPTPGPNDLLIRIRKGSICGTDVHIYKWDDWASQTVPVPMVVGHEYVGVVAGMGSEVRGFEIGDRVSGEGHVTCGHCRNCRAGRRHLCRNTQGVGVNRPGSFAEYLVLPAFNAFKLPDDIPDDVAAIFDPFGNAVHTALSFDLVGEDVLITGAGPIGCMAAAVARHVGARNVVITDVNDYRLDLARQMGVTRAVNVAREDLWTVATQELDMHEGFDVGMEMSGSGPAFAQMVSVMNNGGKVALLGIPSGEVQIDWNAVIFKMLTIKGIYGREMFETWYKMAALIQSGLDLTPVITHHYGIGDFQQGFDAMLSGQSGKVILDWETEEQSA

SEQ ID NO: 32802 - DNA, 1086 bp, Erwinia carotovora subsp
  CDS (1)..(1086): transl_table=11
atgaaagcattggcaaaattgcgaccggaagaaggtatctggatgatggatgcccccatgccagaactcgggcataacgacatcatgattaaaatccgcaaaagcgcgatttgcggaacggatgtgcatatctataactgggacgaatggtcgcagaagaccattcctgttccgatggtcgtcgggcatgagtacgtgggtgaaattgtcgcgattggtcaggaagttaacggttttcatattggcgaccgggtttctggtgaggggcatattacctgtggctactgccgtaactgtcgcgctgggagacgtcacttatgccgcaatgccatcggtgtcggggtaaaccgtcccggttcgttcgcggaatatctggtgattcctgcctacaatgcatttcgcattcccgacaatatttctgacgaattggccgctattttcgaccctttcggtaacgccgtgcataccgcactttccttcgatttagtgggggaagatgtgttgattacaggggcagggccgataggcatgatggccgcggcggtgtgccgtcacgttggtgcaaggaatgtcgtgattaccgatgtgaatgcgtaccgtctggagctggctagtaaaatgggggcaacgcgtgccgtcaatgtggcagaggaaaagctgactgacgtgatgatagaactgggtatgaccgagggatttgatattgggttagaaatgtcgggcgcaccatcggcctttcgcgcgatgctgaaagcgatgaatcacggtgggcgaatcgccatgctgggcattccgcacgaaccgatgtcgattgactggggcgaagtgatttttaagggattgtttattaaaggcatctacggacgggaaatgttcgaaacctggtacaaaatgtctgcgctgattcagtccggactggatttgtccccgattatcacccaccgctttcacattgatgagtttcaaaaagggttcgatgccatgcgctcaggtcagtcgggcaaggttattctcaattgggatgaggcatatactcgtcatacttcgagttgcatgtgcgttgactgcgctactcggcatacttaa

SEQ ID NO: 32803 - protein, 361 aa, Erwinia carotovora subsp
MKALAKLRPEEGIWMMDAPMPELGHNDIMIKIRKSAICGTDVHIYNWDEWSQKTIPVPMVVGHEYVGEIVAIGQEVNGFHIGDRVSGEGHITCGYCRNCRAGRRHLCRNAIGVGVNRPGSFAEYLVIPAYNAFRIPDNISDELAAIFDPFGNAVHTALSFDLVGEDVLITGAGPIGMMAAAVCRHVGARNVVITDVNAYRLELASKMGATRAVNVAEEKLTDVMIELGMTEGFDIGLEMSGAPSAFRAMLKAMNHGGRIAMLGIPHEPMSIDWGEVIFKGLFIKGIYGREMFETWYKMSALIQSGLDLSPIITHRFHIDEFQKGFDAMRSGQSGKVILNWDEAYTRHTSSCMCVDCATRHT

SEQ ID NO: 32804 - DNA, 1056 bp, Francisella tularensis subsp
  CDS (1)..(1056): transl_table=11
atgaaagcattagctaaattaaaaaaacaaccaggtatatggataattaatgatgcgccaataccagaatatggctacaatgatgttttgattaaaattaaaaaaacggctatttgtggtactgatttacatatttataattgggataaatggtcgcaaaacaccattccagttccaatgattaccggacatgagtttgctggtgaagttgtagctaaaggagatggtgttacaagcgtagatatcggcgatagagtgtcaggtgagggtcatcttgtatgtgggcaatgccgtaattgcagagcaggtaaacgtcacctttgtagaaaaactataggtataggagtaaatgtacagggtgcatttgcagaatatctagttatgcctgcggttaatgtttttaagatccctgattctatcagtgatgatatcgctagtacttttgatcctatgggcaatgctattcacaccgcactttcttttaacttaacaggtgaggatgtccttataactggtgctggacctattggcttaatggctgtcaaaatagcaagattctgtggtgcacgcagaatagtaatcacagatattaatgagtatcgcctacaaatggctagggattttggtgcaactgttgctttgaatgttgctccatttaagaatcaagatgagttagtaaaacaaatgcgcaaagttatgtcagatatcggcatgacagaaggatttgatgttggtctagaaatgtctggaattaactctgcaatctcaatgatgcttgatgttatgaatcatggtggtaaactatcacttctaggcatatctgctggtgatatttctgttgattggggagctatattgtttaagggtctgactctcaagggtatatatggtagagaaatgtttgaaacatggtacttaatgactagtatgctccaagctggtatggatatgaaccctatcatcacacatcgacttcatattgatgagtttcaaaaaggatttgaaataatgaaaagtggtcaatgtggtaaagtaatactggattggagtagctag

SEQ ID NO: 32805 - protein, 351 aa, Francisella tularensis subsp
MKALAKLKKQPGIWIINDAPIPEYGYNDVLIKIKKTAICGTDLHIYNWDKWSQNTIPVPMITGHEFAGEVVAKGDGVTSVDIGDRVSGEGHLVCGQCRNCRAGKRHLCRKTIGIGVNVQGAFAEYLVMPAVNVFKIPDSISDDIASTFDPMGNAIHTALSFNLTGEDVLITGAGPIGLMAVKIARFCGARRIVITDINEYRLQMARDFGATVALNVAPFKNQDELVKQMRKVMSDIGMTEGFDVGLEMSGINSAISMMLDVMNHGGKLSLLGISAGDISVDWGAILFKGLTLKGIYGREMFETWYLMTSMLQAGMDMNPIITHRLHIDEFQKGFEIMKSGQCGKVILDWSS

SEQ ID NO: 32806 - DNA, 1026 bp, Idiomarina loihiensis
  CDS (1)..(1026): transl_table=11
atgaaagctttatcaaaactgcacgcaaaacccggcatttggatgaccgacgtggaaaagccggaatgcggttacaacgatttgctgattaaaattaagaaaaccgccatttgcggtaccgatgttcacatttataaatgggacgactggtcgcagaaaaccattccggtgcctatggtggtcggccacgagtacgtgggtgaagttgccgctatgggcgacggtgttcgtggctttgaaattggcgaccgcgtttccggagaaggtcacattacctgtggtcactgtcgtaactgtcgcgccggccgtcgtcacttatgccgcaatacctatggtgtgggtgtgaatcgtccgggtgcttttgcagaatacctggcactgccagctgaaaacgcttttaaacttccagatgacgttactgatgaaatggcagctgtatttgacccatttggtaatgcggttcacaccgccctggcttttgacctggtgggtgaagacgtgctgattaccggtgcgggtcctattggtattatggcagcagccgttgcccgtcacgttggcgcacgccacgtggttattaccgacgtcaacgaataccgcctggacttagctcgtaaaatgggcgttacccgcgcagtggacgttagcaaagagaagctgtccgacgtaatgactgaactaggcatgaaagaaggttttgatgtgggtctggaaatgtcaggtgtgccatcagctttctcacaaatgctggaaaccatgaaccatggcggcaaaattgccatgctgggcattccgcctgaaaatatcgctatagactggaaccaggttatttttaaaggtctggttattaaaggcatttatggccgcgagatgtttgaaacctggtacaaaatggccagcttgctgcagtccgggctggatatttcgcctattttaacgcacgaaatgcctattgatgactttgagaaaggctttgaaaccatgatttcaggccagtccggcaaagtcatactgaactgggattaa

SEQ ID NO: 32807 - protein, 341 aa, Idiomarina loihiensis
MKALSKLHAKPGIWMTDVEKPECGYNDLLIKIKKTAICGTDVHIYKWDDWSQKTIPVPMVVGHEYVGEVAAMGDGVRGFEIGDRVSGEGHITCGHCRNCRAGRRHLCRNTYGVGVNRPGAFAEYLALPAENAFKLPDDVTDEMAAVFDPFGNAVHTALAFDLVGEDVLITGAGPIGIMAAAVARHVGARHVVITDVNEYRLDLARKMGVTRAVDVSKEKLSDVMTELGMKEGFDVGLEMSGVPSAFSQMLETMNHGGKIAMLGIPPENIAIDWNQVIFKGLVIKGIYGREMFETWYKMASLLQSGLDISPILTHEMPIDDFEKGFETMISGQSGKVILNWD

SEQ ID NO: 32808 - DNA, 1023 bp, Legionella pneumophila
  CDS (1)..(1023): transl_table=11
atgaaatcattggttaaagcaaaaaaagagcctggaatttggatgcaggatattcctgttcctgaatacggagtaaatgatgttttaataaaaattaaaaggactgcaatttgtggtacagatatccatatttattcctgggatgaatgggcgcaagcgacaattcctgttcctatgacggtagggcatgaattttatggtgaaatagtagaggttggaaaagaagtccaaggtttgaaagttggacagagagtttctggtgaaggtcatattacctgtggtttttgcagaaattgtcgtgccggcaagcgtcatttatgtcgtaatactctgggagtgggggtgaatcgaccaggatgctttgctgagtatctggcacttcctgctaccaatgtcattgctctacctgacaacattacagaagagcaagcggctattctcgatccttttggaaatgctgctcattgtgcattggcatttgatgtagtaggcgaagacgttttgattactggtgcaggtcccataggaataatggccgcagccatcgtaagacatattggcgcacggcatgttgttatcaccgatgttaacgatcatcgattggaactggccaggcaaatgggtgtcagccgagcggttaatgtcaaataccaaaaattaattgatgtggctaatgagctgggaatgcttgagggttttgatgtgggtctggaaatgtccgggaaccctatggcattaaacgatatgatgaaggcgatgaatcatggtggtcatgtggctttattgggtatcccaccacaagaaacccctatagattggaaccaggttatctttaaaggattggttattaagggtatttatggtcgagaaatgtttgaaacctggtataagatgattgctatgttacagagcggtttaaatatttctcctgtcattactcataatttcccagtagatgaatatcagcacgcatttcaaattatggcatcgggccagtcagggaaagttatactgaactggtag

SEQ ID NO: 32809 - protein, 340 aa, Legionella pneumophila
MKSLVKAKKEPGIWMQDIPVPEYGVNDVLIKIKRTAICGTDIHIYSWDEWAQATIPVPMTVGHEFYGEIVEVGKEVQGLKVGQRVSGEGHITCGFCRNCRAGKRHLCRNTLGVGVNRPGCFAEYLALPATNVIALPDNITEEQAAILDPFGNAAHCALAFDVVGEDVLITGAGPIGIMAAAIVRHIGARHVVITDVNDHRLELARQMGVSRAVNVKYQKLIDVANELGMLEGFDVGLEMSGNPMALNDMMKAMNHGGHVALLGIPPQETPIDWNQVIFKGLVIKGIYGREMFETWYKMIAMLQSGLNISPVITHNFPVDEYQHAFQIMASGQSGKVILNW

SEQ ID NO: 32810 - DNA, 1023 bp, Legionella pneumophila subsp
  CDS (1)..(1023)
atgaaatcattggttaaagcaaaaaaagagcctggaatttggatgcaggatattcctgttcctgaatatggagtaaacgatgttttaataaaaattaaaaggactgcaatttgtggtacagatatccatatttattcctgggatgaatgggcgcaagccacaattcctgttcctatgaccgtagggcatgaattttatggtgaaatagtagaggttggaaaagaagtacaaggtttgaaagttggacagagagtttctggtgaaggtcatattacctgtggtttttgcagaaattgtcgtgccggcaagcgtcatttatgtcgtaataccctgggagtgggggtgaatcgaccaggatgctttgctgagtatctggcgcttcctgctaccaatgtcatcgctctccctgacaacattacagaagagcaagcggctattctcgatccttttggaaatgctgctcattgtgcattggcatttgatgtagtaggcgaagacgttttgattactggtgcaggccccataggaataatggccgcagccatcgtaagacatattggcgcacggcatgttgttatcaccgatgttaacgatcatcgattggaactggccaggcaaatgggtgtcagccgagcggttaatgtcaaataccaaaaattaagtgatgtggctaatgagctaggaatgcttgagggttttgatgttggtctggaaatgtccgggaaccctatggcattaaacgatatgatgaaagcgatgaatcatggtggtcatgtggctttattgggtatcccaccacaagaaacccctatagattggaaccaggttatctttaaaggattggttattaagggtatttatggtcgagaaatgtttgaaacctggtataagatgattgctatgttacagagcggtttaaatatttctcccgttattactcataatttcccagtagatgaatatcagcacgcatttcaaattatggcatcgggccagtcagggaaagttatactgaactggtag

SEQ ID NO: 32811 - protein, 340 aa, Legionella pneumophila subsp
MKSLVKAKKEPGIWMQDIPVPEYGVNDVLIKIKRTAICGTDIHIYSWDEWAQATIPVPMTVGHEFYGEIVEVGKEVQGLKVGQRVSGEGHITCGFCRNCRAGKRHLCRNTLGVGVNRPGCFAEYLALPATNVIALPDNITEEQAAILDPFGNAAHCALAFDVVGEDVLITGAGPIGIMAAAIVRHIGARHVVITDVNDHRLELARQMGVSRAVNVKYQKLSDVANELGMLEGFDVGLEMSGNPMALNDMMKAMNHGGHVALLGIPPQETPIDWNQVIFKGLVIKGIYGREMFETWYKMIAMLQSGLNISPVITHNFPVDEYQHAFQIMASGQSGKVILNW

SEQ ID NO: 32812 - DNA, 1029 bp, Parachlamydia sp
  CDS (1)..(1029): transl_table=11
atgaaaggtttagtcaagaaaatatcagctcccggtctttggatggaaaatctgccaataccgtcgcatgtgaaagatgatgaagttctgattaaaacaattaaaacatccatctgtggcaccgatgttcatatttataaatgggatgcttgggcgcagaaaaatgttcctgtgcctttggtgattggtcatgaatttatcggtgaaatagcagaatttggaaaaaatgttaaaggatttaaaattggagaacgagtatgcggggaaggacatatcgtttgtaatcaatgcccaaattgccgcatgggtcgtaagcatgtctgcatgcacacgaaagggctaggttatcatatttctggctgctttgctgaatattttgttcttcctgcagaaaatgttttttctctacccccttccatttctgatgatttaggcgccatcttcgacccttacggaaatgctgtccatactacgctcgcctttaatcttattggtgaagatgttcttattacaggtgctggcccaattggaatcatggcagccgccattgctaaacaagctggtgcaagacatattgtcatcacagatgtaaacgattatcgtctagaccttgcaagaactatgggtgtctcgcatgctattaatgttaatcgagaatctttagataattttatgcaatctctaggaatcaaatatggctttacagttggacttgagatgtctggccatcctgacggactaaaaactttaacggaaaaaattcgacatggaggaaacatcgcattacttggcattctcccaccagctacttctattgactggaatttagttatttttaaaatgttaactttaaaagggatttatggaagagaaattttctcaacctggtatcagatggttcaccttctggaaattggcttaaatttagctcctatcattacccatcatttttcagttgataattttgaaaaaggatttgaagtgatgttatcaggccaatcaggtaaagtgattcttgattgggtttaa

SEQ ID NO: 32813 - protein, 342 aa, Parachlamydia sp
MKGLVKKISAPGLWMENLPIPSHVKDDEVLIKTIKTSICGTDVHIYKWDAWAQKNVPVPLVIGHEFIGEIAEFGKNVKGFKIGERVCGEGHIVCNQCPNCRMGRKHVCMHTKGLGYHISGCFAEYFVLPAENVFSLPPSISDDLGAIFDPYGNAVHTTLAFNLIGEDVLITGAGPIGIMAAAIAKQAGARHIVITDVNDYRLDLARTMGVSHAINVNRESLDNFMQSLGIKYGFTVGLEMSGHPDGLKTLTEKIRHGGNIALLGILPPATSIDWNLVIFKMLTLKGIYGREIFSTWYQMVHLLEIGLNLAPIITHHFSVDNFEKGFEVMLSGQSGKVILDWV

SEQ ID NO: 32814 - DNA, 1026 bp, Photorhabdus luminescens subsp
  CDS (1)..(1026): transl_table=11
atgaaagcattgtcaaagttaaaagcagaagaaggcatctggatgatcgatgtgcccgagccagagctggggcacaatgatgtgatgatcaaaatccgtaaaacagcgatttgtggtacggatgtgcacatctataactgggatgattggtcacaaaaaaccattcctgtaccgatggttgtcggtcatgaatatgttggtgaagttgttgccattggtcaggaagtaaaaggttttaaaattggtgatcgggtgtctggcgaagggcatattacttgtggttactgccgtaactgtcgtggtggccgtactcacttatgccgtaataccattggcgtaggggtaaaccgcgctggttgttttgcacaatatctggttattcctgcatttaatgcgttcaaaattccagataacatctctgatgaactggctgctatttttgacccatttggcaatgctgttcataccgcgctttcgtttgatctggttggtgaagatgtgctggtttctggtgctggcccaattggtattatggcggcggcagtatgtaaacatgttggcgcgcgtcatgttgtcatcaccgacgttaacgaatatcgccttgagttggcacgtaaaatgggtgtcacccgtgcggtgaacgttagtcaggaaaatctgaccgatgtcatggcggaattgggcatgacggaaggttttgatgttggtttggaaatgtctggtgccccggcggcgtttcgtaccttattaaataccatgaatcacggcggccgtgttgcattgttgggcattcctccatcagatatggcaattgattggaatcaggtgatttttaagggattgtttatcaaaggtatttatggccgtgagatgtttgaaacctggtacaaaatggctacattaatccagtctggtttggatctgacacccattatcacccaccggttctctatcgatgatttccagaaaggctttgacatcatgcgttcagggcagtctggtaaagttattctgaactgggattaa

SEQ ID NO: 32815 - protein, 341 aa, Photorhabdus luminescens subsp
MKALSKLKAEEGIWMIDVPEPELGHNDVMIKIRKTAICGTDVHIYNWDDWSQKTIPVPMVVGHEYVGEVVAIGQEVKGFKIGDRVSGEGHITCGYCRNCRGGRTHLCRNTIGVGVNRAGCFAQYLVIPAFNAFKIPDNISDELAAIFDPFGNAVHTALSFDLVGEDVLVSGAGPIGIMAAAVCKHVGARHVVITDVNEYRLELARKMGVTRAVNVSQENLTDVMAELGMTEGFDVGLEMSGAPAAFRTLLNTMNHGGRVALLGIPPSDMAIDWNQVIFKGLFIKGIYGREMFETWYKMATLIQSGLDLTPIITHRFSIDDFQKGFDIMRSGQSGKVILNWD

SEQ ID NO: 32816 - DNA, 1032 bp, Photobacterium profundum
  CDS (1)..(1032)
atgaaaattaaagcgctgtcaaaactaaagcctgaagaaggcatctggatgaatgaagtagacaagcctgaaatgggccataatgatctacttattcgtattaagaaaaccgctatttgtggtacagatgtacatatctacaactgggatgaatggtcacaaaagacgattccagttccaatggttgtaggtcatgaatatgttggcgaagttgttggtattggccaagaagttcgtggttttacaatcggtgatcgtgtgtctggtgaaggtcatattacatgtggtcattgccgtaattgtcgtggtggtcgtacacacctttgtcgtaatacgacaggcgttggtgttaaccgtgatggcgcatttgctgagtttttggttattcctgcattcaatgcgttcaagatccctgcaggtatctctgacgatctagcatcaatcttcgacccgtttggcaatgctgttcatactgcattatcattcgatcttgttggtgaagatgtgctaattacaggtgctggtcctattggtattatggctgctgctgtcgctaaacacgttggtgcacgccatgttgtgattaccgatgtgaacgaataccgtctagatcttgctcgtaaaatgggcgtgactcgcgctgttaacgtagcaaacgaaaaacttgaagatgtaatgtctgaacttggcatgacagaaggttttgacgttggtttagaaatgtctggcgtaccatcagcatttaacggcatgctagctagcatgaaccacggtggtaaagtggcgttgttgggtattccaccatcagacatggcagtagattggacccaagttatctttaaaggtttggttattaaaggtatctacggccgtgaaatgtttgaaacttggtacaagatggcaagcttgattcaatcaggcttagatctaacaccaattatcacgcaccattacaaaattgatgatttccaaaaaggctttgacatgatgcgttcaggcatgtcaggtaaagttattctcgattgggaataa

SEQ ID NO: 32817 - protein, 343 aa, Photobacterium profundum
MKIKALSKLKPEEGIWMNEVDKPEMGHNDLLIRIKKTAICGTDVHIYNWDEWSQKTIPVPMVVGHEYVGEVVGIGQEVRGFTIGDRVSGEGHITCGHCRNCRGGRTHLCRNTTGVGVNRDGAFAEFLVIPAFNAFKIPAGISDDLASIFDPFGNAVHTALSFDLVGEDVLITGAGPIGIMAAAVAKHVGARHVVITDVNEYRLDLARKMGVTRAVNVANEKLEDVMSELGMTEGFDVGLEMSGVPSAFNGMLASMNHGGKVALLGIPPSDMAVDWTQVIFKGLVIKGIYGREMFETWYKMASLIQSGLDLTPIITHHYKIDDFQKGFDMMRSGMSGKVILDWE

SEQ ID NO: 32818 - DNA, 1038 bp, Propionibacterium acnes
  CDS (1)..(1038): transl_table=11
atgaaggccttggtcaagacccgcccggagccgggtctggagctggtggaggtccccgacccggtcgctggccccaacgacgtcatcgtcaaggtgatgcggacaggaatctgtggcaccgacgttcacatcgataaatgggacgggtgggccgccaagacggtgcacaccccgctggtcctcggccacgagttctgcggtgagattgttgaactcggttcggaggtcaatgatctggaggtcggacagttcgtctccggcgaggggcactatgtctgcggacgctgccgggcctgcctagcgggcaaacgtcacctgtgccgcaacacccaaggtattggatatgcggtcaacggtgcctactgccagtacttcgtcatgccggctggcaacgtctgggtacatcacatcccggaccttgaccccgacgtcgcggcgatctttgacccgttcggcaatgccgtacacaccgccttgcagttcccctgcctggccgaggatgtcctcgtttcaggtgctgggccgatcggcatcatggcggccctggtcgctcagttccaaggggcgcgcaatgtcgtcgttaccgacctgtccgacgagaggctggagctggctcagcaactgggcctgaagaacgccgtcaatgtttcccgcgaaggtttggagacggtctgggaccgattcgacatgaaggaggggtttgacatcggcctggagatgtccgggtcggggacagctttaacatccatgattgacaatatgactcatggtggacggattgcgttgctgggaaccccgagcactgacatcaccctcgacttttccaagatcatctttaacatgatcacaattcagggagtgaccgggcgtcagatcttcgaaacgtggtacaccatggcctccctcatccgttccggtctggacatctccggaatcatcaccgaccgataccccatcacggaattccgggaagcctttgacgtcgcaggctcgggccacggcggcaaggttgtcatgaactgggaatgcctcgactga

SEQ ID NO: 32819 - protein, 345 aa, Propionibacterium acnes
MKALVKTRPEPGLELVEVPDPVAGPNDVIVKVMRTGICGTDVHIDKWDGWAAKTVHTPLVLGHEFCGEIVELGSEVNDLEVGQFVSGEGHYVCGRCRACLAGKRHLCRNTQGIGYAVNGAYCQYFVMPAGNVWVHHIPDLDPDVAAIFDPFGNAVHTALQFPCLAEDVLVSGAGPIGIMAALVAQFQGARNVVVTDLSDERLELAQQLGLKNAVNVSREGLETVWDRFDMKEGFDIGLEMSGSGTALTSMIDNMTHGGRIALLGTPSTDITLDFSKIIFNMITIQGVTGRQIFETWYTMASLIRSGLDISGIITDRYPITEFREAFDVAGSGHGGKVVMNWECLD

SEQ ID NO: 32820 - DNA, 1047 bp, Pyrococcus abyssi
  CDS (1)..(1047): transl_table=11
atgtccgagaagatggtagctatcatgaagacgaaaccggcttacggcgctgagctcgtcgaggttgatgttccaaagccaggacctggggaggttctaataaaagttatagcgactagcatttgtggaacagacctacacatctatgagtggaacgagtgggcccaatcaaggataaagcccccacagataatgggtcatgaggttgccggtgaagtagttgaggtgggcccgggagttgagggaattgaggttggagattacgtaagcgttgaaacccacatagtttgtgggaaatgctacgcgtgtagaaggggacagtaccatgtttgtcaaaacacgaagatattcggtgtagacaccgatggtgtatttgctgagtacgcggtggttccagctcaaaacgtttggaagaatccaaagtcaattcctccggagtacgcaacccttcaagaaccacttggaaatgcagttgatactgttctggccgggccaatctctggaaagagcgttttgataactggagctggcccccttggcttacttggaattgcggtggcgaaggcctccggggcttatccggtgatagtttccgagccgagcgatttcaggagagagctagctaagaaggtcggtgcagattacgtgataaatccattcgaggaagacgtcgttaaggaagtcatggacataacggatggaaatggagttgacgtgttccttgagttcagcggagctcctaaggctttagaacagggacttcaggctgttacaccagctggaagagtatccctcctgggcctttacccagggaaggttagcatagacttcaacaatctgataatcttcaaggctctaactgtttatggaatcacaggtaggcacctctgggagacatggtacacagtttctaggctactccagagcggaaagcttaacttggacccaataataacccacaagtacaagggattcgacaagtacgaggaagccttcgagctaatgagggctggaaagacgggtaaggtagtcttcatgctcaagtga

SEQ ID NO: 32821 - protein, 348 aa, Pyrococcus abyssi
MSEKMVAIMKTKPAYGAELVEVDVPKPGPGEVLIKVIATSICGTDLHIYEWNEWAQSRIKPPQIMGHEVAGEVVEVGPGVEGIEVGDYVSVETHIVCGKCYACRRGQYHVCQNTKIFGVDTDGVFAEYAVVPAQNVWKNPKSIPPEYATLQEPLGNAVDTVLAGPISGKSVLITGAGPLGLLGIAVAKASGAYPVIVSEPSDFRRELAKKVGADYVINPFEEDVVKEVMDITDGNGVDVFLEFSGAPKALEQGLQAVTPAGRVSLLGLYPGKVSIDFNNLIIFKALTVYGITGRHLWETWYTVSRLLQSGKLNLDPIITHKYKGFDKYEEAFELMRAGKTGKVVFMLK

SEQ ID NO: 32822 - DNA, 1047 bp, Pyrococcus furiosus
  CDS (1)..(1047): transl_table=11
atgtccgagaagatggttgctatcatgaagacaaaaccagagtacggtgcagagttagttgaagtagatgtaccaaaacctgggccaggggaagtcctaataaaaattcttgcaacaagcatatgtggaactgacctgcacatttatgaatggaatgaatgggctcagacaagaattaggccacctcagataatggggcatgaggttgcaggagaggttgtggaagttggtccaggtgtagagggaattgaagttggtgattacgtttctgttgagactcacatagtctgtggaaagtgttacgcatgtaaaagagggcaatatcacgtatgtcaaaacacaaagatatttggagtagatactgacggtgtttttgccgaatatgcagtagttccagcacaaaacgtctggaagaatccaaagaacatacctcccgaatatgctactctacaagagccattgggaaatgctgtggatacagtacttgctggcccaattgccggaaagagcgttctcattactggagcaggtcccctgggacttcttggaatagcagtggcaaaggcatccggagcctatcctgtgatagtttctgagccaagtgaatttagaagaaacttggcaaagaaggtgggtgcagactacgtaataaatccatttgaagaagatgttgtaaaggaggtaatggacataaccgacggaaacggagttgatgtgttcttggagttcagcggtgctccaaaggctcttgagcaaggactccaggcagtaactccagctggaagggtttctcttctcggactattcccaggaaaagtgagcatagactttaacaaccttataatattcaaggcattgacagtttacggaatcactgggagacacctttgggaaacttggtatacagtctctagactgctccaaagtggaaaattaaatatagacccaataataactcacaagtacaagggatttgacaagtatgaagaagcctttgagctaatgagggctggcaaaactggcaaagttgttttcatgcttaaatga

SEQ ID NO: 32823 - protein, 348 aa, Pyrococcus furiosus
MSEKMVAIMKTKPEYGAELVEVDVPKPGPGEVLIKILATSICGTDLHIYEWNEWAQTRIRPPQIMGHEVAGEVVEVGPGVEGIEVGDYVSVETHIVCGKCYACKRGQYHVCQNTKIFGVDTDGVFAEYAVVPAQNVWKNPKNIPPEYATLQEPLGNAVDTVLAGPIAGKSVLITGAGPLGLLGIAVAKASGAYPVIVSEPSEFRRNLAKKVGADYVINPFEEDVVKEVMDITDGNGVDVFLEFSGAPKALEQGLQAVTPAGRVSLLGLFPGKVSIDFNNLIIFKALTVYGITGRHLWETWYTVSRLLQSGKLNIDPIITHKYKGFDKYEEAFELMRAGKTGKVVFMLK

SEQ ID NO: 32824 - DNA, 1047 bp, Pyrococcus horikoshii
  CDS (1)..(1047): transl_table=11
atgtcagaaaagatggtagctatcatgaagacaaagcctgggtatggtgctgagcttgttgaggtggacgttccaaagcctggacctggagaagttctcattaaggttcttgcaaccagcatatgtggaactgatcttcatatatacgagtggaatgagtgggcacagagcaggattaagccacctcagataatggggcatgaagttgcgggagaagtcgttgaaatcgggccaggtgtggaaggaattgaagttggtgactacgtttccgttgaaacgcacatagtttgtggcaagtgttacgcctgcagaaggggccagtaccacgtctgccagaataccaagatatttggcgtcgatacagatggcgtattcgcagagtatgccgttgttccagcccaaaatatctggaagaatcctaaatcaattccaccagaatatgcaaccctccaggagcccttgggtaatgctgttgataccgttttggcaggaccaatttctggtaagagcgttttaataaccggagcggggccccttggattattgggaattgcagtggcaaaagcgtctggcgcataccctgtgatagtctcagaacctagtgacttcagaagggagttggccaagaaggtaggtgctgattacgttatcaatccattcgaagaggatgtcgttaaggaggtaatggatatcacagatggaaatggtgttgacgtatttctggaattcagtggagctcctaaggctctagagcagggtcttcaagcagttacacctgctggaagggtatctctcctgggtctatacccaggaaaggttaccattgactttaacaatctaataatcttcaaggcgctaacaatctatggaataactggaaggcacctctgggaaacttggtatacagtttcaaggctccttcagagcggaaagctcaacttagatcctattataactcataaatataagggattcgacaagtacgaggaagcctttgagctaatgagggccggcaaaacgggtaaagttgtttttatgcttaaatga

SEQ ID NO: 32825 - protein, 348 aa, Pyrococcus horikoshii
MSEKMVAIMKTKPGYGAELVEVDVPKPGPGEVLIKVLATSICGTDLHIYEWNEWAQSRIKPPQIMGHEVAGEVVEIGPGVEGIEVGDYVSVETHIVCGKCYACRRGQYHVCQNTKIFGVDTDGVFAEYAVVPAQNIWKNPKSIPPEYATLQEPLGNAVDTVLAGPISGKSVLITGAGPLGLLGIAVAKASGAYPVIVSEPSDFRRELAKKVGADYVINPFEEDVVKEVMDITDGNGVDVFLEFSGAPKALEQGLQAVTPAGRVSLLGLYPGKVTIDFNNLIIFKALTIYGITGRHLWETWYTVSRLLQSGKLNLDPIITHKYKGFDKYEEAFELMRAGKTGKVVFMLK

SEQ ID NO: 32826 - DNA, 1053 bp, Pyrococcus kodakaraensis
  CDS (1)..(1053): transl_table=11
atggccgagaaaatgcaggctattatgaagactaagccggcgtacggcgccgaacttgtagaagttgacgttccaaagcctgggccaggagaagtcctcattaaggttctcgcaacgagcatctgcggtacagacctccatatctacgagtggaacgaatgggcgcagagcaggataaagccgccccagataatgggccacgaagtggctggagaggtcgtcgaggtcggtcccggcgttgaggatctccaggttggagattacatcagcgttgaaactcatatcgtctgtggcaagtgctacgcgtgcaagcacaaccgctatcacgtctgccagaacaccaagatattcggagttgatatggacggtgtcttcgcccactacgcgatagttccggccaagaacgcctggaagaacccgaaggacatgccgccagagtacgcagcccttcaggagccgctcggaaacgccgtcgataccgttcttgcaggcccgattgctgggaggagcaccctcataaccggtgctggaccgctcggtcttctcggcatagcagttgccaaggcaagcggggcttatccagtcatcgttagcgagccgagtgagttcagaaggaagctcgccaagaaggtcggtgctgactacgtcgttaaccccttcgaggaagacccagtcaagttcgttatggacataaccgacggagcgggcgttgaagttttccttgagttcagtggtgcacctaaagcccttgagcagggcctcaaggcagtaacacccggaggacgcgtctcacttctcggcctcttcccgagagaggtcacgatagacttcaacaacctcataatcttcaaggcccttgaagtccacggcataaccggaaggcacctctgggaaacctggtacaccgtctcaagcctcatccagagcggcaagctgaacctcgatccgataatcacccacaagtacaagggcttcgacaagttcgaggaagcctttgagcttatgcgcgctggaaagaccggaaaggtcgtcttcttccctcacaagggatga

SEQ ID NO: 32827 - protein, 350 aa, Pyrococcus kodakaraensis
MAEKMQAIMKTKPAYGAELVEVDVPKPGPGEVLIKVLATSICGTDLHIYEWNEWAQSRIKPPQIMGHEVAGEVVEVGPGVEDLQVGDYISVETHIVCGKCYACKHNRYHVCQNTKIFGVDMDGVFAHYAIVPAKNAWKNPKDMPPEYAALQEPLGNAVDTVLAGPIAGRSTLITGAGPLGLLGIAVAKASGAYPVIVSEPSEFRRKLAKKVGADYVVNPFEEDPVKFVMDITDGAGVEVFLEFSGAPKALEQGLKAVTPGGRVSLLGLFPREVTIDFNNLIIFKALEVHGITGRHLWETWYTVSSLIQSGKLNLDPIITHKYKGFDKFEEAFELMRAGKTGKVVFFPHKG

SEQ ID NO: 32828 - DNA, 1035 bp, Rhizobium loti
  CDS (1)..(1035): transl_table=11
atgtcgaacatgatgaaggcgctggtgaaggccaaggccgaaccgggcatctggatggaagaggtgccggtgccggagatcggccccaacgacgtgctgatcaagatcaggaagacggcgatctgcggcaccgacgtgcacatctacaattgggaccagtgggcgcagaagaccgtgccggtgccgatggtgaccggccatgaatttgtcggcacggtggccgattttggcgccgcggtcaccgaatacaaggtcggccagcgcgtctcgggcgagggccacatcgtctgcggccactgccgcaactgccgcgccgggcgagggcatctctgccgcaacacgctcggcgtcggcgtcaaccgccccggcgccttcggcgagtatctggcgatcccgcaacacaatgtcgtgccgatccccgacgatgtgccggacgagatcgccgcgatcttcgatcccctgggcaatgcggtgcatacggcattatccttcgatcttgtcggcgaggacgtgctggtcaccggcgccgggccgatcggcatcatgggcgcgctcgttgcccaatgcgtgggcgcgcgaaaagtcgtcatcaccgatatcaacccggtgcggctggcgctggcgaagaaactcggtgtccagcatgtcgtcgacgcctcgaaggaaaagctgcgcgatgtcatgccagtgctcggcatgaccgagggttttgacgtcggcctcgaaatgtcgggcgccgcccccgccttccgcgacatgatcgacaccatgaacaatggcggcaagatcgccattctgggcatcgcgcccaccggcttcgagatcgactggaacaaggtcatcttcaagatgctgcatctcaaaggcatctacggccgcgaaatgttcgagacctggtacaagatgatcgcgctggtccagggtcctctggatgtttcgggcctgatcacgcaccgcatcggcatcgacgatttccaggaggggttcgatgcgatgcggagcggcagttccggcaaggtggtgatggattggtag

SEQ ID NO: 32829 - protein, 344 aa, Rhizobium loti
MSNMMKALVKAKAEPGIWMEEVPVPEIGPNDVLIKIRKTAICGTDVHIYNWDQWAQKTVPVPMVTGHEFVGTVADFGAAVTEYKVGQRVSGEGHIVCGHCRNCRAGRGHLCRNTLGVGVNRPGAFGEYLAIPQHNVVPIPDDVPDEIAAIFDPLGNAVHTALSFDLVGEDVLVTGAGPIGIMGALVAQCVGARKVVITDINPVRLALAKKLGVQHVVDASKEKLRDVMPVLGMTEGFDVGLEMSGAAPAFRDMIDTMNNGGKIAILGIAPTGFEIDWNKVIFKMLHLKGIYGREMFETWYKMIALVQGPLDVSGLITHRIGIDDFQEGFDAMRSGSSGKVVMDW

SEQ ID NO: 32830 - DNA, 1035 bp, Rhizobium meliloti
  CDS (1)..(1035): transl_table=11
atgaccaacatgatgaaggcactggtcaagacgaagccggaggtagggctctggatggagcgcgtgccggtgccggaaatcgggccgaacgacgtcctgatccgcgtcaggaaatcggcgatctgcggcaccgacgtccacatctggaactgggatcaatgggcggagaagacgatcccagtgccgatggtcgtcggacacgaattcatgggcgaggtcgtcgaggtcgggccggccgtcagcaagcatcatgtcggcgagcgggtttccggagaaggtcacatcgtctgcggcaaatgccgcaattgccgcgcgggcagggggcatctctgccgcaacacgctcggcgtcggcgtcaaccgccccggatccttcgccgagttcgtctgccttcccgaatataatgtcgtgtcgatccccgacgacgtgccggacgagatcgccgcaatcttcgatcccttcggcaacgccgtgcatacggcgctctccttcgatctcgtcggcgaggacgttctggtcaccggtgccgggccgatcggcatcatgggggcgatggtggccaagcgttgcggtgcccgcaaggtggtgatcaccgacatcaatcccgttcgtctcgatctcgcgcgcaagctcggcatcgaccacgtcgtcgacgcgtcgaaggaaaaacttgccgacgtcatgcgggtgatcggcatgaccgagggcttcgatgtggggctggaaatgtcgggcgcggcgcccgctttccgcgacatgatcgacaagatgaacaatggcggcaagattgcgatcctcggcattgcgccggcgggcttcgagatcgactggaacaaggtcatcttcaagatgctcaacctcaagggcatctacggtcgcgaaatgttcgagacctggtacaagatgatcgccttcgtccagggcgggctcgacctctcgccgataatcacccaccgtatcggcatcgacgattttcgcgacggcttcgaggcgatgcgctcgggcaattccggcaaggtggtgatggactggtag

SEQ ID NO: 32831 - protein, 344 aa, Rhizobium meliloti
MTNMMKALVKTKPEVGLWMERVPVPEIGPNDVLIRVRKSAICGTDVHIWNWDQWAEKTIPVPMVVGHEFMGEVVEVGPAVSKHHVGERVSGEGHIVCGKCRNCRAGRGHLCRNTLGVGVNRPGSFAEFVCLPEYNVVSIPDDVPDEIAAIFDPFGNAVHTALSFDLVGEDVLVTGAGPIGIMGAMVAKRCGARKVVITDINPVRLDLARKLGIDHVVDASKEKLADVMRVIGMTEGFDVGLEMSGAAPAFRDMIDKMNNGGKIAILGIAPAGFEIDWNKVIFKMLNLKGIYGREMFETWYKMIAFVQGGLDLSPIITHRIGIDDFRDGFEAMRSGNSGKVVMDW

SEQ ID NO: 32832 - DNA, 1026 bp, Shewanella oneidensis
  CDS (1)..(1026): transl_table=11
atgaaagcactaagcaagttaaaagccgaaaaaggcatttggttagtcgatgcgcctaagcctgaaatgggccataacgatctactgatcaagattaaaaagaccgccatttgcggcaccgacatgcacatctacaactgggacgaatggtcacaaaaaaccattcctgtgcctatggtggtaggtcacgagtatgtgggagaagtggttgatatcgggcaagaagttcgcggctttaacattggtgaccgtgtttctggcgaaggccatatcacctgcggccactgccgtaactgccgcgcgggtcgcacccacttatgccgtaacacctcaggtgtgggtgtaaaccgcgaaggttcatttgccgaatacttagtgatcccagcgtttaacgccttcaaaatccccgatgatatcagcgacgatttagcctctatctttgatccattcggtaacgcagtacacacggcactgtcattcgacttagtgggcgaagatgtgttgattactggcgcgggtcctatcggtattatggctgcggccgtatgtcgccacgttggtgcgcgccatgtagtgatcaccgacgttaacgaataccgtttagaactggcccgtaaaatgggtgccacacgtgccgtaaacgttgctcaagaaaacctcaaagacgtgatgaaagaactcggcatgaccgaagggtttgacgtcggcttagaaatgtctggcgtaccttctgccttccgtgccatgttagataccatgaaccacggtggcaaaatcgcgatgctcggtattccgggtggcgaaatggccattgattggagcaaagtgatcttcaaaggtttggtcattaaaggcatttacggtcgtgaaatgttcgaaacctggtacaagatggcaagccttatccaatctggcttagatatttcgcccatcattacccatcactacaaaattgatgatttccaaaaaggcttcgacgctatgggctcgggccaatcgggtaaagtcatcctcagctgggattaa

SEQ ID NO: 32833 - protein, 341 aa, Shewanella oneidensis
MKALSKLKAEKGIWLVDAPKPEMGHNDLLIKIKKTAICGTDMHIYNWDEWSQKTIPVPMVVGHEYVGEVVDIGQEVRGFNIGDRVSGEGHITCGHCRNCRAGRTHLCRNTSGVGVNREGSFAEYLVIPAFNAFKIPDDISDDLASIFDPFGNAVHTALSFDLVGEDVLITGAGPIGIMAAAVCRHVGARHVVITDVNEYRLELARKMGATRAVNVAQENLKDVMKELGMTEGFDVGLEMSGVPSAFRAMLDTMNHGGKIAMLGIPGGEMAIDWSKVIFKGLVIKGIYGREMFETWYKMASLIQSGLDISPIITHHYKIDDFQKGFDAMGSGQSGKVILSWD

SEQ ID NO: 32834 - DNA, 1029 bp, Silicibacter pomeroyi
  CDS (1)..(1029)
atgaaagcgctggagaaatccaagcctgaggaagggttgtggatggtgcaggcaccggtgcccgagatcggccctgacgatgtgctgatcaagatcaagaagaccggcatttgcggcaccgatatccatatctggaactgggacgaatgggccgcgcacacggtgccggtgccgatgatcaccggccatgaatttgcgggcgagatcgtcgagctgggccgtgatgtcaccggcctcagcatcggtcagcgggtctcgggcgaggggcatctgatcggcaccgaaagccggcagagccgggcaggcaagttccacctggacccgggcacgcgcgggatcggtgtcaacgtgcagggggcctttgcgcaatatctgcgactgcccgccttcaacgtggtgccgctgcccgaggatatcccggacgagatcggcgccatcctcgacccgctgggcaatgcggtgcacaccgcgctgagtttcgacctcttgggcgaggatgtgctgatcaccggtgccgggccgatcggcatcatggcggcggcggtggccaaacatgccggcgcccgccatgtggtgatcaccgatatcaacgccgaccggctgaaactggcgcagcacgtggtgcccagggcgcggaccgtcgatgtcacgcgcgaggatctgggcgacgtggtccacgagcttggcctgaaacaggggttcgatgtcgggctggaaatgtcgggctcgcaagcggcgctcgaccagatggtcgaggcgctggtgatgggcggcaagatcgcgttgctgggtattccgccgggcaagtcgccggtggactggtcgcgcatcgtgttcaaggcgatcaccatcaagggtgtctatggccgcgagatgttcgagacctggtacaagatgatcgccatgttgcagaacgggctggatgtgagccgggtgatcacccatcgttttggcgtcgatgagttccgcgaagggtttgcggcgatgaaatcgggcctcagcggcaaggtggtgctggactggacctga

SEQ ID NO: 32835 - protein, 342 aa, Silicibacter pomeroyi
MKALEKSKPEEGLWMVQAPVPEIGPDDVLIKIKKTGICGTDIHIWNWDEWAAHTVPVPMITGHEFAGEIVELGRDVTGLSIGQRVSGEGHLIGTESRQSRAGKFHLDPGTRGIGVNVQGAFAQYLRLPAFNVVPLPEDIPDEIGAILDPLGNAVHTALSFDLLGEDVLITGAGPIGIMAAAVAKHAGARHVVITDINADRLKLAQHVVPRARTVDVTREDLGDVVHELGLKQGFDVGLEMSGSQAALDQMVEALVMGGKIALLGIPPGKSPVDWSRIVFKAITIKGVYGREMFETWYKMIAMLQNGLDVSRVITHRFGVDEFREGFAAMKSGLSGKVVLDWT

SEQ ID NO: 32836 - DNA, 1029 bp, Streptomyces avermitilis
  CDS (1)..(1029): transl_table=11
ttgaaggcgctggtcaaggagaaggcggagcccgggctctggctcatggacgtcccggagcccgagatcgggcccggcgacgtactgatcaaggtcctcaggaccgggatctgcggcaccgacctgcacatccggtcctgggacggctgggcgcagcaagccgtccgtaccccgctcgtgctcggtcacgagttcgtcggtgaggtcgtcgagaccggccgcgacgtcgtcgacatcaaggccggtgaccgggtcagcggcgagggccacctggtctgcggcaagtgccgcaactgccaggccggacgccgtcatctgtgccgtgcgacggtcgggctcggcgtcggccgggacggggcgttcgccgagtacgtggccctgcccgcggccaacgtctgggtgcaccgcgttcccgtcgacctcgacgtggccgcgatcttcgacccgttcggcaacgccgtgcacacggccctgtccttcccgctggtcggcgaggacgtgctcatcaccggggcgggcccgatcggcctgatggcggccgccgtggcccgtcacgccggcgcccgcaacgtcatgatcaccgacgtcagcgaggagcgcctggaactcgcccgcaagatcggcgtgagcctcgccctgaacgtcgccgacacgaccatcgccgacggccagcgcgcgctcggcctgcgcgagggcttcgacatcggtctggagatgtccggccgccccgaggccatgcgcgacatgatcgccaacatgacgcacggcggccgcatcgccatgctcggtctgccgtcccaggagttccccgtcgactgggcccggatcgtcacctccatgatcacgatcaagggcatctacggccgcgagatgttcgagacctggtacgcgatgtccgtcctcctcgaaggcggcctcgacctcgctcccgtgatcaccggccggtacggctaccgcgactacgaggcggcgttcgccgacgcggcgagcggccgcggcggcaaggtcatcctcgactggaccctctga

SEQ ID NO: 32837 - protein, 342 aa, Streptomyces avermitilis
MKALVKEKAEPGLWLMDVPEPEIGPGDVLIKVLRTGICGTDLHIRSWDGWAQQAVRTPLVLGHEFVGEVVETGRDVVDIKAGDRVSGEGHLVCGKCRNCQAGRRHLCRATVGLGVGRDGAFAEYVALPAANVWVHRVPVDLDVAAIFDPFGNAVHTALSFPLVGEDVLITGAGPIGLMAAAVARHAGARNVMITDVSEERLELARKIGVSLALNVADTTIADGQRALGLREGFDIGLEMSGRPEAMRDMIANMTHGGRIAMLGLPSQEFPVDWARIVTSMITIKGIYGREMFETWYAMSVLLEGGLDLAPVITGRYGYRDYEAAFADAASGRGGKVILDWTL

SEQ ID NO: 32838 - DNA, 1029 bp, Streptomyces coelicolor
  CDS (1)..(1029): transl_table=11
ttgaaggcgctggtcaaggagaacgcggagcccgggctgtggctcgcggacgtcccggagcccaccatcgggtccggtgacgtcctcatcaaggtgctgcgcaccggcatctgcggcaccgacctgcacatccgggcctgggacggctgggcgcagcaggccatccgcaccccgctcgtcgtcggccacgagttcgtcggcgaggtcgtcgacaccgggcgcgacgtcaccgacatcaaggccggcgaccgggtcagcggcgagggccacctggtctgcggcaagtgccgcaactgcctggccggccggcgccacctgtgccgcgccaccgtcggcctcggcgtcggccgggacggggcgttcgccgagtacgtggccctgcccgcgtccaacgtctgggtgcaccgcgtccccgtcgacctcgacgtcgccgcgatcttcgacccgttcggcaacgccgtgcacaccgcgctgtccttcccgctggtcggcgaggacgtcctcatcaccggcgccggaccgatcggcctgatggccgccgccgtggcccggcacgccggcgcccgcaacgtcgtcatcacggacgtgagcgaggagcggctggaactggcccgcaaggtcggcgccaccctcgccctgaacgtttcggacgccaccatcgccgacggacagcgcgaactgggcctgcgcgagggcttcgacatcggcctggagatgtccggccgtcccgaggccatgcgcgacatgatcgccaacatgacgcacggcggccggatcgccatgctcggcctgcccgccgaggagttcccggtcgactgggcccgcgtcgtcacctccatgatcaccgtcaagggcatctacggccgcgagatgttcgagacctggtacgccatgtccgtgctgctcgaaggcggcctcgacctcgcccccgtgatcaccggccgctactcccaccgcgacttcgaggccgcgttcgccgacgcggcgagcggccgcggcggcaaggtcatcctcgactggaccgcgtaa

SEQ ID NO: 32839 - protein, 342 aa, Streptomyces coelicolor
MKALVKENAEPGLWLADVPEPTIGSGDVLIKVLRTGICGTDLHIRAWDGWAQQAIRTPLVVGHEFVGEVVDTGRDVTDIKAGDRVSGEGHLVCGKCRNCLAGRRHLCRATVGLGVGRDGAFAEYVALPASNVWVHRVPVDLDVAAIFDPFGNAVHTALSFPLVGEDVLITGAGPIGLMAAAVARHAGARNVVITDVSEERLELARKVGATLALNVSDATIADGQRELGLREGFDIGLEMSGRPEAMRDMIANMTHGGRIAMLGLPAEEFPVDWARVVTSMITVKGIYGREMFETWYAMSVLLEGGLDLAPVITGRYSHRDFEAAFADAASGRGGKVILDWTA

SEQ ID NO: 32840 - DNA, 1056 bp, Symbiobacterium thermophilum
  CDS (1)..(1056): transl_table=11
gtggcagaaacgatgcgtgctttgcgaaaactggaagctggtcctggcgcgacactgcaggaggttccgatcccgaccatcggcccccgcgacgtcctggtgaaggtccgggcggcctcgatctgcggcacggactaccacatctacacctgggatccgtggtccgcgggccgggtgaagccgccgctcaccattgggcacgagctggccggtgaggtggtggccgtcggccgcgaggtcaccgcatgcaaggtgggcgactacgtctctgccgaaacgcacattgtttgcaaccgctgtccccgctgccacatgggggagtaccacctctgcgagaacacgaagatcctgggggtggacacggacggcgccttcgccgagtacgtcgcggtgccggagcagaacatctgggtgaacgacaaggacatcccctttgagctgcagtcgattcaggagccgctgggcaacgcggtccacacggccctgaacggcgacctcaccgcccggtccgtgctgatcaccggctgcggccccatcggcatcatgtcggtccccgtggccaagatggccggcgcggagatcgtgatggcgatggacatcaacgaataccggctgcagctggcgggccagctgggggccgacgtgctcatcaaccccacgaagcaggatccggtcgaggtggtgcgcagctacacccgcggctacggcgccgacgtggtgctggagatgtcgggtaaccccaccgccatccggcaggggctgaaggccgcccgcaacggcgcccgcatctcgctcctcggtctgcccggccggccgctggagctggacctggcagcggacgtgatcatgcggggcctggtgctgcagggcatcaccggccgccggatgtggcagacctggtatcaggtgcgttccctctaccgggccgggctggcggagcggctgcggccgctggtgacgcaccggatgccgctggagcagatcgacgccgccatggagctcatgggttccggccagagcggcaagatagtgctggtgcctgacctgaaggcgtga

SEQ ID NO: 32841 - protein, 351 aa, Symbiobacterium thermophilum
MAETMRALRKLEAGPGATLQEVPIPTIGPRDVLVKVRAASICGTDYHIYTWDPWSAGRVKPPLTIGHELAGEVVAVGREVTACKVGDYVSAETHIVCNRCPRCHMGEYHLCENTKILGVDTDGAFAEYVAVPEQNIWVNDKDIPFELQSIQEPLGNAVHTALNGDLTARSVLITGCGPIGIMSVPVAKMAGAEIVMAMDINEYRLQLAGQLGADVLINPTKQDPVEVVRSYTRGYGADVVLEMSGNPTAIRQGLKAARNGARISLLGLPGRPLELDLAADVIMRGLVLQGITGRRMWQTWYQVRSLYRAGLAERLRPLVTHRMPLEQIDAAMELMGSGQSGKIVLVPDLKA

SEQ ID NO: 32842 - DNA, 1032 bp, Thermus thermophilus
  CDS (1)..(1032): transl_table=11
atgcgcgctttggccaagctggccccggaggagggcctaaccctggtggaccgccccgtgcccgagccgggccccggggagatcctggtgcgggtggaggcggcgagcatctgcggcaccgacctccacatctggaagtgggacgcctgggcccgggggaggatcaggccccccctcgtcaccgggcacgagttcagcggggtggtggaggccgtgggccccggggtgaagcgcccccaggtgggggaccacgtgagcctagaaagccacgtggtctgccacgcctgccccgcctgccgcacggggaactaccacgtctgcttgaacacaaagatcctcggcgtggaccgggacggcggcttcgccgagtacgtggtggtgccggcggagaacgcctgggtgaaccccaaggaccttccctttgaggtggcggccatcctcgagcccttcggcaacgccgtgcacaccgtctacgcgggaagcggggtctcggggaagagcgtcctcatcacgggggcggggcccatcggcctcatggcggccatggtggcccgggcgagcggggcggggcccatcctcgtctccgacccgaacccctaccgcctggccttcgccaggccctacgccgaccggctggtgaaccccttggaggaggacctcctggaggtggtgcgccgggtgacgggaagcggggtggaggtgcttttggagttttctgggaacgaggccgccatccaccagggcctcatggccctcatccccgggggggaggcgaggatcttggggatcccttccgaccccatccgctttgacctcgccggggagctcgtgatgcgggggatcaccgccttcggcatcgccgggcggaggctctggcagacctggatgcagggcaccgccttggtctactcgggtagggtggacctaagccccctcatcacccaccgcctccccttgagccgctaccgggaggccttcggcctcctcgcctcgggccaggcggtgaaggtgatcctggacccgaaggcctaa

SEQ ID NO: 32843 - protein, 343 aa, Thermus thermophilus
MRALAKLAPEEGLTLVDRPVPEPGPGEILVRVEAASICGTDLHIWKWDAWARGRIRPPLVTGHEFSGVVEAVGPGVKRPQVGDHVSLESHVVCHACPACRTGNYHVCLNTKILGVDRDGGFAEYVVVPAENAWVNPKDLPFEVAAILEPFGNAVHTVYAGSGVSGKSVLITGAGPIGLMAAMVARASGAGPILVSDPNPYRLAFARPYADRLVNPLEEDLLEVVRRVTGSGVEVLLEFSGNEAAIHQGLMALIPGGEARILGIPSDPIRFDLAGELVMRGITAFGIAGRRLWQTWMQGTALVYSGRVDLSPLITHRLPLSRYREAFGLLASGQAVKVILDPKA

SEQ ID NO: 32844 - DNA, 1032 bp, Thermus thermophilus
  CDS (1)..(1032): transl_table=11
atgcgcgctttggccaagctggccccggaggagggcctgaccctggtggaccgccccgtgcccgagccgggccccggggagatcctggtgcgggtggaggcggcgagcatctgcggcaccgacctccacatctggaagtgggacgcctgggcccggggcaggatccgccctcccctcgtcaccgggcacgagttcagcggggtggtggaggccgtgggccccggggtgaggcgaccccaggtgggggaccacgtgagcctggaaagccacatcgtctgccacgcctgccccgcctgccgcacggggaactaccacgtttgcctcaacacccagatcctcggcgtggaccgggacggcggcttcgccgagtacgtggtggtgccggcggagaacgcctgggtgaaccccaaggaccttccctttgaggtggcggccatcctggagcccttcggcaacgccgtgcacaccgtctacgcgggaagcggggtttcggggaagagcgtcctcatcacgggggcggggcccatcggcctcatggcggccatggtggtccgggcgagcggggcggggcccatcctggtctccgacccgaacccctaccgcctggccttcgccaggccctacgccgaccggctggtgaaccccttggaggaggacctcctggaggtggtgcgccgggtgacgggaagcggggtggaggtgcttttggagttttctgggaacgaggccgccatccaccagggcctcatggccctcatccccgggggggaggcgaggatcttggggatcccttccgaccccatccgctttgacctcgccggggagctcgtcatgcgggggatcaccgccttcggcatcgccgggcgcaggctctggcagacctggatgcagggcaccgccttggtctactcgggtagggtggacctaagccccctcctcacccaccgcctccccttgagccgctaccgggaggccttcggccttctggcctcgggccaggcggtgaaggtgatcctggacccgaaggcctaa

SEQ ID NO: 32845 - protein, 343 aa, Thermus thermophilus
MRALAKLAPEEGLTLVDRPVPEPGPGEILVRVEAASICGTDLHIWKWDAWARGRIRPPLVTGHEFSGVVEAVGPGVRRPQVGDHVSLESHIVCHACPACRTGNYHVCLNTQILGVDRDGGFAEYVVVPAENAWVNPKDLPFEVAAILEPFGNAVHTVYAGSGVSGKSVLITGAGPIGLMAAMVVRASGAGPILVSDPNPYRLAFARPYADRLVNPLEEDLLEVVRRVTGSGVEVLLEFSGNEAAIHQGLMALIPGGEARILGIPSDPIRFDLAGELVMRGITAFGIAGRRLWQTWMQGTALVYSGRVDLSPLLTHRLPLSRYREAFGLLASGQAVKVILDPKA

SEQ ID NO: 32846 - DNA, 1044 bp, Thermoanaerobacter tengcongensis
  CDS (1)..(1044)
atggatggacttatgaccgccgtggtaaaacaataccacaaagaaggggcagatatagtaaaaaaggaaataccaaagataggccctgatgaagttttgataaaagttaaagctacttctatttgcggcacagacgttcacatatacgtctggaatgaatgggcaaaaagtagaataaaacctccaaaaacgatgggacacgaatttgtaggagaggttgtagaaattggagaaaatgtcacatcagtaaaagtgggagacttagtaagcgcagaaactcatatagtatgcggaaagtgcagagcctgcagaaccggcaacgctcacatatgtgaaaataccctcattttaggcgttgacacagatggagcttttgcagaatacatcaaagttcctgaaagcaatgtgtggataaacgacaaaaacatacctctagagatactatccatacaggaacctcttggaaacgcagtccacactgttttttcaggagacgtagttggaaaatctgtagctgtcataggatgcggcccaataggaatgatggcaataccacttcttaaaagaacaggtgctgcagcaatattcgcgattgaacctgctgactacaggagagagttggctcacaagcttggtgcaacaagggttataaatcctctccgcgaagacgttgtcagcataataaaaagtgaaacagaaggctatggagcagatgtagttttggacttttcaggtaacccaaccgccataaggcagggtctagagtacattgcaaaaggtggcagaatgtctattctaggccttcctgacaatgaagttccaattgacatcacaaataatgtggtattcaaaggaataactatacaaggcataactggaagaagaatgtacgatacctggtacaccgtaaagggcttactaaaatcaggtcttgcagaagatttaaagccaataatcacccacacattccctcttaccgaataccagaagggaatggaactcatgataaaagggcagtgcggtaaagtcgtattatatccgtaa

SEQ ID NO: 32847 - protein, 347 aa, Thermoanaerobacter tengcongensis
MDGLMTAVVKQYHKEGADIVKKEIPKIGPDEVLIKVKATSICGTDVHIYVWNEWAKSRIKPPKTMGHEFVGEVVEIGENVTSVKVGDLVSAETHIVCGKCRACRTGNAHICENTLILGVDTDGAFAEYIKVPESNVWINDKNIPLEILSIQEPLGNAVHTVFSGDVVGKSVAVIGCGPIGMMAIPLLKRTGAAAIFAIEPADYRRELAHKLGATRVINPLREDVVSIIKSETEGYGADVVLDFSGNPTAIRQGLEYIAKGGRMSILGLPDNEVPIDITNNVVFKGITIQGITGRRMYDTWYTVKGLLKSGLAEDLKPIITHTFPLTEYQKGMELMIKGQCGKVVLYP

SEQ ID NO: 32848 - DNA, 1032 bp, Vibrio cholerae
  CDS (1)..(1032): transl_table=11
atgaaaatcaaagcactttcaaaactgaaaccagagcagggcatctggatgaacgaagtggacatgcctgagcttggccacaacgacctgctgatcaaaattaagaaaactgccatttgtggcactgacgtacacatttataactgggatgagtggtcacaaaaaaccattccagtgcctatggtagtcggccatgaatatgtgggtgaagtggttgggattggccaagaagtgcgtggtttccaaattggagatcgcgtttctggtgaaggtcacatcacttgtggtcactgccgtaactgccgtggtggccgtacccacctgtgccgcaacaccattggtgtgggcgtaaaccgcacgggttgtttctctgaatacttagtgatcccagcgtttaacgcattcaagatcccggatggtatttcagatgatctggcgtctattttcgacccgtttggaaacgctgtacacactgcgctttcattcgacttagtgggtgaagatgttctgatcaccggtgctggcccaatcggcattatggccgcagctgttgcgaaacatgtaggtgcgcgccatgtggtgatcaccgatgtgaacgaataccgcctcgatttagcccgtaaaatgggcgtgactcgcgctgtgaacgttgctgagcaaaacctagaagacgtgatgaaagaactcggtatgaccgaaggttttgatgtgggcttagagatgtctggtgtaccgagtgcgtttagcgccatgctaaaaaccatgaaccacggtggccgcattgctctgttaggtattccaccgtcatcgatggcgattgattggaaccaagtgatcttcaaaggccttgttattaaagggatttatggaagggaaatgtttgaaacttggtataagatggcgagcctgatccaatcgggtctcgatatcagcccaattatcactcaccacttcaaagtggatgacttccaaaaaggcttcgacatcatgcgcagcggggcttctggcaaagttatcctcgattggcagtaa

SEQ ID NO: 32849 - protein, 343 aa, Vibrio cholerae
MKIKALSKLKPEQGIWMNEVDMPELGHNDLLIKIKKTAICGTDVHIYNWDEWSQKTIPVPMVVGHEYVGEVVGIGQEVRGFQIGDRVSGEGHITCGHCRNCRGGRTHLCRNTIGVGVNRTGCFSEYLVIPAFNAFKIPDGISDDLASIFDPFGNAVHTALSFDLVGEDVLITGAGPIGIMAAAVAKHVGARHVVITDVNEYRLDLARKMGVTRAVNVAEQNLEDVMKELGMTEGFDVGLEMSGVPSAFSAMLKTMNHGGRIALLGIPPSSMAIDWNQVIFKGLVIKGIYGREMFETWYKMASLIQSGLDISPIITHHFKVDDFQKGFDIMRSGASGKVILDWQ

SEQ ID NO: 32850 - DNA, 1032 bp, Vibrio fischeri
  CDS (1)..(1032): transl_table=11
atgaaaattaaagcgctttcaaaattaaaacctgaagaaggtatctggctaactgaggttgaaaaacctgagatgggtcataacgatcttcttatccgcattaagaaaactgccatctgtggtaccgatgtacatatctacaactgggacgaatggtcacaaaaaacaattccagtacctatggttgttggtcacgagtatgtaggtgaagttgttggtattggtcaagaagtgcgtggttttgaaattggagaccgcgtttcaggtgaaggtcacataacttgtggtcattgtcgtaactgtcgtggcggccgtactcacctttgtcgtaatacaacaggcgtaggtgtaaaccgtactggtgctttttctgaatacctagtgattcctgctttcaatgcatttaagatccctgctggcatttcagatgacttagcatcaatctttgacccatttggaaacgcagttcacactgctctatcatttgatttagttggtgaagacgttctaatcacgggtgctggtcctattggcatcatggcggcggctgttgcaaaacatgttggtgcacgtcacgtcgtgattactgatgtgaatgaataccgcttagatcttgctaagaaaatgggcgtaactcgtgccgtaaacgtaatgaacgagaagcttgaagatgtgatgtctgagcttggcatgacagaaggctttgatgtcggtttggaaatgtctggtaatccatcagcatttaatagcatgctaactaacatgaaccatggcggtaaaatatctcttctaggtattccaccatcagacatgactgttgattggaaccaagttatctttaaaggcttagtcatcaaaggcatttacggacgcgagatgtttgaaacttggtataagatggcaagcttaattcaatcaggcttagatctaacaccaattatcacgcaccactataagattgatgacttccaagcaggcttcgatatgatgcgctctggtatgtctggtaaagttattctagattgggaataa

SEQ ID NO: 32851 - protein, 343 aa, Vibrio fischeri
MKIKALSKLKPEEGIWLTEVEKPEMGHNDLLIRIKKTAICGTDVHIYNWDEWSQKTIPVPMVVGHEYVGEVVGIGQEVRGFEIGDRVSGEGHITCGHCRNCRGGRTHLCRNTTGVGVNRTGAFSEYLVIPAFNAFKIPAGISDDLASIFDPFGNAVHTALSFDLVGEDVLITGAGPIGIMAAAVAKHVGARHVVITDVNEYRLDLAKKMGVTRAVNVMNEKLEDVMSELGMTEGFDVGLEMSGNPSAFNSMLTNMNHGGKISLLGIPPSDMTVDWNQVIFKGLVIKGIYGREMFETWYKMASLIQSGLDLTPIITHHYKIDDFQAGFDMMRSGMSGKVILDWE

SEQ ID NO: 32852 - DNA, 1032 bp, Vibrio parahaemolyticus
  CDS (1)..(1032): transl_table=11
atgaaaattaaagcactatcaaagctaaagcctgaacaaggcatttggatgaccgaagtagacaaacctgaggttggccataacgacattctgatcaaaattaagaaaactgcgatttgtggtacagacgtacacatttacaactgggacgaatggtcacaaaaaaccattccagtacctatggttgtcggtcacgaatacgtgggtgaagtggtcgcgattggtcaggaagttcgtggctttgaaatcggtgaccgcgtatctggcgaaggtcacatcacgtgtggtcactgtcgtaactgtcgtggcggtcgtactcacttatgccgtaacactatcggtgtgggtgtaaaccgtgaaggcgcatttgcagaatacttggttatcccagcgttcaacgcgttcaagatcccagacgagatctctgacgatctagcgtctatctttgacccgtttggtaacgcagtacacaccgcactttctttcgaccttgtgggtgaagacgtgctgatcacaggtgctggcccaatcggcatcatggcggcagcggttgctaaacacgttggtgctcgtcatgtggttatcacagacgtaaacgaataccgtctagagcttgctcgtaaaatgggcgtaacacgtgcagtaaacgtggctgaagagaagcttgaagatgtaatggctgaactaggcatgacagaaggcttcgacgtaggtcttgaaatgtcgggtaacccagcggcattcaactcaatgctaacaacaatgaatcatggtggtcgtattgctctgttgggtattccgccatcagacatgggtatcgactggaaccaagtgatcttcaaaggtttggttatcaaaggcatttacggccgtgaaatgttcgaaacgtggtacaagatggcttcactgattcaatctggtttggatctatcgccaatcatcacgcaccactacaagattgatgatttccaagaaggctttgacgttatgcgctctggcatgtcgggcaaagttattcttgattgggaatag

SEQ ID NO: 32853 - protein, 343 aa, Vibrio parahaemolyticus
MKIKALSKLKPEQGIWMTEVDKPEVGHNDILIKIKKTAICGTDVHIYNWDEWSQKTIPVPMVVGHEYVGEVVAIGQEVRGFEIGDRVSGEGHITCGHCRNCRGGRTHLCRNTIGVGVNREGAFAEYLVIPAFNAFKIPDEISDDLASIFDPFGNAVHTALSFDLVGEDVLITGAGPIGIMAAAVAKHVGARHVVITDVNEYRLELARKMGVTRAVNVAEEKLEDVMAELGMTEGFDVGLEMSGNPAAFNSMLTTMNHGGRIALLGIPPSDMGIDWNQVIFKGLVIKGIYGREMFETWYKMASLIQSGLDLSPIITHHYKIDDFQEGFDVMRSGMSGKVILDWE

SEQ ID NO: 32854 - DNA, 1032 bp, Vibrio vulnificus
  CDS (1)..(1032): transl_table=11
atgaaaatcaaagcactatcaaagctaaagccagaagaaggcatttggatgaccgaagtggacaagcctgttcttggccacaacgatctgctgatcaaaattaagaaaaccgcgatttgtggtaccgacgtacacatctacaactgggacgaatggtcacaaaaaaccatcccagtacctatggtggttggccatgaatacgtgggtgaagtggttggcattggccaagaagttcgtggttttgagatcggtgaccgcgtttctggcgaaggtcacatcacttgtggccactgtcgtaactgccgtggtggccgcacgcacttgtgccgcaacaccattggtgtgggcgtaaaccgcacaggttgtttctctgaataccttgtgatcccagcgttcaacgcctttaaaatccctgcaaacatctctgatgatcttgcgtctatcttcgacccgtttggcaacgcagtacacactgcactgtcgttcgatctggttggtgaagatgtactgatcaccggcgctggcccaatcggcattatggcggctgcggtcgcgaagcacgttggtgcgcgccacgtcgtgatcaccgatgtgaacgaataccgtctagacctcgcacgcaaaatgggtgtgactcgcgcggtgaacgttgccgagcagaaacttgacgatgtgatggcagagctaggcatgacagaaggcttcgatgtgggcctggaaatgtcgggcaacccatcagcattcaactcaatgctgaaaaccatgaaccacggtggccgcattgcactgcttggcattccaccatcagacatgggcatcgattggaaccaagtgatcttcaaaggcttggtgatcaaaggtatctatggccgtgaaatgtttgaaacttggtacaagatggcaagcttgattcaatctggccttgacctaacaccaattatcactcaccacttcaaagtggatgatttccagcaaggcttcgacatcatgcgcagcggcatgtcaggcaaagtgatccttgattgggaataa

SEQ ID NO: 32855 - protein, 343 aa, Vibrio vulnificus
MKIKALSKLKPEEGIWMTEVDKPVLGHNDLLIKIKKTAICGTDVHIYNWDEWSQKTIPVPMVVGHEYVGEVVGIGQEVRGFEIGDRVSGEGHITCGHCRNCRGGRTHLCRNTIGVGVNRTGCFSEYLVIPAFNAFKIPANISDDLASIFDPFGNAVHTALSFDLVGEDVLITGAGPIGIMAAAVAKHVGARHVVITDVNEYRLDLARKMGVTRAVNVAEQKLDDVMAELGMTEGFDVGLEMSGNPSAFNSMLKTMNHGGRIALLGIPPSDMGIDWNQVIFKGLVIKGIYGREMFETWYKMASLIQSGLDLTPIITHHFKVDDFQQGFDIMRSGMSGKVILDWE

SEQ ID NO: 32856 - DNA, 1032 bp, Vibrio vulnificus
  CDS (1)..(1032): transl_table=11
atgaaaatcaaagcactatcaaagctaaagccagaagaaggcatttggatgaccgaagtggacaagcctgttcttggccacaacgatctgctgatcaaaattaagaaaaccgcgatttgtggtaccgacgtacacatctacaactgggacgaatggtcacaaaaaaccatcccagtacctatggtggttggtcatgaatacgtgggtgaagtggttggcattggccaagaagttcgtggttttgaaatcggcgaccgcgtttctggcgaaggtcacatcacttgtggccactgtcgtaactgccgtggtggccgcacgcacttgtgccgcaacacaattggtgtgggcgtaaaccgcacaggttgtttctctgaatatcttgtgatcccagcgttcaacgcttttaagatccctgcaaacatctctgatgatcttgcgtctatcttcgacccgtttggcaacgcagtacacactgcactgtcgttcgatctggttggtgaagacgtactgatcaccggcgctggcccaatcggcatcatggcggctgcggtagcgaagcacgttggtgcgcgccacgtcgtgatcaccgatgtgaacgaataccgtctagacctcgcacgcaaaatgggcgtgactcgcgcagtgaacgttgctgagcagaagcttgacgatgtgatggtagagctaggcatgacagaaggcttcgacgtgggcctagaaatgtcgggcaacccttcagcattcaactcaatgctgaaaaccatgaaccacggtggtcgtattgcactgctcggcattccaccatcagacatgggtatcgactggaaccaagtgatcttcaaaggcttggtgatcaaaggtatctatggccgtgaaatgtttgaaacttggtacaagatggcaagcttgattcaatctggccttgacctaacaccaattatcactcaccacttcaaagtggatgacttccagcaaggcttcgacatcatgcgcagcggcatgtcaggcaaagtgattcttgattgggaataa

SEQ ID NO: 32857 - protein, 343 aa, Vibrio vulnificus
MKIKALSKLKPEEGIWMTEVDKPVLGHNDLLIKIKKTAICGTDVHIYNWDEWSQKTIPVPMVVGHEYVGEVVGIGQEVRGFEIGDRVSGEGHITCGHCRNCRGGRTHLCRNTIGVGVNRTGCFSEYLVIPAFNAFKIPANISDDLASIFDPFGNAVHTALSFDLVGEDVLITGAGPIGIMAAAVAKHVGARHVVITDVNEYRLDLARKMGVTRAVNVAEQKLDDVMVELGMTEGFDVGLEMSGNPSAFNSMLKTMNHGGRIALLGIPPSDMGIDWNQVIFKGLVIKGIYGREMFETWYKMASLIQSGLDLTPIITHHFKVDDFQQGFDIMRSGMSGKVILDWE

SEQ ID NO: 32858 - DNA, 1023 bp, Xanthomonas campestris pv
  CDS (1)..(1023): transl_table=11
atgaaggcgctggtcaagcgcgaagcgagcaagggcatctggctggaacaggtccccgtgcccaccccgggcccgaatgaggtcctgatcaagctggaaaagaccgccatctgcggcaccgacctgcatatctacctgtgggatgagtggagccaacgcaccattacgccgggcctgaccatcggccacgagttcgtcggccgcgtggccgagctcggttcggcggtgaccggctaccaggtcggccagcgcgtgtcggccgaaggccacatcgtctgcgggcattgccgcaactgccgtggcggccgcccgcacctgtgccccaacacggtgggcatcggcgtcaacgtcaacggcgcctttgccgaatacatggtgatgccggccagcaacctgtggccgatccccgaccagatcccctccgagctggccgccttcttcgacccctacggcaacgccgcgcattgcgcgctggaattcgatgtcatcggcgaagacgtgctgatcaccggcgccggcccgatcggcatcattgccgccggcatctgcaagcacatcggtgcgcgcaatgtggtggtcaccgacgtcaacgacttccgcctcaagctggccgccgacctgggcgccacgcgcgtggtcaacgtgtccaagacctcgctcaaggacgtcatggccgacctgcacatggaaggcttcgacgtgggcctggaaatgagcggcaacccgcgcgcgttcaacgacatgctcgattgcatgtaccacggcggcaagatcgcgatgctcggcatcatgccgcgcggcgccggttgcgattgggacaagatcatcttcaagggcctcaccgtgcagggcatctacggacgcaagatgtacgagacctggtacaagatgacccagctggtgctatcgggttttccgctgcagaaagtgctgacccaccagttgtcgatcgacgagttccagaaggggttcgacctgatggaagaaggcaaggccggcaaggttgtgttgagctggaactga

SEQ ID NO: 32859 - protein, 340 aa, Xanthomonas campestris pv
MKALVKREASKGIWLEQVPVPTPGPNEVLIKLEKTAICGTDLHIYLWDEWSQRTITPGLTIGHEFVGRVAELGSAVTGYQVGQRVSAEGHIVCGHCRNCRGGRPHLCPNTVGIGVNVNGAFAEYMVMPASNLWPIPDQIPSELAAFFDPYGNAAHCALEFDVIGEDVLITGAGPIGIIAAGICKHIGARNVVVTDVNDFRLKLAADLGATRVVNVSKTSLKDVMADLHMEGFDVGLEMSGNPRAFNDMLDCMYHGGKIAMLGIMPRGAGCDWDKIIFKGLTVQGIYGRKMYETWYKMTQLVLSGFPLQKVLTHQLSIDEFQKGFDLMEEGKAGKVVLSWN

SEQ ID NO: 32860 - DNA, 1026 bp, Yersinia pestis
  CDS (1)..(1026): transl_table=11
atgaaagcactttctaaactgaaagcagaagaaggcatttggatgaccgatgtgccacagccagagctgggtcacaacgatatcatgatcaaaattcgcaaaacggctatctgtggtactgacgtacatatttataattgggatgaatggtcacaaaaaaccatccccgtacccatggtcgttggccatgaatatgtcggtgaagtggtggccattgggcaggaagttaaagggtttaatattggtgaccgggtgtctggtgaaggccatattacctgtggtcactgccgtaactgccgtggtggtcgtacccacctttgtcgtaatacggtgggtgttggcgtgaatcgccctggttcgtttgccgaatatttggtgatccctgcttttaacgcgttcaagatcccagacaatatttctgatgagcttgcggctatttttgaccccttcggcaatgcagttcataccgcgttatcttttgatttagtcggcgaggatgtgttggtctccggggctggcccaattggtattatggccgccgcagtctgtaagcatgtgggtgctcgtcatgttgtcatcgctgatgtgaatgaatatcgcctggatctggcccgtaaaatgggcgtgacccgtgccgttaacgtcagcaaagagaacctaaatgacgttatgacggaattgggcatgaccgaagggtttgatgtgggcttggagatgtcaggtgctcccccggctttccgttcattacttaattcaatgaatcatggtggtcgtatagcgatgctgggaataccgccgtctgatatgtcgatcgactggaatcaggttatctttaaggggctgtttataaaggggatttatggccgtgagatgttcgaaacctggtacaaaatggccgcgttgattcaatctggtttggacttaactccgatcattacccaccgtttccctattgatgaattccagcaagggtttgacgccatgcgttcgggtaaatcaggcaaagtggtattaagctgggattag

SEQ ID NO: 32861 - protein, 341 aa, Yersinia pestis
MKALSKLKAEEGIWMTDVPQPELGHNDIMIKIRKTAICGTDVHIYNWDEWSQKTIPVPMVVGHEYVGEVVAIGQEVKGFNIGDRVSGEGHITCGHCRNCRGGRTHLCRNTVGVGVNRPGSFAEYLVIPAFNAFKIPDNISDELAAIFDPFGNAVHTALSFDLVGEDVLVSGAGPIGIMAAAVCKHVGARHVVIADVNEYRLDLARKMGVTRAVNVSKENLNDVMTELGMTEGFDVGLEMSGAPPAFRSLLNSMNHGGRIAMLGIPPSDMSIDWNQVIFKGLFIKGIYGREMFETWYKMAALIQSGLDLTPIITHRFPIDEFQQGFDAMRSGKSGKVVLSWD

SEQ ID NO: 32862 - DNA, 1026 bp, Yersinia pseudotuberculosis
  CDS (1)..(1026): transl_table=11
atgaaagcactttctaaactgaaagcagaagaaggcatttggatgaccgatgtgccacagccagagctgggtcacaacgatatcatgatcaaaattcgcaaaacggctatctgtggtactgacgtacatatttataattgggatgaatggtcacaaaaaaccatccccgtacccatggtcgttggccatgaatatgtcggtgaagtggtggccattgggcaggaagttaaagggtttaatattggtgaccgggtgtctggtgaaggccatattacctgtggtcactgccgtaactgccgtggtggtcgtacccacctttgtcgtaatacggtgggtgttggcgtgaatcgccctggttcgtttgccgaatatttggtgatccctgcttttaacgcgttcaagatcccagacaatatttctgatgagcttgcggctatttttgaccccttcggcaatgcagttcataccgcgttatcttttgatttagtcggcgaggatgtgttggtctccggggctggcccaattggtattatggccgccgcagtctgtaagcatgtgggtgctcgtcatgttgtcatcactgatgtgaatgaatatcgccttgatctggcccgtaaaatgggcgtgacccgtgccgttaacgtcagcaaagagaacctaaatgacgttatgacggaattgggcatgaccgaagggtttgatgtgggcttggagatgtcaggtgctcccccggctttccgttcattacttaattcaatgaatcatggtggtcgtatagcgatgctgggaataccgccatctgatatgtcgatcgactggaatcaggttatctttaaggggctgtttataaaggggatttatggccgtgagatgttcgaaacctggtacaaaatggccgcgttgattcaatctggtttggacttaactccgatcattacccaccgtttccctattgatgaattccagcaagggtttgacgccatgcgttcgggtaaatcaggcaaagtggtattaagctgggattag

SEQ ID NO: 32863 - protein, 341 aa, Yersinia pseudotuberculosis
MKALSKLKAEEGIWMTDVPQPELGHNDIMIKIRKTAICGTDVHIYNWDEWSQKTIPVPMVVGHEYVGEVVAIGQEVKGFNIGDRVSGEGHITCGHCRNCRGGRTHLCRNTVGVGVNRPGSFAEYLVIPAFNAFKIPDNISDELAAIFDPFGNAVHTALSFDLVGEDVLVSGAGPIGIMAAAVCKHVGARHVVITDVNEYRLDLARKMGVTRAVNVSKENLNDVMTELGMTEGFDVGLEMSGAPPAFRSLLNSMNHGGRIAMLGIPPSDMSIDWNQVIFKGLFIKGIYGREMFETWYKMAALIQSGLDLTPIITHRFPIDEFQQGFDAMRSGKSGKVVLSWD

SEQ ID NO: 32864 - DNA, 25 bp, Artificial sequence
  Primer sequence
atgaaagcgttatccaaactgaaag

SEQ ID NO: 32865 - DNA, 24 bp, Artificial sequence
  Primer sequence
ttaatcccagctcagaataacttt

SEQ ID NO: 32866 - protein, 375 aa, Artificial sequence
  Consensus
  Variant (2)..(3): Xaa in position 2 to 3 is any amino acid
  Variant (5)..(5): Xaa in position 5 is any amino acid
  Variant (7)..(11): Xaa in position 7 to 11 is any amino acid
  Variant (13)..(20): Xaa in position 13 to 20 is any amino acid
  Variant (21)..(21): Xaa in position 21 is any or no amino acid
  Variant (23)..(24): Xaa in position 23 to 24 is any amino acid
  Variant (26)..(27): Xaa in position 26 to 27 is any amino acid
  Variant (28)..(28): Xaa in position 28 is any or no amino acid
  Variant (35)..(38): Xaa in position 35 to 38 is any amino acid
  Variant (48)..(48): Xaa in position 48 is any amino acid
  Variant (50)..(51): Xaa in position 50 to 51 is any amino acid
  Variant (54)..(55): Xaa in position 54 to 55 is any amino acid
  Variant (56)..(64): Xaa in position 56 to 64 is any or no amino acid
  Variant (66)..(67): Xaa in position 66 to 67 is any or no amino acid
  Variant (69)..(70): Xaa in position 69 to 70 is any amino acid
  Variant (75)..(76): Xaa in position 75 to 76 is any amino acid
  Variant (78)..(78): Xaa in position 78 is any amino acid
  Variant (80)..(81): Xaa in position 80 to 81 is any amino acid
  Variant (84)..(85): Xaa in position 84 to 85 is any amino acid
  Variant (87)..(90): Xaa in position 87 to 90 is any amino acid
  Variant (93)..(93): Xaa in position 93 is any amino acid
  Variant (97)..(97): Xaa in position 97 is any amino acid
  Variant (99)..(99): Xaa in position 99 is any amino acid
  Variant (100)..(100): Xaa in position 100 is any or no amino acid
  Variant (103)..(103): Xaa in position 103 is any amino acid
  Variant (106)..(106): Xaa in position 106 is any amino acid
  Variant (108)..(109): Xaa in position 108 to 109 is any amino acid
  Variant (112)..(112): Xaa in position 112 is any amino acid
  Variant (114)..(115): Xaa in position 114 to 115 is any amino acid
  Variant (119)..(123): Xaa in position 119 to 123 is any amino acid
  Variant (127)..(129): Xaa in position 127 to 129 is any amino acid
  Variant (130)..(134): Xaa in position 130 to 134 is any or no amino acid
  Variant (136)..(136): Xaa in position 136 is any amino acid
  Variant (139)..(139): Xaa in position 139 is any amino acid
  Variant (142)..(142): Xaa in position 142 is any amino acid
  Variant (145)..(148): Xaa in position 145 to 148 is any amino acid
  Variant (150)..(151): Xaa in position 150 to 151 is any amino acid
  Variant (153)..(154): Xaa in position 153 to 154 is any amino acid
  Variant (155)..(155): Xaa in position 155 is any or no amino acid
  Variant (157)..(158): Xaa in position 157 to 158 is any amino acid
  Variant (160)..(160): Xaa in position 160 is any amino acid
  Variant (164)..(164): Xaa in position 164 is any amino acid
  Variant (167)..(167): Xaa in position 167 is any amino acid
  Variant (169)..(169): Xaa in position 169 is any amino acid
  Variant (173)..(180): Xaa in position 173 to 180 is any amino acid
  Variant (181)..(181): Xaa in position 181 is any or no amino acid
  Variant (183)..(184): Xaa in position 183 to 184 is any amino acid
  Variant (188)..(188): Xaa in position 188 is any amino acid
  Variant (190)..(190): Xaa in position 190 is any amino acid
  Variant (198)..(201): Xaa in position 198 to 201 is any amino acid
  Variant (203)..(204): Xaa in position 203 to 204 is any amino acid
  Variant (207)..(208): Xaa in position 207 to 208 is any amino acid
  Variant (211)..(211): Xaa in position 211 is any amino acid
  Variant (215)..(217): Xaa in position 215 to 217 is any amino acid
  Variant (218)..(218): Xaa in position 218 is any or no amino acid
  Variant (221)..(222): Xaa in position 221 to 222 is any amino acid
  Variant (224)..(225): Xaa in position 224 to 225 is any amino acid
  Variant (228)..(231): Xaa in position 228 to 231 is any amino acid
  Variant (232)..(232): Xaa in position 232 is any or no amino acid
  Variant (235)..(237): Xaa in position 235 to 237 is any amino acid
  Variant (238)..(247): Xaa in position 238 to 247 is any or no amino acid
  Variant (249)..(254): Xaa in position 249 to 254 is any amino acid
  Variant (255)..(262): Xaa in position 255 to 262 is any or no amino acid
  Variant (264)..(264): Xaa in position 264 is any amino acid
  Variant (267)..(267): Xaa in position 267 is any amino acid
  Variant (270)..(270): Xaa in position 270 is any amino acid
  Variant (273)..(275): Xaa in position 273 to 275 is any amino acid
  Variant (277)..(280): Xaa in position 277 to 280 is any amino acid
  Variant (282)..(283): Xaa in position 282 to 283 is any amino acid
  Variant (285)..(286): Xaa in position 285 to 286 is any amino acid
  Variant (289)..(289): Xaa in position 289 is any amino acid
  Variant (291)..(291): Xaa in position 291 is any amino acid
  Variant (296)..(306): Xaa in position 296 to 306 is any amino acid
  Variant (307)..(307): Xaa in position 307 is any or no amino acid
  Variant (310)..(310): Xaa in position 310 is any amino acid
  Variant (312)..(312): Xaa in position 312 is any amino acid
  Variant (314)..(314): Xaa in position 314 is any amino acid
  Variant (316)..(316): Xaa in position 316 is any amino acid
  Variant (319)..(319): Xaa in position 319 is any amino acid
  Variant (322)..(322): Xaa in position 322 is any or no amino acid
  Variant (325)..(325): Xaa in position 325 is any amino acid
  Variant (328)..(332): Xaa in position 328 to 332 is any amino acid
  Variant (335)..(335): Xaa in position 335 is any amino acid
  Variant (338)..(339): Xaa in position 338 to 339 is any amino acid
  Variant (340)..(341): Xaa in position 340 to 341 is any or no amino acid
  Variant (343)..(344): Xaa in position 343 to 344 is any amino acid
  Variant (349)..(357): Xaa in position 349 to 357 is any amino acid
  Variant (358)..(358): Xaa in position 358 is any or no amino acid
  Variant (361)..(362): Xaa in position 361 to 362 is any amino acid
  Variant (364)..(365): Xaa in position 364 to 365 is any amino acid
  Variant (367)..(369): Xaa in position 367 to 369 is any amino acid
  Variant (370)..(371): Xaa in position 370 to 371 is any or no amino acid
MXXLXKXXXXXGXXXXXXXXXPXXGXXXDVLIKIXXXXICGTDVHIYXWXXWAXXXXXXXXXXXIXXPXXVGHEXXGXVXXVGXXVXXXXVGXRVSXEXXHIXCGXCXXCRXGXXHLCXXXXXVGVXXXXXXXXGXFAXYLXIPXXXXFXXPXXXIXXEXAAIXDPXGXAVHXXXXXXXXXGXXVLIXGXGPIGIMAXXXXKXXGAXXVVXTDVXXXXRLXXAXXMGXXXXXVNXXXXXXXXXXXXXLXXXXXXXXXXXXXXGXDVXLEXSGXXXAXXXXLXXMXXGGXIXLLGIXXXXXXXXXXXXVIXKXLXIXGIXGRXMFXTWXXXXXLLXSGXXXXLXXIITHXXXXXXXXXXGFXXMXXGXXXXXKVIL

SEQ ID NO: 32867 - protein, 11 aa, Artificial sequence
  Consensus
  Variant (6)..(7): Xaa in position 6 to 7 is any amino acid
  Variant (9)..(10): Xaa in position 9 to 10 is any amino acid
ICGTDXXIXXW

SEQ ID NO: 32868 - protein, 21 aa, Artificial sequence
  Consensus
  Variant (4)..(4): Xaa in position 4 is any amino acid
  Variant (5)..(5): Xaa in position 5 is Ala, Ser or Val
  Variant (7)..(7): Xaa in position 7 is any amino acid
  Variant (8)..(8): Xaa in position 8 is Ile or Val
  Variant (9)..(9): Xaa in position 9 is any amino acid
  Variant (10)..(10): Xaa in position 10 is Ala, Asp, Glu, Gly or Gln
  Variant (11)..(11): Xaa in position 11 is Phe, Ile, Leu, Met or Val
  Variant (13)..(13): Xaa in position 13 is any amino acid
  Variant (14)..(14): Xaa in position 14 is Ala, Asp, Glu, Gly, Asn or Ser
  Variant (16)..(19): Xaa in position 16 to 19 is any amino acid
  Variant (20)..(20): Xaa in position 20 is Ile, Leu, Pro or Val
GHEXXGXXXXXGXXVXXXXXG

SEQ ID NO: 32869 - protein, 36 aa, Artificial sequence
  Consensus
  Variant (2)..(2): Xaa in position 2 is any amino acid
  Variant (5)..(5): Xaa in position 5 is Ile or Val
  Variant (7)..(8): Xaa in position 7 to 8 is any amino acid
  Variant (9)..(9): Xaa in position 9 is Ala, Cys, Gly, Asn or Ser
  Variant (10)..(12): Xaa in position 10 to 12 is any amino acid
  Variant (13)..(13): Xaa in position 13 is Ala, Cys or Val
  Variant (14)..(16): Xaa in position 14 to 16 is any amino acid
  Variant (19)..(20): Xaa in position 19 to 20 is any amino acid
  Variant (21)..(22): Xaa in position 21 to 22 is any or no amino acid
  Variant (24)..(24): Xaa in position 24 is any amino acid
  Variant (25)..(26): Xaa in position 25 to 26 is any or no amino acid
  Variant (28)..(31): Xaa in position 28 to 31 is any amino acid
  Variant (34)..(35): Xaa in position 34 to 35 is any amino acid
GXGPXGXXXXXXXXXXGAXXXXIXXXDXXXXRLXXA

SEQ ID NO: 32870 - DNA, 1080 bp, Escherichia coli
  CDS (1)..(1080)
atgcaagcggcaactgttgtgattaaccgccgcgctctgcgacacaacctgcaacgtcttcgtgaactggcccctgccagtaaaatggttgcggtggtgaaagcgaacgcttatggtcacggtcttcttgagaccgcgcgaacgctccccgatgctgacgcctttggcgtagcccgtctcgaagaagctctgcgactgcgtgcggggggaatcaccaaacctgtactgttactcgaaggcttttttgatgccagagatctgccgacgatttctgcgcaacattttcataccgccgtgcataacgaagaacagctggctgcgctggaagaggctagcctggacgagccggttaccgtctggatgaaactcgataccggtatgcaccgtctgggcgtaaggccggaacaggctgaggcgttttatcatcgcctgacccagtgcaaaaacgttcgtcagccggtgaatatcgtcagccattttgcgcgcgcggatgaaccaaaatgtggcgcaaccgagaaacaactcgctatctttaataccttttgcgaaggcaaacctggtcaacgttccattgccgcgtcgggtggcattctgctgtggccacagtcgcattttgactgggtgcgcccgggcatcattctttatggcgtctcgccgctggaagatcgctccaccggtgccgattttggctgtcagccagtgatgtcactaacctccagcctgattgccgtgcgtgagcataaagccggagagcctgttggttatggtggaacctgggtaagcgaacgtgatacccgtcttggcgtagtcgcgatgggctatggcgatggttatccgcgcgccgcgccgtccggtacgccagtgctggtgaacggtcgcgaagtaccgattgtcgggcgcgtggcgatggatatgatctgcgtagacttaggtccacaggcgcaggacaaagccggggatccggtcattttatggggcgaaggtttgcccgtagaacgtatcgctgaaatgacgaaagtaagcgcttacgaacttattacgcgcctgacttcaagggtcgcgatgaaatacgtggattaa

SEQ ID NO: 32871 - protein, 359 aa, Escherichia coli
MQAATVVINRRALRHNLQRLRELAPASKMVAVVKANAYGHGLLETARTLPDADAFGVARLEEALRLRAGGITKPVLLLEGFFDARDLPTISAQHFHTAVHNEEQLAALEEASLDEPVTVWMKLDTGMHRLGVRPEQAEAFYHRLTQCKNVRQPVNIVSHFARADEPKCGATEKQLAIFNTFCEGKPGQRSIAASGGILLWPQSHFDWVRPGIILYGVSPLEDRSTGADFGCQPVMSLTSSLIAVREHKAGEPVGYGGTWVSERDTRLGVVAMGYGDGYPRAAPSGTPVLVNGREVPIVGRVAMDMICVDLGPQAQDKAGDPVILWGEGLPVERIAEMTKVSAYELITRLTSRVAMKYVD

SEQ ID NO: 32872 - DNA, 1098 bp, Francisella tularensis subsp. tularensis
  CDS (1)..(1098)
atgaatattctaaagattagtaaacaaactttaaggaataatattaaaattattcgagagtatattggcaacgctaagatgtgttttcctgtcaaggcaaatgcttatgggcatggtatagaagacatagtagaaaatacacatgatttagtcgatttctttgctgttgctaactctctagaggcttttagagtaacagctgttgctaaaaatccagtgctagtatttggagtaatatactatgaatatattgaaaaaatgatttcagaaaatatcagagttagcattcaagactatgaagatattgaaaagttagagcaaatagccaaagagcttgataaaaaagtatatgcccatattaatataaacacaggtatgaatcgcatgggcgtagattataatgatgcctgtagaactatacagcgagcttatgaatctgattggctaattttagaaggagtatatagtcatctagcatgtgctgataatagagatcatcctacaaatatcaaacaaaaaaatagatttgatagtattgtcaaatttactaaaggattatctcaagatattatttgtcatttgtctaattcttatggtttcttgggtcaaaaaggaatctgttatgatatggtaagacctggtattttaagttatggttttttaccagagttttacgttgatagagttataagagaaataaagcctatcgcaagattactatcaaaagtggttaagataattaccttgcaagagggcgaaggcgttggttattcattgatatatagaggctttgaagatgagcaattagctgtgattcctattggttatggcgatggttttcctcgtgagttaggtgatagagggttcgttaatattaatgatgtcatgtatcctatggctggtagaatgagtatggatggtctgacagtatcgttaggaattaatgaatacgatgtcaaagtaggcgatacagtagagctaatatcagctattccacgcaatcgaaatagtgcattttcaatagcaaaacaaacaaatactatcgaatatgatattatgagcacattaaatgatcgtattataagaaagatcatataa

SEQ ID NO: 32873 - protein, 365 aa, Francisella tularensis subsp. tularensis
MNILKISKQTLRNNIKIIREYIGNAKMCFPVKANAYGHGIEDIVENTHDLVDFFAVANSLEAFRVTAVAKNPVLVFGVIYYEYIEKMISENIRVSIQDYEDIEKLEQIAKELDKKVYAHININTGMNRMGVDYNDACRTIQRAYESDWLILEGVYSHLACADNRDHPTNIKQKNRFDSIVKFTKGLSQDIICHLSNSYGFLGQKGICYDMVRPGILSYGFLPEFYVDRVIREIKPIARLLSKVVKIITLQEGEGVGYSLIYRGFEDEQLAVIPIGYGDGFPRELGDRGFVNINDVMYPMAGRMSMDGLTVSLGINEYDVKVGDTVELISAIPRNRNSAFSIAKQTNTIEYDIMSTLNDRIIRKII

SEQ ID NO: 32874 - DNA, 1104 bp, Deinococcus radiodurans R1
  CDS (1)..(1104): transl_table=11
atgcgggtatattcgcagttttcctttcccggtcctatcctctttcccatgctgccccgcgccgtcgcccacatttccgccgctgcccttgaccacaacctgagcgccctcgcgcagcgcagcggcacccggctgctgctgcccgtcaaggccgacgcctacggacacggcatggaacttgtcgggcggctggcggcggcgcaccccgacgtgtggggactggcggtggcgacgccgcaggaggccgaaacgctcgcccgcctcgacctcggcaagccgctgctgctgctcacgccgcccgcgccggaggagctcggggcgctcgctgacctcggtgtgcggttgccggtcagcacgctcgccgaggtggaggcgctgcccgcccacgcgcaggcgcacctgaaggtggacaccggcatgaatcgcctcggggcgcggcctgccgacgcggtggcggtgggccgggcactggcggagcgcgggcaactggagggggtctacacccatttcgccacggcggacgagcctgacctgtcctttgccctgacccagttggtccgcttccgcagcgtgctggacgccttgccgcccgtcctcgcccactgcgccaacgggggcggcgtcctcagcttcgggcgcattgaggggatgagcctcgcccggcccggtttggcggcctacggctacgttcccgagcacctgcgccacgtctgtgccctgcgcccggtgatgacggtgcgcgcgcgggtcaaccagctgcatactgcctaccccggcgaaaccgtcagctacggcgccctgtggcgggcggagcgcgaaacgggggtggcggtggtcggcatgggctacgccgacggctacccccgcaacgcgacgggccgcgccgcagtcctcatcggcggcgagcggcgcccggtgctgggccgcatctgcatggaccagatgatggtggacgtgaccgggctggacgtgggggtcggcgactgggccgagctgtggggcgaaggcgacctcagcgtgacggacgtggcccgctggggtgacaccattgaatatgaggtgctgacggggctggggagccgggtggagcggcgggtggggtga

SEQ ID NO: 32875 - protein, 367 aa, Deinococcus radiodurans R1
MRVYSQFSFPGPILFPMLPRAVAHISAAALDHNLSALAQRSGTRLLLPVKADAYGHGMELVGRLAAAHPDVWGLAVATPQEAETLARLDLGKPLLLLTPPAPEELGALADLGVRLPVSTLAEVEALPAHAQAHLKVDTGMNRLGARPADAVAVGRALAERGQLEGVYTHFATADEPDLSFALTQLVRFRSVLDALPPVLAHCANGGGVLSFGRIEGMSLARPGLAAYGYVPEHLRHVCALRPVMTVRARVNQLHTAYPGETVSYGALWRAERETGVAVVGMGYADGYPRNATGRAAVLIGGERRPVLGRICMDQMMVDVTGLDVGVGDWAELWGEGDLSVTDVARWGDTIEYEVLTGLGSRVERRVG

SEQ ID NO: 32876 - DNA, 1227 bp, Mycobacterium tuberculosis CDC1551
  CDS (1)..(1227): transl_table=11
gtgaaacggttctgggagaatgtcggaaagccaaacgacacgacagatgggcggggcacgacttcgttggccatgacaccgatatcccagacacctggcctcctcgccgaggccatggtggatctgggcgctattgaacacaacgtgcgggtgctgcgtgagcacgccggccacgcgcagctgatggcggtggtcaaggccgacggctacggtcacggtgctacgcgcgtcgcccaaaccgccctgggagccggtgcggccgaactcggcgtcgccaccgtcgacgaggcgctagcgctgcgcgctgatggcattaccgcaccggtgctggcctggctgcatccgcccggcatcgacttcgggcccgcgctgctggccgacgtgcaggtcgcggtgtcctcgctgcgccaactcgacgaactgttgcacgcggtgcgccggaccggccggacggcgacggtgaccgtcaaggtggataccgggctgaaccgcaatggcgtgggaccggcacaattcccggccatgctgaccgcgttacgccaagccatggccgaggacgccgtccggctgcgggggctgatgtcgcatatggtttacgccgacaagcctgacgattccatcaacgatgttcaggcccaacggtttaccgcctttctggcgcaggcccgcgaacaaggggtgcggttcgaggtggcgcatctatcgaactcatcagcaactatggcgcgccccgacctgacgttcgacctggtgcggccgggcatcgcggtgtatgggctaagcccggtacccgccctcggtgacatggggctggtgccggcgatgaccgtgaaatgtgctgttgcgctggtgaaatcgattcgtgcgggggagggcgtgtcgtatgggcacacatggatcgcgccacgcgacaccaatctggcgctgctgccgatcggttacgcagacggcgtgttccggtcgctgggcgggcggctggaggtgctgatcaacggcagacgatgccccggtgtggggcggatctgcatggaccagttcatggtcgacctgggccccgggccgcttgatgtggccgaaggcgacgaggcgattttgttcgggccgggcatccggggtgagcccacggctcaggactgggccgatcttgtcggcaccatccactacgaagtggtcaccagcccgcgaggacgtatcaccaggacctatcgcgaggctgaaaaccgttga

SEQ ID NO: 32877 - protein, 408 aa, Mycobacterium tuberculosis CDC1551
MKRFWENVGKPNDTTDGRGTTSLAMTPISQTPGLLAEAMVDLGAIEHNVRVLREHAGHAQLMAVVKADGYGHGATRVAQTALGAGAAELGVATVDEALALRADGITAPVLAWLHPPGIDFGPALLADVQVAVSSLRQLDELLHAVRRTGRTATVTVKVDTGLNRNGVGPAQFPAMLTALRQAMAEDAVRLRGLMSHMVYADKPDDSINDVQAQRFTAFLAQAREQGVRFEVAHLSNSSATMARPDLTFDLVRPGIAVYGLSPVPALGDMGLVPAMTVKCAVALVKSIRAGEGVSYGHTWIAPRDTNLALLPIGYADGVFRSLGGRLEVLINGRRCPGVGRICMDQFMVDLGPGPLDVAEGDEAILFGPGIRGEPTAQDWADLVGTIHYEVVTSPRGRITRTYREAENR

SEQ ID NO: 32878 - DNA, 1125 bp, Streptococcus pneumoniae R6
  CDS (1)..(1125): transl_table=11
gtgtcattttggaggaaaatcatgaaagctagtccacatagaccaaccaaggctctgattcatctgggagctattcgacaaaatattcagcaaatgggggctcatatccctcaaggaacgctcaagttggctgtggttaaggccaatgcttatggtcatggagctgttgccgttgccaaggcaattcaagatgatgttgatggcttttgcgtttccaatatcgatgaagccattgaactcagacaagctggactcagcaagccaatcctcattttaggagtttctgaaatcgaagctgttgctctagctaaagaatatgacttcaccttgacagtggctggactggagtggattcaagcactcttagataaggaagtggacctaactggattgacagtccacctcaagattgattcagggatgggacggattggttttagagaggcaagtgaggttgagcaggctcaagatttgctccaacaacacggtgtttgtgttgaaggaatctttacccactttgctactgctgatgaggaatcagatgactattttaatgcccagttagaacggtttaaaactattttagctagtatgaaggaagttccagagctggttcatgctagcaattctgcaacgactctttggcatgtagagactattttcaatgcggttcgtatgggagatgccatgtatggtctcaatccaagtggagcggtcttggatttgccttatgatttgataccggccttgaccttggagtctgctctggttcatgtcaagacagttccagctggagcttgcatgggctatggagcaacttatcaagcggatagcgagcaagtcatcgcgaccgtgccaatcgggtatgcagatggatggacaagagacatgcaaaatttctctgtcttggtagatggccaagcttgcccaattgtcggcagggtttcgatggaccaaatcactattcgattgcctaagctttatccgctaggaaccaaggtaaccttgattggctccaatggggataaggaaatcactgcaactcaggtagcgacctaccgcgtaaccattaactatgaggtggtttgcctcctcagcgaccgtattccgagagaatattattag

SEQ ID NO: 32879 - protein, 374 aa, Streptococcus pneumoniae R6
MSFWRKIMKASPHRPTKALIHLGAIRQNIQQMGAHIPQGTLKLAVVKANAYGHGAVAVAKAIQDDVDGFCVSNIDEAIELRQAGLSKPILILGVSEIEAVALAKEYDFTLTVAGLEWIQALLDKEVDLTGLTVHLKIDSGMGRIGFREASEVEQAQDLLQQHGVCVEGIFTHFATADEESDDYFNAQLERFKTILASMKEVPELVHASNSATTLWHVETIFNAVRMGDAMYGLNPSGAVLDLPYDLIPALTLESALVHVKTVPAGACMGYGATYQADSEQVIATVPIGYADGWTRDMQNFSVLVDGQACPIVGRVSMDQITIRLPKLYPLGTKVTLIGSNGDKEITATQVATYRVTINYEVVCLLSDRIPREYY

SEQ ID NO: 32880 - DNA, 1206 bp, Nostoc sp. PCC 7120
  CDS (1)..(1206): transl_table=11
gtgataagggggagtgaaatgttaagtcgccaacaagcctcaagtatggcttctcatcaacaatgtgatacctatgcttggttttcacaacgcgcttgggtagaaattgacctagaggcgttgtcgcacaatgtccagcaacttaagcagtttttatcaccgcgtactcagttaatggcagtagttaaagcagatgcttatggtcatggtgctgtgacggtggcacagacagcattacaagcgggggctagttgtttgggtgtcgccactgttccagagggtattcaattgcgagaggccggtattcaagcgcccattttgattttaggggctacccatacaccagaacaaattcaggcgatcgctcaatggcaactccaagcaactattggtagtcccaaacaagctttaatattttccaataccttggaaaccatccagcatgattctcctatacctgtacatattaagttagatacgggtatgtctagactgggtactaactggcaacaagcaggggagtttgtacagttagtagagcgtttaccccatttggatattgctagtgtttactcccacctagcgaccgcagatagcccagatccagggattatggaagaacagcatagaagatttgaggaggcgatcgctcaaatcaaaactttgggtattaaaattcctagcctgcatttagcaaactcggctgcaaccctggcagatccgagattacactatgatatggtacgggtaggtttagccgtgtatggactctatccagcccctcatttacagaataaaatcagcctaaaaccagtcatccaagtccaagcgcgaattacccacgtcaaaacaattgctgccggtactggcgtaagctacggacaccaatttatagcccctcatgaaatgcgccttgccgttgtgagtattggttacgctgatggcgtaccgcgtaatctatccaacaaaatgcaggttttaattcgtggtcaacgagtgccacaaatcggtgctatcacgatggatcagttgatgatagatgctagtgctttaccagacctacaagaaggggaaattgtcaccttacttgggaaacaaggaaaggaaaaaatcacagccgatgattgggcagaagcgttaaacactatttcctgggaagttctttgtggatttaaacatcgcctacctcgtgtaggcgtgatgtga

SEQ ID NO: 32881 - protein, 401 aa, Nostoc sp. PCC 7120
MIRGSEMLSRQQASSMASHQQCDTYAWFSQRAWVEIDLEALSHNVQQLKQFLSPRTQLMAVVKADAYGHGAVTVAQTALQAGASCLGVATVPEGIQLREAGIQAPILILGATHTPEQIQAIAQWQLQATIGSPKQALIFSNTLETIQHDSPIPVHIKLDTGMSRLGTNWQQAGEFVQLVERLPHLDIASVYSHLATADSPDPGIMEEQHRRFEEAIAQIKTLGIKIPSLHLANSAATLADPRLHYDMVRVGLAVYGLYPAPHLQNKISLKPVIQVQARITHVKTIAAGTGVSYGHQFIAPHEMRLAVVSIGYADGVPRNLSNKMQVLIRGQRVPQIGAITMDQLMIDASALPDLQEGEIVTLLGKQGKEKITADDWAEALNTISWEVLCGFKHRLPRVGVM

SEQ ID NO: 32882 - DNA, 1200 bp, Brucella melitensis 16M
  CDS (1)..(1200): transl_table=11
atggttgagatgtctttacctttttctcaggatgagcgcgatctcgcggctggcggcatattgaccattgatctcgcagccctgcgccacaattattcagccatcgcaacccgcattgccccaacccgtacggccgctgtggtaaaggcagacgcctatggcctgggcgcaagccgggtcgcaccggctttctacgaggccggttgccgcgatttcttcgttgcacatcttggcgaagcagtggcgctgaagccctttttgaaacccgacgcaacactttatgtcctgaacggccttcagcccggaacggaagcagcctgtgcccgcgaaggcatcctgcctgttctcaattcgctggaacaggttgaaaactgggcagcactcgccacccggctgggcaaaaaactgcccgccctgctccagttcgataccggcatgtctcgtcttggcctgtcagccaaggaatttgaccgccttcttgagaacgtcacgctcctgagcaggatcgacatcaaattcgccatcagccatctggcaaacggcgacgagccgggaaatgcggtaaatgcccgtcagcttgccaagatgacggccttgctcgctcgcctgccgaaactgccggctgccttggccaattccggcggcaccttcctcggcaagacctattatttcgatctcgcccgccccggcatcgcgctatatggcatcgatccggagaggcagcatgacttttcggataaggtggcgcacgagaataagaaacccaagcattcgatccttcccgtcctcaccctttcggcgcgtgtcattcaggtgcgcgacgtcgacaagggagcgacagttggctatggcggcacctatgtcgccaacggcccgatgcggattgcgacgattgcggtcggctatgctgacggcttgttccgttccttgagtaacaagggcgcagcctttttcggcgatacgcgcctgcccatcatcgggcgcgtatcgatggattcgatcacgctcgacgtcacctcattgccggagggaacgctgaaactcggcagccttgtggaattgatcggcccgcatcagcgcctcgaagacgtggcgcgggactgcgacactatcccctatgaaattctgactgcgcttggcaaccgttatgcgcgcgtttacgtttacgtgaatggcggtggcaccagcacaacagcataa

SEQ ID NO: 32883 - protein, 399 aa, Brucella melitensis 16M
MVEMSLPFSQDERDLAAGGILTIDLAALRHNYSAIATRIAPTRTAAVVKADAYGLGASRVAPAFYEAGCRDFFVAHLGEAVALKPFLKPDATLYVLNGLQPGTEAACAREGILPVLNSLEQVENWAALATRLGKKLPALLQFDTGMSRLGLSAKEFDRLLENVTLLSRIDIKFAISHLANGDEPGNAVNARQLAKMTALLARLPKLPAALANSGGTFLGKTYYFDLARPGIALYGIDPERQHDFSDKVAHENKKPKHSILPVLTLSARVIQVRDVDKGATVGYGGTYVANGPMRIATIAVGYADGLFRSLSNKGAAFFGDTRLPIIGRVSMDSITLDVTSLPEGTLKLGSLVELIGPHQRLEDVARDCDTIPYEILTALGNRYARVYVYVNGGGTSTTA

SEQ ID NO: 32884 - DNA, 1053 bp, Clostridium perfringens str. 13
  CDS (1)..(1053): transl_table=11
atgagtaattatttttggtgcgatgtaaatttaaaaaatatagagaataatataaatgtaataagagatttaatacaaaataaaaagctgattgcagttataaagggagatgcttatggattaggcagtaaagaaattgctgaatttatagaagataaggttgacataatagcagtaggtaatattgatgaaagcttatgcttagataatattaataaggatatacttatcttatcacctttatgtacaaaagatgattttaaagatgaaagagataatttaatattaactttagataatgaggaaatattaaatgaattagataaggaaacaaagaaaagagtacatatatatgtagatacaggtatgaacagaatgggtataaagcctaacaagttagattcatttatagaaagagttaaaaatgaatttcctaaccttgaaatagatggtatctatactcatttacataatgctaaggatgttaattataccttaaaacaaatagaattatttaaatctacagttgaaaagtataaagataaagtaagaataatacactgcatggcgtcaagtgctgttgtaaatgatcaattaagaaaagcatgtgattttactacaggggcaagagccggtaatgtgctttatggatatataggctttaataaaggaattaaaaaaacttatgaatactatgcaaaaccagtaaatacctataaagtttcaaagggacaaactgtaggatatggttgtctttttaaggcagataaggatatggaaataggaataattgaatgtggtaatgttcatggcttaggcataagtagagaaattaaaaataatgttttctatgatatatttagaatgatttatagaagatttaaagagagaagtgtaatatttaataacaatgtacctgtaaaaatattaggaaaagtaaatatgaatataactattatttctatggaaaactgctctaaagattcagttttaaaagttgatatttcacctataatatcagattcaagcatagaaaaaagatatatttattag

SEQ ID NO: 32885 - protein, 350 aa, Clostridium perfringens str. 13
MSNYFWCDVNLKNIENNINVIRDLIQNKKLIAVIKGDAYGLGSKEIAEFIEDKVDIIAVGNIDESLCLDNINKDILILSPLCTKDDFKDERDNLILTLDNEEILNELDKETKKRVHIYVDTGMNRMGIKPNKLDSFIERVKNEFPNLEIDGIYTHLHNAKDVNYTLKQIELFKSTVEKYKDKVRIIHCMASSAVVNDQLRKACDFTTGARAGNVLYGYIGFNKGIKKTYEYYAKPVNTYKVSKGQTVGYGCLFKADKDMEIGIIECGNVHGLGISREIKNNVFYDIFRMIYRRFKERSVIFNNNVPVKILGKVNMNITIISMENCSKDSVLKVDISPIISDSSIEKRYIY

SEQ ID NO: 32886 - DNA, 1239 bp, Thermosynechococcus elongatus BP-1
  CDS (1)..(1239): transl_table=11
gtgatatacattgaatcacagactctcagtggctgtagggttagtcattccctacgcgggagttatggtgtgaggatagaaacaacaatgctcagtcaagaacagctcaccagttcccatgagtgtgagcgggcatggattgaaattgatttggcagcattggccgctaatacgcgcagcttgcgtcagtggctagcaccgacaacggaacttttagccgtggtgaaggcagatgcctatggtcatggtgcgctcactgtggcacagacggttttagcccacggtgcgacgtggctaggggtggcaacgattccggaagggattgctctacggcaggcagggattacagcgcctattttggtcttgggatccgtcaatttgcccgtccaagtccagatgatggcccagtggcagcttcagcctaccctctctacacccaagcaagccctgattttctccgactacgccgatcgcctgcgcgaaccccttgatgtccatttgatgattgatacgggtatgtctcgcttgggctgtccctggcaggatgcggtgggttttgtgcagtttgtgcagcggctacctcacctgcgcattcaggggatttactcccactttgccagtgccgatgatccggatgccagtttgatgcggcagcagcaggcctactttgaacaggtatgggaacaaatttccgccctgggtttaggccctgtgcgccgtcacatggccaattcggcagcaacattggccaaccgcagtagtcactacgacatggtgcgcattggtttgagcctctacggcgtgtatcctgcgtcccatttacggggtgtcgtgcccctgcgaccagtcatgcaggtgcgatcgcgcattaccctcttgaaagagattcccgctgggacaggcattagctacggtcatcaatttattgcccctcagccgatgaaaattgccgttgttggcattggctatgccgatggggtgccgcgtcttctttccaacaagctcgaagtcctagtccagggaaaacggctgcgccaagtgggggcaattacgatggatcaactcatgattgatgtcagtgatatggatggcttacaggagggagatgtggtcaccctccttggggaagatggcggcgactgcctgacggtggagacttgggcggaagccctcggcacaattacctgggaaattctctgcggcttcaagaaccgcttgccgcgtattcctgtctcctaa

SEQ ID NO: 32887 - protein, 412 aa, Thermosynechococcus elongatus BP-1
MIYIESQTLSGCRVSHSLRGSYGVRIETTMLSQEQLTSSHECERAWIEIDLAALAANTRSLRQWLAPTTELLAVVKADAYGHGALTVAQTVLAHGATWLGVATIPEGIALRQAGITAPILVLGSVNLPVQVQMMAQWQLQPTLSTPKQALIFSDYADRLREPLDVHLMIDTGMSRLGCPWQDAVGFVQFVQRLPHLRIQGIYSHFASADDPDASLMRQQQAYFEQVWEQISALGLGPVRRHMANSAATLANRSSHYDMVRIGLSLYGVYPASHLRGVVPLRPVMQVRSRITLLKEIPAGTGISYGHQFIAPQPMKIAVVGIGYADGVPRLLSNKLEVLVQGKRLRQVGAITMDQLMIDVSDMDGLQEGDVVTLLGEDGGDCLTVETWAEALGTITWEILCGFKNRLPRIPVS

SEQ ID NO: 32888 - DNA, 1101 bp, Streptococcus agalactiae 2603V/R
  CDS (1)..(1101): transl_table=11
atgatttcaagttatcatagaccaaccagagccttgatagatttagaggcgattgcaaataacgttaaatctgtacaagagcacattccaagtgataaaaaaacatttgctgtagttaaggctaatgcttatgggcatggtgctgttgaagtttcaaaatacattgagtctattgtagatggtttttgcgtatccaatttagatgaggctattgagctacgtcaagcaggaattgtaaaaatgatattggtattaggtgttgttatgcctgagcaggttatactagccaaaaatgaaaatattactctaacagttgctagcttggagtggttacgtttatgtcagacatcagcagtagatttatctggtctagaagtacatatcaaagttgatagtggaatgggacgtataggtgttcgccagttagatgaaggaaataagctaatttctgaattgggggaaagtggtgcctctgtcaaggggattttcacccattttgcaacagctgatgaagccgataactgtaaattcaatcaacaacttactttttttaaagactttatttcaggattagataattgtccggaccttgttcatgctagtaattctgctacaagcctttggcatagtgagacaatttttaatgccgttagattgggtgttgttatgtacggcttaaatccaagtggaactgatttagacttaccttaccctataaaccctgctttaagtttagagtctgagctagtacatgttaaacaactacacgatggttctcaagttggctatggcgcaacctatcaagttactggagacgaatttgttggaacagtaccgattggctacgctgatggatggacacgagatatgcaaggattttcagttatagtaaatggagaactttgtgaaattattgggcgtgtctcgatggatcaaatgactatccgtttacctcaaaaatatactatcggaactaaagtaaccttgattggtcaacaaggtagttgtaacattacaactacggacgtcgctcaaaaaagacagacgattaattatgaagtactttgtcttttaagcgatcgtattccgagatattattaa

SEQ ID NO: 32889 - protein, 366 aa, Streptococcus agalactiae 2603V/R
MISSYHRPTRALIDLEAIANNVKSVQEHIPSDKKTFAVVKANAYGHGAVEVSKYIESIVDGFCVSNLDEAIELRQAGIVKMILVLGVVMPEQVILAKNENITLTVASLEWLRLCQTSAVDLSGLEVHIKVDSGMGRIGVRQLDEGNKLISELGESGASVKGIFTHFATADEADNCKFNQQLTFFKDFISGLDNCPDLVHASNSATSLWHSETIFNAVRLGVVMYGLNPSGTDLDLPYPINPALSLESELVHVKQLHDGSQVGYGATYQVTGDEFVGTVPIGYADGWTRDMQGFSVIVNGELCEIIGRVSMDQMTIRLPQKYTIGTKVTLIGQQGSCNITTTDVAQKRQTINYEVLCLLSDRIPRYY

SEQ ID NO: 32890 - DNA, 1359 bp, Bifidobacterium longum NCC2705
  CDS (1)..(1359): transl_table=11
atgagcatgaacgcagcacctgaaatcgcattctcgtccgagcagggcaaggccaactatgcggccgcccgccgccaataccccgcacaggccatcgtggacctcaaaaccatgcgcgacaacatggcccacctggtctccgtggtcggcgggcccgcttccggcacggcggtgatgggtgtggtcaaggccgacgcctacggccacggactgctgcccgccgccctggccgcgctcgccggcggcgccacatggctcggcaccgcgcagtcgcacgaagcgttgctgctgcgcaagctcggcatcggccccgaccgctgccatattttgacttgggtatacaacggcaccgaagtcccgttcgacgagctgatcgccgccgacatcgacgtatcggtcggctccctgcccggcatcgacgcggtggccgccgccgcacgcaggctcggcaagcccgcccgcgtacacgtcaaggtcgattccggcttcggtcgcaacggtttcacgccggccggattcgacgccgcgctcgccaaactcgtgccgctcgccaaagagggcgtgttgcatattgtgggtcagtggagccatctcgccgtggccgattcgcctgatgtgcccgaattcgtgtcctccaccgaccgccagatcgaaacattcaaggacttcacgcgccgcatggaacaggccggcattccgccggagatccgtcacctggccaacacggcggccactttggaccgcccggagattcacttcgaacttacccgccccggcatcggcctgtacggctacgagcccgatcccgcgatgggcaccccgcgcgactggcatctgaccccggccatgcgcctgcaggcgcagctcggcacggtcaaggatgtggaggccggccatggcatctcttatggccgcacctacctgaccccggacaacacctcgaccgctattgtgccgctgggctacgccgatggcatccaccgctccgcttccggtttcgatatggaaggtgccaagcacgtggagaagccgggcggcccggtgcgcatcatgaccactgaaggtccgaagctctaccgcgtgtgcggccgcgtgtgcatggaccagttcatcgtggacctgcacggatccgccgccgaactcggcgttcacgagggcgacacggtcgaactgttcggcccgggccgcggcgaggattacgttgagcctaccgccgacgattgggcccgcgccgccgacaccatcagctacgagatcttcacctgcctgcgcaaccgcatcccgcgcctttacgagcatgccgccgaagtactgcccgccgccgacctcgccaagctcgaccccgccacgctgctataa

SEQ ID NO: 32891 - protein, 452 aa, Bifidobacterium longum NCC2705
MSMNAAPEIAFSSEQGKANYAAARRQYPAQAIVDLKTMRDNMAHLVSVVGGPASGTAVMGVVKADAYGHGLLPAALAALAGGATWLGTAQSHEALLLRKLGIGPDRCHILTWVYNGTEVPFDELIAADIDVSVGSLPGIDAVAAAARRLGKPARVHVKVDSGFGRNGFTPAGFDAALAKLVPLAKEGVLHIVGQWSHLAVADSPDVPEFVSSTDRQIETFKDFTRRMEQAGIPPEIRHLANTAATLDRPEIHFELTRPGIGLYGYEPDPAMGTPRDWHLTPAMRLQAQLGTVKDVEAGHGISYGRTYLTPDNTSTAIVPLGYADGIHRSASGFDMEGAKHVEKPGGPVRIMTTEGPKLYRVCGRVCMDQFIVDLHGSAAELGVHEGDTVELFGPGRGEDYVEPTADDWARAADTISYEIFTCLRNRIPRLYEHAAEVLPAADLAKLDPATLL

SEQ ID NO: 32892 - DNA, 1170 bp, Leptospira interrogans serovar Lai str. 56601
  CDS (1)..(1170): transl_table=11
ttgcaagacattaattctggtagtagttcaatgaaagatacctattcttcctggattgaaatttcgaaacgttctctgagtaacaatttagataactttcgatccattttacgtcccaactctacattgaccgcaattttaaaatccaacgcatacggtcacggtatcgaacctatgaccagactttgtattgaagcggggatttcacgcatcggagtcaactcaatcgaagaagcgcttcttatccgtaacatcgattctaaaattccaattttgatcatgggagaaattcaaaatccagaaaaaagaaaggacgtgttatctgatcccaatttctggatcgttttttcaagaccggaaacagctcgtatactttcttcctttttacccgctcctaaacttcatctcaaaattgataccggtatgggtagactagggagtcacggagaaactttaaaacagacgttaagcgaattgaagaacgtaggaattacacttggcggtatctgcacccattttgctagtacggaagacgtattagaacataaatattctcttatgcagactcaaaagttcgaagaagcaatttttcttgctaagtcctttggttataatcatttaatccgacatgcctgcgcctcagcttctacgatgttgtttccaaatgctcattttgatatggtacgaatcggtatctctttgtatggtctttggcctagtattcagaccagactctctttaaaccttactggaaataaaaactttcaactaaaccccattctttcttggaaatccagaatcgttcatatccaatatcatcctgcagacagttatatcggttacggctccacatttcaaacttcgtatcctacaaaagttgctatcgttcctgttggttattacgaaggtctggatcgaaaactttctagcaacggtgatatgttggttcttggtaaaaaagccagaattatcggtcgtatttgtatgaatatgactatgttagacgttactcatattcctggcgcggaagtaggtagtattgttacgattataggacaagacggagaagaatctatcaccgcagacgatttagcagatagaactcataccattaactacgaggtcatgaccagaatcagcgaatctattcccaggattgtagtagactag

SEQ ID NO: 32893 - protein, 389 aa, Leptospira interrogans serovar Lai str. 56601
MQDINSGSSSMKDTYSSWIEISKRSLSNNLDNFRSILRPNSTLTAILKSNAYGHGIEPMTRLCIEAGISRIGVNSIEEALLIRNIDSKIPILIMGEIQNPEKRKDVLSDPNFWIVFSRPETARILSSFLPAPKLHLKIDTGMGRLGSHGETLKQTLSELKNVGITLGGICTHFASTEDVLEHKYSLMQTQKFEEAIFLAKSFGYNHLIRHACASASTMLFPNAHFDMVRIGISLYGLWPSIQTRLSLNLTGNKNFQLNPILSWKSRIVHIQYHPADSYIGYGSTFQTSYPTKVAIVPVGYYEGLDRKLSSNGDMLVLGKKARIIGRICMNMTMLDVTHIPGAEVGSIVTIIGQDGEESITADDLADRTHTINYEVMTRISESIPRIVVD

SEQ ID NO: 32894 - DNA, 1077 bp, Shewanella oneidensis MR-1
  CDS (1)..(1077): transl_table=11
ttgaaaccttttccccgagcagaaattagcagtagtgcactgcaaaacaacctcgccgttttacgccagcaggcgagcagcagtcaagtcatggccgtggtgaaagccaatggatatggacatggattattaaatgttgccaaatgcttaaacaatgccgatggtttcggcttagctcgtttggaagaggcattagagctgcgcgcaggtagtgttaaggcgcgcttattattgcttgagggtttttttcgcagcaccgacttacctttgctggtggagcacgatattgatactgtggtgcatcacgaatcgcaaatcgagatgttagaacaggcgacactatcgaaaccagtgacagtatggttgaaagtcgattcggggatgcatcgtttaggggtcacgcctgaacagttctcagcggtttatgcgcgtttgacggcctgtaaaaatgtcgccaagcctatccatctgatgacccactttgcctgtgccgatgagcccgacaatcattacactcaagtgcaaatgcaaacctttaaccagttaactgcagatttacctgggtttagaaccttagcgaactcggcgggtgcgctttattggccgaagagccaaggtgattggatccgtccaggcattgcgatgtatggtgtgtcacccgttactggggattgcggcgcaaatcatggtttgatccctgcaatgaacttggtttcacgtttgatagcggtgcgcgagcacaaagcgaatcaacccgtaggttatggttgttactggaccgccaaacaagatactcgtcttggcgttgtcgcgattggttatggtgatggctatccacgtaatgcgccggaaggcacgcctgtatggataaatggccgcagagtgccgattgttggccgggtatctatggatatgttaacagtggatttaggccatgatgcaacagatcaagtcggtgatgatgttttgctttggggtcaggctttacctgttgaagaagtcgctgagcatattggtactatcgcctatgagttagtgactaagctgactccgagagtcgctgtttgcttagcatag

SEQ ID NO: 32895 - protein, 358 aa, Shewanella oneidensis MR-1
MKPFPRAEISSSALQNNLAVLRQQASSSQVMAVVKANGYGHGLLNVAKCLNNADGFGLARLEEALELRAGSVKARLLLLEGFFRSTDLPLLVEHDIDTVVHHESQIEMLEQATLSKPVTVWLKVDSGMHRLGVTPEQFSAVYARLTACKNVAKPIHLMTHFACADEPDNHYTQVQMQTFNQLTADLPGFRTLANSAGALYWPKSQGDWIRPGIAMYGVSPVTGDCGANHGLIPAMNLVSRLIAVREHKANQPVGYGCYWTAKQDTRLGVVAIGYGDGYPRNAPEGTPVWINGRRVPIVGRVSMDMLTVDLGHDATDQVGDDVLLWGQALPVEEVAEHIGTIAYELVTKLTPRVAVCLA

SEQ ID NO: 32896 - DNA, 1116 bp, Streptococcus mutans UA159
  CDS (1)..(1116): transl_table=11
atgattgctagttaccatcgtccgacgacagctttagttcatttagatcgtatcaaatttaatatcgaacaagttcaacaccatattccaaaatcagccaaaacttttgctgtggttaaagccaatgcctatggacatggtgctgttcaggtggctcaagccattcaaaagcaagttgacggtttttgtgtttctaatttagatgaggccttggaattgcgtcaggctggtctaaatgattttattttaattttgggtgtccttcttcctgaggaagttgccttggctaaaaaagaaaatattactattacagttgctgacttagattggtttgataaagtacagacagaaaacattgatttagctggtctttcagtacatgtaaaagtcgattctggtatgggaagaattggagttcgcagtactgcagaagcgaatcagcttattgcaggtttgcagaaggcgggagcgactgttaatggtatctttacccattttgcaacagcagatgaagcttctactgttaaattcagtcaacagttagagatgtttaccacccttatcagtcaattggattacaaacctcaaacagtacatgcttctaactctgctacaagtatttggcatagtgatacagtaatgaatgctgttcgcctgggaatagtgatgtatggactcaatcctagtggcaatgcacttgaattaccttatgaagtaaagccagcattagagttgacatccgctcttgttcaggtcaaagaagtgcaagctggtgatacagttggctatggtgcgacttatactgccagtcaggctgaaattattggaaccgtccctgttggttacgctgatggttggacaagagatttgcaaggttttcatgttttggtgaatggtcactattgtgaaattgtggggcgtgtgtccatggatcaaatcactattcgcttacccaaagcttatcctttagggaccaaagtcaccttaattgggcaggatggtcatgaaacgatttcagcaacagatgtcgctgaaaaacgagagacgattaattatgaagtgctctgtttgatcagtgaccgagttcctcgaaaatatgataaaaagttcagttaa

SEQ ID NO: 32897 - protein, 371 aa, Streptococcus mutans UA159
MIASYHRPTTALVHLDRIKFNIEQVQHHIPKSAKTFAVVKANAYGHGAVQVAQAIQKQVDGFCVSNLDEALELRQAGLNDFILILGVLLPEEVALAKKENITITVADLDWFDKVQTENIDLAGLSVHVKVDSGMGRIGVRSTAEANQLIAGLQKAGATVNGIFTHFATADEASTVKFSQQLEMFTTLISQLDYKPQTVHASNSATSIWHSDTVMNAVRLGIVMYGLNPSGNALELPYEVKPALELTSALVQVKEVQAGDTVGYGATYTASQAEIIGTVPVGYADGWTRDLQGFHVLVNGHYCEIVGRVSMDQITIRLPKAYPLGTKVTLIGQDGHETISATDVAEKRETINYEVLCLISDRVPRKYDKKFS

SEQ ID NO: 32898 - DNA, 1104 bp, Corynebacterium efficiens YS-314
  CDS (1)..(1104): transl_table=11
atgaatctgctcaccacccgcatcgatctggacgccatcgcccacaacacccgtctgctgaagaaccgggtgggcgcggcgaaactgatggcggtggtcaaggcggacgggtacaaccacggcatggaccgggtcgccccggtcatggcggccaacggtgcggatgcgttcggggtggccaccatcgccgaggccctggcattgcgcgccaccggcatcaccacgccgatcctgtgctggatctggtccccggaacaggactgggctgccgccgtcgaggcgggcatcgacctcgcggtgatctccccgcggcacgcccgggtgcttgtcgacgcaccccccacctcccgggccatccgcgtcagcgtcaaggtggacaccgcgctgcaccgttccggtgtggatgaacaggactgggacgcggtgttcaccctgctccgcgactgcgggcacatcgaggtcaccgggttgttcacccacctgtcctgcgccgatgaacccggcaacccggagaccgaccaccaggcggagaccttccggcgggccatcgaccgggcccgcgccctgggcctggaggtgccggagaaccacctgtgcaattccccggccacgctcacccgcccggatctgcacatggacatggtccgcccgggtgtggccctgtacggtctggaacccatcccgggcctggaccatggtctgcggccggcgatgacgtgggcgggggcgatcaccgtcgtcaagcccatcagaaagggtgaggggacctcctacgggctgacctggcgcgccgaggcggacgggttcgtggcggtggtgccggcaggctatgccgacggtgtgccccgtgcggcccaggatcacctgcgggtccacgtcaacggtcatgactacccacaggtggggcgggtgtgcatggatcagttcgtcatcttcctgggtgataatccccacggcgtgaccgccggtgatgaggcggtcatcttcggcggcaccggcatgtccgccaccgagcttgccgacgccctggccaccatcaactatgaggtcatctgccggcccaccggccgcacagtccgcgactacacaggagaaggcaaatga

SEQ ID NO: 32899 - protein, 367 aa, Corynebacterium efficiens YS-314
MNLLTTRIDLDAIAHNTRLLKNRVGAAKLMAVVKADGYNHGMDRVAPVMAANGADAFGVATIAEALALRATGITTPILCWIWSPEQDWAAAVEAGIDLAVISPRHARVLVDAPPTSRAIRVSVKVDTALHRSGVDEQDWDAVFTLLRDCGHIEVTGLFTHLSCADEPGNPETDHQAETFRRAIDRARALGLEVPENHLCNSPATLTRPDLHMDMVRPGVALYGLEPIPGLDHGLRPAMTWAGAITVVKPIRKGEGTSYGLTWRAEADGFVAVVPAGYADGVPRAAQDHLRVHVNGHDYPQVGRVCMDQFVIFLGDNPHGVTAGDEAVIFGGTGMSATELADALATINYEVICRPTGRTVRDYTGEGK

SEQ ID NO: 32900 - DNA, 1230 bp, Pseudomonas putida KT2440
  CDS (1)..(1230): transl_table=11
atgccctttcgccgtacccttctggctgcatccctggcacttctgatcaccggacaggcccccctgtatgcggcaccaccgttgtcgatggacaacggcaccaacaccctgaccgtgcaaaacagcaatgcctgggtcgaagtcagcgccagcgccctgcagcacaacatccgcacgctgcaggccgagctggccggcaagtccaagctgtgcgccgtgctcaaggccgatgcctatggccacggtatcggcctggtaatgccatcgatcatcgcccaaggcgtgccctgcgtggcggtggccagcaacgaggaggcccgcgtggtccgcgccagtggcttcaccgggcaactggtgcgggtacgcctggccagcctcagcgagctggaagatggcttgcagtacgacatggaagagctggtgggcagcgcggaatttgcccgccaggccgatgccatcgccgcgcgccatggcaagaccttgcgcattcacatggcgctcaactccagcggcatgagccgcaacggggtggagatggccacctggtccggccgtggcgaagcgctgcagatcaccgaccagaagcacctcaagctggtcgcgctgatgacccacttcgccgtggaagacaaggacgatgtacgcaagggcctggcggcattcaacgagcagaccgactggttgatcaagcacgccaggctggaccgcagcaagctcaccctgcacgccgccaactcgttcgctacgctggaagtgccggaagcgcgcctggacatggtacgaacgggtggcgcgctgttcggcgacaccgtgccggcgcgcaccgagtacaaacgtgcgatgcagttcaaatcgcacgtggcggcggtgcacagctatccggccggcaacaccgtgggctatgaccgcaccttcaccctggcccgtgattcgcggctggccaacattacggtcgggtactccgatggctaccgccgggtattcaccaacaagggccatgtgctgatcaacggccaccgtgtgccggtcgtgggcaaggtgtcgatgaacacgctgatggtcgatgtcaccgacttccctgatgtgaaggggggtaacgaagtggtgctgttcggcaagcaggccgggggcgaaatcacccaggccgagatggaagaaatcaacggcgcgttgctcgccgatttgtacaccgtatggggcaattccaacccgaagatactcgtcgactga

SEQ ID NO: 32901 - protein, 409 aa, Pseudomonas putida KT2440
MPFRRTLLAASLALLITGQAPLYAAPPLSMDNGTNTLTVQNSNAWVEVSASALQHNIRTLQAELAGKSKLCAVLKADAYGHGIGLVMPSIIAQGVPCVAVASNEEARVVRASGFTGQLVRVRLASLSELEDGLQYDMEELVGSAEFARQADAIAARHGKTLRIHMALNSSGMSRNGVEMATWSGRGEALQITDQKHLKLVALMTHFAVEDKDDVRKGLAAFNEQTDWLIKHARLDRSKLTLHAANSFATLEVPEARLDMVRTGGALFGDTVPARTEYKRAMQFKSHVAAVHSYPAGNTVGYDRTFTLARDSRLANITVGYSDGYRRVFTNKGHVLINGHRVPVVGKVSMNTLMVDVTDFPDVKGGNEVVLFGKQAGGEITQAEMEEINGALLADLYTVWGNSNPKILVD

SEQ ID NO: 32902 - DNA, 1074 bp, Pseudomonas putida KT2440
  CDS (1)..(1074): transl_table=11
atgcgtcccgcccgcgccctgatcgacctccaggccctgcgccacaactaccgtctggcccgtgaactgacgggtgccaaagccctcgccgtgatcaaggccgatgcctacggccacggcgccgtgcgctgcgccctggccctcgaggccgaagccgacggctttgccgtggcctgcatcgaagaggcgctggaactgcgcgccgccggtatcaaagccccggtactgctgctggaaggtttttttgaagccagcgaactggcgctgatcgccgagcacgacctgtggtgcgtggtgcactcgctgtggcaactggaagccatcgagaaaaccccgctgcacaaaccgctcaacgtctggctgaagctggacagtggcatgcaccgcgttggcctgcaccccaaggactaccacgatgcctaccagcgactgctggccagcggcaaggtttcgcgcatcgtgttgatgacccacttcgctcgcgccgacgaactggacgctgacgctacctcccagcaaatcgccgtgttcgaagctgcccgacagggcctggccgccgaatgcagcctgcgtaactcgcccggcgtgctgggctggccgcaagcgcccagcgactgggtgcgcccaggcctgatgctgtacggcgccacgccgttcgaagtggcgcaggccgaggccgcacgcctgcaaccggtgatgaccctgcaatcgcgggtgatcagcgtgcgcgagctgcctgccggcgagccggttggctatggtgccaagttcgtcagccctcggccgacccgcgtgggtgtggtcgccatgggctatgccgatggctacccgcgccaggcgcctaacggcaccccggtgctggtcgctggcaagcgcacccagctgatcggccgggtgtcgatggacatgctcagcatcgacctcaccgacgtaccgcaagccactgtcggcagcccggtcgaattctggggcaagcaggtgctggccagtgaagtggccgcgcatgcgggcactattccctatcagatcttctgtaacctgaagcgggtaccacgggactacatcggcgaatga

SEQ ID NO: 32903 - protein, 357 aa, Pseudomonas putida KT2440
MRPARALIDLQALRHNYRLARELTGAKALAVIKADAYGHGAVRCALALEAEADGFAVACIEEALELRAAGIKAPVLLLEGFFEASELALIAEHDLWCVVHSLWQLEAIEKTPLHKPLNVWLKLDSGMHRVGLHPKDYHDAYQRLLASGKVSRIVLMTHFARADELDADATSQQIAVFEAARQGLAAECSLRNSPGVLGWPQAPSDWVRPGLMLYGATPFEVAQAEAARLQPVMTLQSRVISVRELPAGEPVGYGAKFVSPRPTRVGVVAMGYADGYPRQAPNGTPVLVAGKRTQLIGRVSMDMLSIDLTDVPQATVGSPVEFWGKQVLASEVAAHAGTIPYQIFCNLKRVPRDYIGE

SEQ ID NO: 32904 - DNA, 1272 bp, Bradyrhizobium japonicum USDA 110
  CDS (1)..(1272)
atgacaatggcgtccgacccgaaaatgaacccgcaatccggccttctctcagcggaggccaaccatgccgccgcgctcgctgccttcggcggcgtgctcaccgtcgacctcgacgccatcattgccaactggcgcaagctcgagaagacggcggtgccggccgaatgcgcggcggtgatcaaggccgatgcctatggctgcggcgccgcgcaggtcgcgcgtgccctccacaaggccggctgcaagaccttcttcgtcgccaccatcgaggaggcgcgcaaggtgcgcgccgccgtaccggagccgaccatctacgtgctcggcggctatttccagaacaccggcgagcactacgcccagatcaattgccgtccggtgatcggcgatctcaacgagctcgccgaatgggacgtgttctgccgccgcaccggctggaacggaggcgccgctgttcacatcgacaccggcatgaaccggctcgggctgacgcttgcggaagcacaggccatcatcccccgcatcaatgccggcgaccacggcatcacgctggtgatgagccatctggtctcggccgagcagctcaacagccccgtcaatgccaaacagctcgcttccttccgcggcatcgccagcgaattctccggcgtgccggcggcgctcgccaattcgtccggaatcttcctcggggcgccgttccagttcgacctggtgcggccgggcgccgcgctctacggcgtcaacccgacgccggaggccgataatccgatgcagccggtggtcgacctcaaggcgcgcatcgtgcagattcgcaatgtcgagcgcggcgagagcgtcggctatggcggcacctggaccgcgcgccggccgaccaagcttgcaatcatcgcggtcggctatgccgacggctatttccgcgccgccagttcaaacgacggcacgcgcggcgcagaggtgatcgttgccggcaaacgctgcccggttgcaggccgcgtctccatggacctgatcgcgatcgacatcaccgatctgccgccgaacgcggcacggcgcggccacctggtgacgctgatcggcgaaggcatcaccgtcgacgagctcgcgcatcatttcggcacgatcggctatgaggtgctgaccagcctcggccaccgctatgcccgcgtctacaagggcggcaatgtggtggagccgctggcaaagccggcagccgagcagccgtcctctccgccgccggtcgagcagccggcgagcccgccgccgctgccgagctaa

SEQ ID NO: 32905 - protein, 423 aa, Bradyrhizobium japonicum USDA 110
MTMASDPKMNPQSGLLSAEANHAAALAAFGGVLTVDLDAIIANWRKLEKTAVPAECAAVIKADAYGCGAAQVARALHKAGCKTFFVATIEEARKVRAAVPEPTIYVLGGYFQNTGEHYAQINCRPVIGDLNELAEWDVFCRRTGWNGGAAVHIDTGMNRLGLTLAEAQAIIPRINAGDHGITLVMSHLVSAEQLNSPVNAKQLASFRGIASEFSGVPAALANSSGIFLGAPFQFDLVRPGAALYGVNPTPEADNPMQPVVDLKARIVQIRNVERGESVGYGGTWTARRPTKLAIIAVGYADGYFRAASSNDGTRGAEVIVAGKRCPVAGRVSMDLIAIDITDLPPNAARRGHLVTLIGEGITVDELAHHFGTIGYEVLTSLGHRYARVYKGGNVVEPLAKPAAEQPSSPPPVEQPASPPPLPS

SEQ ID NO: 32906 - DNA, 1164 bp, Clostridium tetani E88
  CDS (1)..(1164): transl_table=11
atgtttaaacatttaagacctgtatgggcagaaatagatttagataaattagtttataatatgcaacaaattaaaaatatatgtaaaggtagagaaattatagcagtagttaaagctgatgcttatggtcatggagcattagatattgccccaattctattagaaaatggagctactagattagcagttgcagtattaaatgaagcaatagaacttagaagaggtggaatagatgcacctataatggtgctaggatttacccctgatagtttaattgaaacttctttgaaatataatatagagcaaactgtatatagctatgaaatagcaaaggaaatatctgaagttgctgtgaaatctaatagagtagctaaaattcatatagctttggatacaggcatgggtagaataggatttttaccagataaagaaagcatagataaaatttataaattaagtaaattgcctaatatacagatagagggaatattctctcactttgcctccgctgatgaacaagataaaacttatactaaactacaatttaataaatttctttgggtttgtaatagtttagaagaaagggggatagacataaaaataagacatattgcaaatagtgctgccattatagatatgccagaattacacctagaaggggtaagaccaggtatcataatgtatggatattatccatctagtgaagttaataagggaaaattggacttaaaaccagttatgtctttaaaaactactatagttcatattaaaaatatggaaaaagggaagtatataagttatggaagagaatttaaaacagaaaaggaaagtataatagccaccttaccagtaggatatgctgatggatatagtagatccttatatgataagggaggaaaaattatattaaaagaacaattagctccattagtaggaagaatatgcatggatcaatgtatgatagatgtaagccacatagaagatgtgaaaataggagatgaagtaattcttatgggagagaataaaggtataaaaatgacggcagaagaaataggaaatttattaggaacaattaattacgaagtaacctgcatgataagtaagagggtacctagggtatatatacgagatggaaatatagttggaataagaaattatgtataa

SEQ ID NO: 32907 - protein, 387 aa, Clostridium tetani E88
MFKHLRPVWAEIDLDKLVYNMQQIKNICKGREIIAVVKADAYGHGALDIAPILLENGATRLAVAVLNEAIELRRGGIDAPIMVLGFTPDSLIETSLKYNIEQTVYSYEIAKEISEVAVKSNRVAKIHIALDTGMGRIGFLPDKESIDKIYKLSKLPNIQIEGIFSHFASADEQDKTYTKLQFNKFLWVCNSLEERGIDIKIRHIANSAAIIDMPELHLEGVRPGIIMYGYYPSSEVNKGKLDLKPVMSLKTTIVHIKNMEKGKYISYGREFKTEKESIIATLPVGYADGYSRSLYDKGGKIILKEQLAPLVGRICMDQCMIDVSHIEDVKIGDEVILMGENKGIKMTAEEIGNLLGTINYEVTCMISKRVPRVYIRDGNIVGIRNYV

SEQ ID NO: 32908 - DNA, 1179 bp, Vibrio parahaemolyticus RIMD 2210633
  CDS (1)..(1179): transl_table=11
atgggccaaacagccgcacatgccgctcctctgctagttgattttgatgacagcgagcgcgaagagcgcgttcaggcgagcaacgcttggctggaaattgatactcaggcattttcaaataatattcagttgcttcagaaggatctaaagggcaacactcagatctgtgccatcatgaaggctgacgcgtacggtaacggtatcgcaggcctgatgcctagcatcatcgcgaacaacgttgcatgtgtgggtatcaccagtaatgaagaagctcgcgtagtgcgtgagcatggcttcgaaggcaagatcatgcgtgtccgtgcggctagccgcaacgaaattgaaaacggcgtacagtacgaaatcgaagagctgattggcactaaaatgcaggcggatcaaatcatcgagattgcatacaactacaataccgttattcctgttcaccttgctctgaatacttcaggcatgggtcgtaatggtctggatctgacaacgtatgaaggtcaggttgaaggtgtggaaatcgcaagcgatcctaacctaaaaatcgtaggtatgatgacccacttcccgaatgaaggtcttgatgaaatccgccgcaaggttgaccgtttcaaagtagaaacaaagtggctaatggacagcgcaggtctgaaacgtaaagacatcacactgcacgtggctaactcttacatcacgctaaatctgcctgaagcacatctggatatggttcgtcctggcggcatgctgtacggtgactaccctgcaaccctaccttacgagcgcatcgtgtctttcaaaacacgcatagcatcactgcacttcttccctgcaggcagcacaatcggctacggcagcactaaagttttagagcgtgactctatcctggctaacctacctatcggctactcagacggtttcgcccgttcactaagcaacaaagctgatgttctgatcaacggtcagcgtgctcgcgtaatgggtaaagcgtcaatgaacactactatggttgatgtcactgacatcattggtgtccaggcaaacgacgaagtagttgtatttggccgccaaggctttgaagaaatcacagcagaagaaaccgaagagaaaagcggtcgtattctgcctgagcactacactatctggggtgcaactaaccctcgcgtttaccgttaa

SEQ ID NO: 32909 - protein, 392 aa, Vibrio parahaemolyticus RIMD 2210633
MGQTAAHAAPLLVDFDDSEREERVQASNAWLEIDTQAFSNNIQLLQKDLKGNTQICAIMKADAYGNGIAGLMPSIIANNVACVGITSNEEARVVREHGFEGKIMRVRAASRNEIENGVQYEIEELIGTKMQADQIIEIAYNYNTVIPVHLALNTSGMGRNGLDLTTYEGQVEGVEIASDPNLKIVGMMTHFPNEGLDEIRRKVDRFKVETKWLMDSAGLKRKDITLHVANSYITLNLPEAHLDMVRPGGMLYGDYPATLPYERIVSFKTRIASLHFFPAGSTIGYGSTKVLERDSILANLPIGYSDGFARSLSNKADVLINGQRARVMGKASMNTTMVDVTDIIGVQANDEVVVFGRQGFEEITAEETEEKSGRILPEHYTIWGATNPRVYR

SEQ ID NO: 32910 - DNA, 1116 bp, Enterococcus faecalis V583
  CDS (1)..(1116): transl_table=11
atggtcgttggatggcatcgtcctacacggttacatatcgatacgcaagcaattactgaaaatgtccaaaaggaatgtcaacgtttgccagaaggaaccgctttatttgcggttgtaaaagcgaacggctatgggcatggcgccgtagaatccgccaaagcggcgaaaaaaggtggcgcgacaggtttttgtgtcgccttattggatgaagcaattgaattgagagaagcaggtgttcaggaccccattttaattttgagtgtggtagacttagcttatgtgcctttgttgattcaatatgatttgtctgtaacggtagctacacaagaatggttagaagctgctcttcaacaactaacgcctgagagtaacacgccattacgtgttcacttaaaagtcgatactggcatgggacggattggttttttaaccccggaagagactaagcaagcagtgcggtttgttcaatcccacaaagaatttttatgggaagggatttttactcatttttcaacagctgatgaaatcgatacaagctattttgaaaaacaagcagggcgttttaaggctgttctagcagttttagaagagttacctcggtatgtccatgttagcaatagtgcgacagcgttatggcatcctgatgtgccaggaaacatgattcgctatggggtagccatgtatggattgaacccttcaggtaataagctggccccaagctatgcgttaaagccggccttacggttgaccagtgaactcatccatgtaaaacgcttagcggctggtgaagggattggctatggcgaaacctacgtaactgaagctgaagaatggattgggacagtgccaatcggctatgcagatggctggttgcgtcatctccaaggatttacagtgctcgtgaatggtaagcgttgcgaaatcgtcggacgagtgtgtatggatcaatgtatgattcgtttagcagaagaagttcctgtcggctcagtcgttacattagttggaaaagatggcaatgaagaaaatacgttacaaatggtagccgaaaaattagaaaccattcattatgaagttgcatgtactttctcacaaagaatccccagagaatataactag

SEQ ID NO: 32911 - protein, 371 aa, Enterococcus faecalis V583
MVVGWHRPTRLHIDTQAITENVQKECQRLPEGTALFAVVKANGYGHGAVESAKAAKKGGATGFCVALLDEAIELREAGVQDPILILSVVDLAYVPLLIQYDLSVTVATQEWLEAALQQLTPESNTPLRVHLKVDTGMGRIGFLTPEETKQAVRFVQSHKEFLWEGIFTHFSTADEIDTSYFEKQAGRFKAVLAVLEELPRYVHVSNSATALWHPDVPGNMIRYGVAMYGLNPSGNKLAPSYALKPALRLTSELIHVKRLAAGEGIGYGETYVTEAEEWIGTVPIGYADGWLRHLQGFTVLVNGKRCEIVGRVCMDQCMIRLAEEVPVGSVVTLVGKDGNEENTLQMVAEKLETIHYEVACTFSQRIPREYN

SEQ ID NO: 32912 - DNA, 1095 bp, Coxiella burnetii RSA 493
  CDS (1)..(1095): transl_table=11
gtgaatcgtgcaaccgcgactattaacgtaacggcgttaaagcataatttatctcaaataaaagcattggcgccgaagtctcttgcctgggcgatgattaaaagcaatgggtatgggcacggattggtgagagtggccaaagcgttatcggacgcaaatgcatttggtgtggcgtgtattgatgaagcgttaactttaagagaagtaggcatcaaatcgcctatcattgtaatgaaaggattttataatgaagccgagttgtcccaatttgcccgacatcgattaggcgccgttattcactgctcggatcaagttagccttttagaaaagactaatttaacctcttctttatccgtatggttaaaaatcgatacgggaatgaatcgccttggattttctgtggaacaatcgcccgcggtttataatcaattaaaaacttcttcttccatccaaaaaccgattggactaatgacgcatttagcggatgcagacaacgagaataaaacgtttaccgaattacaaattaaacgctttttctcagttactgaaaagatgattggtcccaaaagtattgtgaattcagcagggttttttgcttatccgaacgccttggtcgattggattcgtcctggcatcatattatatggaatttcaccctttggaattaattataattcctttaaagaaaaaatcgaaaagaaattcagaccggtaatgactttatctgcaaaaataatagcgattaaaaatcgtcgacaaaacgatagcgttgggtacggttgtacttggtcatgtcctgaagatatgccgatagccattgttagcattggttatggcgatggttacccccgccacgcaccgagtggaacgcccgtgttgttgaacgggaaaatatgtcctttaatcgggcgagtatctatggacatgattgctattgacttacgctctcagccaaatgcacaggttggcgatgacgttattttatggggagaagggttgccagtagaaattatcgcagaaaaagcgggtaccatcgcttacgaattattgtgtaaaattacgcaacgcgttcaatttattgagatagaaaaatga

SEQ ID NO: 32913 - protein, 364 aa, Coxiella burnetii RSA 493
MNRATATINVTALKHNLSQIKALAPKSLAWAMIKSNGYGHGLVRVAKALSDANAFGVACIDEALTLREVGIKSPIIVMKGFYNEAELSQFARHRLGAVIHCSDQVSLLEKTNLTSSLSVWLKIDTGMNRLGFSVEQSPAVYNQLKTSSSIQKPIGLMTHLADADNENKTFTELQIKRFFSVTEKMIGPKSIVNSAGFFAYPNALVDWIRPGIILYGISPFGINYNSFKEKIEKKFRPVMTLSAKIIAIKNRRQNDSVGYGCTWSCPEDMPIAIVSIGYGDGYPRHAPSGTPVLLNGKICPLIGRVSMDMIAIDLRSQPNAQVGDDVILWGEGLPVEIIAEKAGTIAYELLCKITQRVQFIEIEK

SEQ ID NO: 32914 - DNA, 1170 bp, Bacillus cereus ATCC 14579
  CDS (1)..(1170): transl_table=11
atggaagaagcaccattttaccgtgacacttgggtggaagtggatttagatgccatttataacaacgttacacatattaaagagttcatcccaagtaatgtagagatttttgctgtagttaaagcaaacgcatatgggcacgattatgtaccggtggctaaaacggcattagaagcaggtgcaacaaggttagctgttgcttttttagatgaagctttagtgcttcggagggctggtattactgagccgattttagtgttaggtccctcgccgccgcgtgatgtaaatgtagctgctgaaaatgatgtagcgctaacggtttttcaaaaagaatgggtggacgaagcaattaaactttgggatggttcatctgtaatgaaattccatattaactttgatagtggtatggggagaattggaatacgtgaaagaaaagagctaaaagaatttttaaagagtttagagggtgcaccgtttttagagttagaaggagtatacacgcattttgcaacggcagatgaagttgagacttcgtattttgataagcaatataacacgttcttagagcagttaagttggttgaaagaattcggagtggatcctaagtttgttcatacagctaatagtgctgcgacgttacgttttcaagggattacatttaatgcagtgcgaattgggattgcaatgtatggattatctccttctgtagaaatacgtccttttttaccatttgaattagaaccggcgctatcacttcatacgaaagtcgctcatattaaacaggtaattaaaggtgatggaattagttataacgtcacctaccgaacgaaaactgaagaatggattgcgactgtagcgattggctatgcagatgggtggcttaggaggttacaaggatttgaagtgcttataaatggtaaaagggtaccgattgtagggcgagtaacaatggatcagttcatgattcatcttccttgtgaagtgccacttggtacgaaagttacgcttattggaaggcaaggagatgagtatattagcgctacagaggttgcggaatactcagggactattaattatgaaattattgcaacgatcagtttccgtgtgccgagaatatttatacggaatggtaaggttgtagagataattaattacttgaacaatatatag

SEQ ID NO: 32915 - protein, 389 aa, Bacillus cereus ATCC 14579
MEEAPFYRDTWVEVDLDAIYNNVTHIKEFIPSNVEIFAVVKANAYGHDYVPVAKTALEAGATRLAVAFLDEALVLRRAGITEPILVLGPSPPRDVNVAAENDVALTVFQKEWVDEAIKLWDGSSVMKFHINFDSGMGRIGIRERKELKEFLKSLEGAPFLELEGVYTHFATADEVETSYFDKQYNTFLEQLSWLKEFGVDPKFVHTANSAATLRFQGITFNAVRIGIAMYGLSPSVEIRPFLPFELEPALSLHTKVAHIKQVIKGDGISYNVTYRTKTEEWIATVAIGYADGWLRRLQGFEVLINGKRVPIVGRVTMDQFMIHLPCEVPLGTKVTLIGRQGDEYISATEVAEYSGTINYEIIATISFRVPRIFIRNGKVVEIINYLNNI

SEQ ID NO: 32916 - DNA, 1227 bp, Bacillus cereus ATCC 14579
  CDS (1)..(1227): transl_table=11
atgaaacgtgaaatagaatggaatgcaattattgagttaggagttagaccaatgagtttgaaatatggaagagatacaattgtagaaattgacttaaatgctgtaaaacataatgtaaaagaatttaaaaaacatgtaaatgatgaagaaattaagatgatggctgctgtaaaagcgaatgggtatggccatggggcagttgaagttgccaaagctgcaattgaagcaggaatacatcaacttgcagttgcatttgtagatgaagcaatagaattaagagaagcaggaattactgtgccgattttaattttaggatacacaccagtagcggctgtagaagatgtaattcaatatgacgttatgatgactgtttatagagtagaagatttacatggtataaatgaaattgcaaaccgtcttcaaaagaaagtacaaattcaagtgaaaattgatacaggaatgagtcgtatcggtttacaagaagaagaagttaaaccatttttagaagaattaaaccgtatggagtatgtagaggtagtagggatatttacgcattactctacggcagatgaaatcgataaatcatatacgaatatgcaaacaagtttatttgaaaaagctgttaatacagcgaaagaattaggaattcaaataccatatattcatagttcaaatagtgcgggatcaatggaattaagtaacacatttcaaaatatggtacgcgttggaataggagtgtacggtatgtatccgtcaaaagaagtggatcattcagtcgtttctttacagcctgcgttgtcgttaaaatcaaaagtagctcatattaaacatgcgaagaagaatcgtggtgtaagttatgggaatacgtatgtaacaactggtgaagaatggattgcgactgtaccaattggttatgctgatggttataatcgtcaattatctaataaaggctatgcgttaattaacggggttcgagtacctgttattggccgtgtttgtatggaccagttaatgttggatgtttcaaaagcgatgccagtacaagtaggagacgaagtagtattctacggtaaacaaggtgaagaaaatatcgcagtagaagaaatagcggatatgttaggtacaataaactatgaagttacatgtatgctagatagaagaattccgcgtgtctataaagaaaatgacgaaacaactgcagttgtaaatatattaagaaaaaactga

SEQ ID NO: 32917 - protein, 408 aa, Bacillus cereus ATCC 14579
MKREIEWNAIIELGVRPMSLKYGRDTIVEIDLNAVKHNVKEFKKHVNDEEIKMMAAVKANGYGHGAVEVAKAAIEAGIHQLAVAFVDEAIELREAGITVPILILGYTPVAAVEDVIQYDVMMTVYRVEDLHGINEIANRLQKKVQIQVKIDTGMSRIGLQEEEVKPFLEELNRMEYVEVVGIFTHYSTADEIDKSYTNMQTSLFEKAVNTAKELGIQIPYIHSSNSAGSMELSNTFQNMVRVGIGVYGMYPSKEVDHSVVSLQPALSLKSKVAHIKHAKKNRGVSYGNTYVTTGEEWIATVPIGYADGYNRQLSNKGYALINGVRVPVIGRVCMDQLMLDVSKAMPVQVGDEVVFYGKQGEENIAVEEIADMLGTINYEVTCMLDRRIPRVYKENDETTAVVNILRKN

SEQ ID NO: 32918 - DNA, 1089 bp, Nitrosomonas europaea ATCC 19718
  CDS (1)..(1089): transl_table=11
atgtcccggccgatccgcgccttcataaattgtgctgctttacggcacaacctcgccgtcgttcgcagacacgttcaccaggctcgtatcatggccgtcgtcaaggctgatgcctatggtcacggtttacttcgtgtcgcccgggcacttgatgctgtcgacggatttgcggtacttgaactggaagcggcgattcagttgagagaagccggattcagccagctcattctgctcctggaaggtttcttttcgatagaggaaattgaagcgatcaatcactacaggctgagcacggtaattcactgtcatgaacagctatcgatgctgctggcccataaaaaaacaggaaaaccggatatcttcctcaaaatcaataccgggatgaaccgtcttggtttcaggcctgaagaaggaaattctgtcttgaacaggctcagacaatggcatacagatatcagtatcacgctgatgacacattttgcctgcgccgatgatttactggaagcagatcatgttgatcagcaactgggcagttttgcacgactcgaggaaaaacgggaaggctgtataccccgaacattggccaattctgctgcaatcctgcgttatcccggaacacatgcagactgggtacgtcccggcataatactctatggcgcctcccctttaccggacaaaacaggtatcgaactcggattacaaccagtcatgactctgaccagccggatcatcgctgtacagcatcttgatttttcggatcgactgggatatggaggacagttcgttgccgatcagccgatgcgtgtcggagtcgttgcagcaggttacgcggacgggtacccgcgccatgctcctaccggaactccggtactggtcaacggccgacgcacacgcttgatcggacgtgtttcaatggatatgttgactgttgatctaagcgggatcaatgaagctggtgcagggagcctggtaaccctttggggtgaagggttaccggtagaagaagttgccagatcagcacaaactatcagttacgagctcctggctgcactttctccgagagtgcaaaccgtgagctctatcccctga

SEQ ID NO: 32919 - protein, 362 aa, Nitrosomonas europaea ATCC 19718
MSRPIRAFINCAALRHNLAVVRRHVHQARIMAVVKADAYGHGLLRVARALDAVDGFAVLELEAAIQLREAGFSQLILLLEGFFSIEEIEAINHYRLSTVIHCHEQLSMLLAHKKTGKPDIFLKINTGMNRLGFRPEEGNSVLNRLRQWHTDISITLMTHFACADDLLEADHVDQQLGSFARLEEKREGCIPRTLANSAAILRYPGTHADWVRPGIILYGASPLPDKTGIELGLQPVMTLTSRIIAVQHLDFSDRLGYGGQFVADQPMRVGVVAAGYADGYPRHAPTGTPVLVNGRRTRLIGRVSMDMLTVDLSGINEAGAGSLVTLWGEGLPVEEVARSAQTISYELLAALSPRVQTVSSIP

SEQ ID NO: 32920 - DNA, 1176 bp, Bacillus anthracis str. Ames
  CDS (1)..(1176): transl_table=11
atgagtttgaaatatggaagagatacaattgttgaagttgacttaaatgcagtaaaacataatgtaaaagaatttaaaaaacgtgtgaatgatgaaaatattgcaatgatggctgctgtaaaagcgaatgggtatggtcatggggcagttgaagttgcaaaagctgctattgaagcaggaataaatcagcttgcaattgcatttgtagatgaagcgatagagttaagagaagcaggaattaacgtgccgattttaattttaggctatacatcagtagcggctgcggaagaagcaattcaatatgacgttatgatgaccgtttatagaagtgaagatttacaaggtataaatgaaatcgcaaaccgtcttcaaaagaaagcgcaaattcaggtgaaaattgatacaggaatgagtcgcattggtttacaggaagaagaggttaaaccatttttagaggaattaaaacgtatggagtatgtagaggtagtgggaatgtttacacattactctacggcagatgaaatcgataaatcatatacgaatatgcaaacaagtttatttgagaaagctgtcaatacagcaaaagaattaggaattcatattccatatattcatagttcaaatagtgcaggttcaatggaacctagcaatacatttcaaaatatggttcgtgtaggtatcggaatttatggaatgtatccttcaaaagaggtaaatcattcagttgtttcgttacagcctgcgttgtcgttaaaatcaaaagtagcccatattaagcatgcgaagaaaaatcgcggtgtaagttatgggaatacgtatgtaacgactggtgaagaatggattgccaccgtaccgattggttatgctgatggttataatcgtcagttgtctaataaagggcatgcattaataaatggagttcgagtacctgttattggccgtgtttgtatggatcagctcatgttagacgtttcaaaagcaatgccagtacaagtgggagacgaagtagtattctacggtaaacaaggcgaagaaaacatcgcagtagaagaaatagcggatatgttaggtacaattaactatgaagttacatgtatgttagatagaagaattccacgtgtgtataaagaaaataatgaaacaactgctgttgtaaatatactaagaaaaaactga

SEQ ID NO: 32921 - protein, 391 aa, Bacillus anthracis str. Ames
MSLKYGRDTIVEVDLNAVKHNVKEFKKRVNDENIAMMAAVKANGYGHGAVEVAKAAIEAGINQLAIAFVDEAIELREAGINVPILILGYTSVAAAEEAIQYDVMMTVYRSEDLQGINEIANRLQKKAQIQVKIDTGMSRIGLQEEEVKPFLEELKRMEYVEVVGMFTHYSTADEIDKSYTNMQTSLFEKAVNTAKELGIHIPYIHSSNSAGSMEPSNTFQNMVRVGIGIYGMYPSKEVNHSVVSLQPALSLKSKVAHIKHAKKNRGVSYGNTYVTTGEEWIATVPIGYADGYNRQLSNKGHALINGVRVPVIGRVCMDQLMLDVSKAMPVQVGDEVVFYGKQGEENIAVEEIADMLGTINYEVTCMLDRRIPRVYKENNETTAVVNILRKN

SEQ ID NO: 32922 - DNA, 1242 bp, Helicobacter hepaticus ATCC 51449
  CDS (1)..(1242): transl_table=11
atgaatatatttaaaactggatttactaccctattacttatgggaatacttgctagtgcaaattttgcctcgcctatacttgttgagagcacaaatgtgaacaaaaacaatacaaactcttttatggaagttgatataaaagcctttaaaaataatatcaaagttgccaaaaaaatagcaggaaatgctaaagtttgtgcagttttaaaagccaatgcttatggggctggaataagcaaagtgttgcccactatcatagaagaaaaaatcccttgtgtggctattacaagcaatgaagaagcaagagttatccgcaaaatgaaatatacaggcgagattctacgaatacgaacagccacaatgggagaaataaaagatggtttaaaatataacatcacagaagttttgggaaatttagatcaagcaaaaaaagtagattctctagcaaagacgataggcaaaaaacttcccattcatatcaaactcaattcaggtggaatggatagaaatggtattgatttaagcactgataaaggcaaagaatctgcagttaagttagctactttgccacatcttaaaataaaagggctaatgacacattttccttatgatgatacctcaaaagtaaaggaaaatttaaaacattttgaagaagatacggattttctaataagtaaagcaaaacttgatagaaataaacttgtgctgcacgctgctgcctcatatgcagcagtgcaagtgcctcaatcaaggttagatatgatacgacccggaaagcttatttatggctatggtggaggagatgaaaatctacccatacaacaaattatgagtttaaaatctcaagtagcagttataaatgaatatccaaaagggagcaaagtaagctatgatggcactcacacacttacaagagattctaaactcgccaatattcctgtgggttattatgatggctatgcaaaatctttaagcaatcaaggaaaagtgcttattagagggcataaagtgccagtcgttgggagagttacaaaaaatacttttatggtagatgtaaccgattatccagatattaaagcaggcgatgaagtcgtgctctttggaaaacaatgcggcaatgaaatcactcaagccgaatttgaaaaaggaacgggcacgattctctctgaaacattaggatattggggaagtgcaaatcctatttttattaaaaattataaaatgaaagaagtatgcaaataa

SEQ ID NO: 32923 - protein, 413 aa, Helicobacter hepaticus ATCC 51449
MNIFKTGFTTLLLMGILASANFASPILVESTNVNKNNTNSFMEVDIKAFKNNIKVAKKIAGNAKVCAVLKANAYGAGISKVLPTIIEEKIPCVAITSNEEARVIRKMKYTGEILRIRTATMGEIKDGLKYNITEVLGNLDQAKKVDSLAKTIGKKLPIHIKLNSGGMDRNGIDLSTDKGKESAVKLATLPHLKIKGLMTHFPYDDTSKVKENLKHFEEDTDFLISKAKLDRNKLVLHAAASYAAVQVPQSRLDMIRPGKLIYGYGGGDENLPIQQIMSLKSQVAVINEYPKGSKVSYDGTHTLTRDSKLANIPVGYYDGYAKSLSNQGKVLIRGHKVPVVGRVTKNTFMVDVTDYPDIKAGDEVVLFGKQCGNEITQAEFEKGTGTILSETLGYWGSANPIFIKNYKMKEVCK

SEQ ID NO: 32924 - DNA, 1161 bp, Prochlorococcus marinus subsp. marinus str. CCMP1375
  CDS (1)..(1161): transl_table=11
ttggctaccacttctatgcctttaaataaaattgatccacgccagagagcttgggtagaggtgtccccagatgcaataaaggcaaatactcttgccattagaagtttattagatgaacagtgcttgttgatggcagttgttaaagcagatggttatgggcatggttctgaaactgttgccgaagctgctttggctggtggtgctactaatttaggagtggcaacattgcaggaagcattggagctaagaaaggcagggattgtttgtccgatacttgttcttggcaatttaattaatcccgaagatttagatgcttgcattcattgggatttaatgcccacattaagcagtgctagagaggccttattgtgcaatcaaattgctgaatctcacgacaaagagttttgtgtccatataaaagttgatacaggcatgacaaggctgggatgcgatttaaggcttgcctcagagctgattcaacttgttgacaaccttaaaaatctttctcttcgaggaatttatagtcatcttgctttggctgatgtagaagcaaatggtcaagcaaattcatttactagcaaacagaaagaaaaatttgaaacacttttgtcaagcgtgatgccaagaggaaagcctctttacaggcatctagctaattcagcaggaactcttagagacaaaggactacattttgatatggttcgagttggcttggctttgtatggttatagccctttaaaagatttaaggaataatttctctttgcagcctgctttggctgttagagcaaaagttactcttttgagagatgttccttctgacacaggagttagttatggccatacttttataacgcagcgccctagtagacttgcagttgtgggaattggatatgctgatggtataagtcgtgcgttatctgggaaaatgtctgtattaattgatggaaagttttatccacaagtgggttcaataacgatggatcaacttgttatagatatcactgaaagtcctcaaatacaaataggatcagttgttactctacttggggttgatggagattcagcgataacaccatatgattggagcgaaataagtggatctattccttgggagattttgtgtagttttaaataccggctgcccagagtggtaatttga

SEQ ID NO: 32925 - protein, 386 aa, Prochlorococcus marinus subsp. marinus str. CCMP1375
MATTSMPLNKIDPRQRAWVEVSPDAIKANTLAIRSLLDEQCLLMAVVKADGYGHGSETVAEAALAGGATNLGVATLQEALELRKAGIVCPILVLGNLINPEDLDACIHWDLMPTLSSAREALLCNQIAESHDKEFCVHIKVDTGMTRLGCDLRLASELIQLVDNLKNLSLRGIYSHLALADVEANGQANSFTSKQKEKFETLLSSVMPRGKPLYRHLANSAGTLRDKGLHFDMVRVGLALYGYSPLKDLRNNFSLQPALAVRAKVTLLRDVPSDTGVSYGHTFITQRPSRLAVVGIGYADGISRALSGKMSVLIDGKFYPQVGSITMDQLVIDITESPQIQIGSVVTLLGVDGDSAITPYDWSEISGSIPWEILCSFKYRLPRVVI

SEQ ID NO: 32926 - DNA, 1128 bp, Bordetella pertussis Tohama I
  CDS (1)..(1128): transl_table=11
atgccgcgtcccatatttgcttcgatctcccagtccgccctgcggcacaaccttgccaccgtgcgtcgtcatctcgatgacgtggcggccaaggcggacggcacgccgccctccatctgggcggtcatcaaggccaatgcctacggccatggcatcgaacaggcggtggccggtttctcggcggcccagggcctggccatgttggacctgcaggaggccgtgcgctgccgcgaagcgggctggggcggccctatcctgctgctcgaaggcttcttccagccgtccgacctggaaatcgtcgaccgctatcatctcgccaccaccgtgcatacgcgcgagcagttcgacatgctggcgcatgcgcggctgtcgcgccgcgtcgacatcatggtaaagctcaacagcggcatgaaccggctgggtttcgcgccggacgcctatgggtccgcctacgcgcgcgcgcagcagctgcatgagtacggcgtggtgggcggcatcggcaagatgacccatttcgcctgtgccgacgggccgcagggcgtgacccagcagatgaacgtcttcaacggcgccaccgcgcacctggccggggcgaccagcgtctgcaattcggccgccaccctgcgctatgccgacctggcggtcggccacgacggccagacccattgggtgcggccgggcatctgcctgtacggcgcctcgccgttcgccgatgcccaggccggggcgttcggattgattccggccatgacgctgcgctccgagctgatcgccatccaggatatcccggccggcgcggcggtgggttacggcgccattttccgcgccgaccggccgatgcgcatcggcgtggtggcgtgcggctatgccgacggctatccgcgccatgccggcaccggtacgcccctgaccgtgggcggcgtgcgcacgcggctggtcggccgcgtgtcgatggacatgctcatggtcgacctggatccggtgccggccgccggtatcggcacgcccgtggtgctgtggggcgaggacggcccgtcggtcgacgaagtggccgaggccgccggcaccatcggctacgaattgctgtgcgcgctggccccgcgcgtacccgtgcgccacgaaggctga

SEQ ID NO: 32927 - protein, 375 aa, Bordetella pertussis Tohama I
MPRPIFASISQSALRHNLATVRRHLDDVAAKADGTPPSIWAVIKANAYGHGIEQAVAGFSAAQGLAMLDLQEAVRCREAGWGGPILLLEGFFQPSDLEIVDRYHLATTVHTREQFDMLAHARLSRRVDIMVKLNSGMNRLGFAPDAYGSAYARAQQLHEYGVVGGIGKMTHFACADGPQGVTQQMNVFNGATAHLAGATSVCNSAATLRYADLAVGHDGQTHWVRPGICLYGASPFADAQAGAFGLIPAMTLRSELIAIQDIPAGAAVGYGAIFRADRPMRIGVVACGYADGYPRHAGTGTPLTVGGVRTRLVGRVSMDMLMVDLDPVPAAGIGTPVVLWGEDGPSVDEVAEAAGTIGYELLCALAPRVPVRHEG

SEQ ID NO: 32928 - DNA, 1164 bp, Bordetella pertussis Tohama I
  CDS (1)..(1164): transl_table=11
atgcccctcgcgtccgatcccttcgaagctccgattcccggcctccatgcctgcatcgacccgattgcggtggcccacaacctggaagtcctgcgccaacggctgggcgtgggcgtcgatggtccgcgcatatgggccaccgtcaaggccgatgcctatgggcacggactgcacaatgtcctgccgggcctgcgcgccgccgacggcatcgccgtccggcatctgcacgaagcccaccagtgccgccgtgtcggctggagcggtcccatcatggtctatgccgggctgacccacgaacgcgaggccgcgctcctgacgctgcaacagctgcacctggtcattaccgacatgacgcaactcgaatggctgccaggcaagcccttgtattcgtgcgcgccctggatatggctgcgctacatcggcgccacgcggctgggcgggctggacgccagcgagtatcggcgcgcctatgcgcgctgccgtgagctgcagcagcatggcgcgctgcgtggcgtgggccatctgaaccactacgcgaacgccgccagcgtcggcgatctcgaacgcgagcacgccgatttcgaggcctgcatccggggtctgccggggccggtttccacctgcaattcggcggccgcctgtgtcctgccgacgatggcggcgcgaaccgactgggtccgccccggtctggcactgtatggcgtaagccccattccgggccgcgccgggcgcgacctgggcctgcgccccgccatgaccttgcgcagcacattgtgcgcgacgcagaacctgcctgccggcgcctcggtcggctatggttgcacgttcgtggccgaccagccgatggcgctggggttggtgcgttgcgggtacggcgacggctacccgcacaatccacgagccagcttccctgtccaggtggacggcgtgctgacacggacggtgggcaggatttcgatggacctgatggctgtcgatctgcggccgatccccgccgcggcccggggcgcgcctgtcgtgctgtggggctcgccgcagctgccggtcgaacacatcgcgcacgcggcgggcaccatcgccgccgagttgctcaccgggctgacggcgcgcgtgcccctgatgcgagccgaccacgcggcgctgctgcgcgggccccctgcctag

SEQ ID NO: 32929 - protein, 387 aa, Bordetella pertussis Tohama I
MPLASDPFEAPIPGLHACIDPIAVAHNLEVLRQRLGVGVDGPRIWATVKADAYGHGLHNVLPGLRAADGIAVRHLHEAHQCRRVGWSGPIMVYAGLTHEREAALLTLQQLHLVITDMTQLEWLPGKPLYSCAPWIWLRYIGATRLGGLDASEYRRAYARCRELQQHGALRGVGHLNHYANAASVGDLEREHADFEACIRGLPGPVSTCNSAAACVLPTMAARTDWVRPGLALYGVSPIPGRAGRDLGLRPAMTLRSTLCATQNLPAGASVGYGCTFVADQPMALGLVRCGYGDGYPHNPRASFPVQVDGVLTRTVGRISMDLMAVDLRPIPAAARGAPVVLWGSPQLPVEHIAHAAGTIAAELLTGLTARVPLMRADHAALLRGPPA

SEQ ID NO: 32930 - DNA, 1188 bp, Prochlorococcus marinus subsp. pastoris str. CCMP1986
  CDS (1)..(1188): transl_table=11
ttgaataatcgaaaaattaattttgatactcttccaagttttgaaggagaaatagatccaactcaaagagcttggatagaagtcagtggtaaagcaatagagtcaaacgtaaggcaattaagatcaaaattaaaaaataattgtgaatttatggcagttgtcaaagctgatggatatggacatgatgcaaaagttgtatctgaaaaagcgattaaaggtggcgcttctcaattaggagtagcaaccttaaaggagggtataaagcttcgttcttttgggataaatgccccaattcttgtacttggtaatctttatacgaaaaaagatttattaatatgttttagaaatgatttgatgccaactattagtacatttagggagtgtttgatttgtaataacattggaaagagtaataatttaaaattctcgttgcatctaaaagttgatactgggatgtcaagattaggatttgaatgtgatcagtttgttcaacaatttaataatattaaatcacttgaaaatattgctgttaagggaatatatagtcatctcgcctgcgcagatgaaaagaatgctttgaatcctaaaagcagcactcaattacaaaaagaaaaatttcaagaattattgaaaattattgatattgataatacacaaaatattaagattcatcttgctaattctgctggcatggttcttggcaaagattttcattttgatatggtacgcgttggcctttctatgtatggctatgacccatcagtaaatataaatgaaaatttatttcttaaacctgctttatttttaaaggctaaagtgacttttgttcgaactattgaaaaaggtattggagtcagttatggaaataaatttgttagtgatagaaaaacaaagttagcagttttaagtattggttatgctgatggcatcattagaaatttatctggcaaaataagtttgattcataataaaagactttatcctcaagttggatctataacaatggatcaaatgatggtagatattacagactcaaatgatattgaagttggtagtaccatgctactactaggatctgaaggagataaatcaatttctccgattgactgggcagataaatgtaatagcattccttgggaaattctttgctcttttaaaaatagattaccaagagtccaagttgattag

SEQ ID NO: 32931 - protein, 395 aa, Prochlorococcus marinus subsp. pastoris str. CCMP1986
MNNRKINFDTLPSFEGEIDPTQRAWIEVSGKAIESNVRQLRSKLKNNCEFMAVVKADGYGHDAKVVSEKAIKGGASQLGVATLKEGIKLRSFGINAPILVLGNLYTKKDLLICFRNDLMPTISTFRECLICNNIGKSNNLKFSLHLKVDTGMSRLGFECDQFVQQFNNIKSLENIAVKGIYSHLACADEKNALNPKSSTQLQKEKFQELLKIIDIDNTQNIKIHLANSAGMVLGKDFHFDMVRVGLSMYGYDPSVNINENLFLKPALFLKAKVTFVRTIEKGIGVSYGNKFVSDRKTKLAVLSIGYADGIIRNLSGKISLIHNKRLYPQVGSITMDQMMVDITDSNDIEVGSTMLLLGSEGDKSISPIDWADKCNSIPWEILCSFKNRLPRVQVD

SEQ ID NO: 32932 - DNA, 1197 bp, Prochlorococcus marinus str. MIT 9313
  CDS (1)..(1197): transl_table=11
atgcgagacctgatcgccccacacggtgatctacctaggggcaaaaaccctgagcagattgcaaaagccgatccacgtcagcgcgcctgggtggaagttaaccccgcagctgtggaagccaattgccgcagccttcggagacacctttgtgaaagttgtgccctgatggccgtggtgaaagctgatggctatggccatggcgctttaaccgtagcccgagccgccttgcaaggaggagcaaaaagccttggagtagcaaccctccaagaagggattgagcttcgtcaagccggccacaatgccccagtgcttgtgctaggcaatctcacccatagcgaagacctgaaagcttgcctccattggcaactcatgcccaccctcagcagtatgcgagaggctctgctctgccaaaaccttgcagatggcagcggccggcaattcaggattcagctcaaaatcgatactgggatgacccgcctcggctgcgagctaaaggaagctcccatgctggtggaggcgataggccacctcaatcaactggaattaaagggtatctatagccatttagccctggcagatggggatctccaagggaaagccgcaatggtgacggatcagcagcagcaacactttgagacggtgctaagaacgctgccagagcaacacaatggatttacgcggcaccttgccaactccgccggcacccttcgcgatcgcggactccactacgacatggtgcgcgttggtcttgctctgtatggccacagccccaacctccaactacaaggaaaagtagaccttcagccagctctcagcgtcaaagcaagggtgacattgataagggatgtgcctgcaggtgtgggagtgagttacggccatcgcttcaccacacgacgccccagtcgcctagcagtcgtaggaatcggctatgccgacggggttagccgatccctatcaggccaaatctctgccatagccgatggtcagcttctcccacaggttggcgccatcaccatggatcaactcgtgcttgatgccacaaatcatcccgacctagaggtgggaagcatcgtgaccctcctaggcaaggacggtgacgcctgtattacaccacaacaatggagtgatctgagtggatcaattccatgggaggtgctctgcagcttcaaacatcgactacccagactggtgatttga

SEQ ID NO: 32933 - protein, 398 aa, Prochlorococcus marinus str. MIT 9313
MRDLIAPHGDLPRGKNPEQIAKADPRQRAWVEVNPAAVEANCRSLRRHLCESCALMAVVKADGYGHGALTVARAALQGGAKSLGVATLQEGIELRQAGHNAPVLVLGNLTHSEDLKACLHWQLMPTLSSMREALLCQNLADGSGRQFRIQLKIDTGMTRLGCELKEAPMLVEAIGHLNQLELKGIYSHLALADGDLQGKAAMVTDQQQQHFETVLRTLPEQHNGFTRHLANSAGTLRDRGLHYDMVRVGLALYGHSPNLQLQGKVDLQPALSVKARVTLIRDVPAGVGVSYGHRFTTRRPSRLAVVGIGYADGVSRSLSGQISAIADGQLLPQVGAITMDQLVLDATNHPDLEVGSIVTLLGKDGDACITPQQWSDLSGSIPWEVLCSFKHRLPRLVI

SEQ ID NO: 32934 - DNA, 1131 bp, Synechococcus sp. WH 8102
  CDS (1)..(1131): transl_table=11
atgtcggagctaagtccacgccagcgcgcctgggtggaggtctaccccacggccattgaggccaactgccgactgctgtgccgtcaacttgtcaccggctgccagctgatggccgtggtgaaagccgacggctatggccacggcgccgtgaccgtggcgagggcttccctacgcggcggggcatccagccttggggtggcaacccttcaggaaggcctggaactgcgggatgcaggcatcgaggcgccggttctgatcctcagcgccctgccaagcccggaggatctccgccactgcctggagcagcggctgatgccgaccctgagcagcctggatgaagcgaacacggccgctgcggtggctgctgaacgaggaaacgagcgctttcctgtgcagctgaaactcgatacagggatggccaggctcggtggcgaatggcaggagggagcccagctggtgcagtccatccgcaccctgcctcagctggaactagtaggcctatacagccatctcgcctgtgcggatgagcttggcgatcaactcacccacctgcagctgcagcgctttcgatccgtcattgaagccctgccggatggcggcagcggcctgtgctgccatctggccaattccgccggaaccctgcaggatccccgtttgcatctggacatggtgcgcgttggcctcgccttgtacggacaatccccagctgaccacctcggcctcgatttagcactacagcctgccttggcggtgaaggcacgcgtcagccttattcgggaggtgccgagcggtagcggcgtcagctacggccatcgctttgtcaccagtcgtccgtcacgcctggcggtgatcgccatcggttatgccgacggcgtggtccgcgcactgagcggccgcattgacgtcctgcatcgtggtcgccgggtgccgcaggtgggcaatatcaccatggaccagatcatcctcgacgccaccgatgtcgaggagctgacggtgggagacaacgtcacgctgctggggcaagacggagatgactgcatccgtccccaggactggagcgctcgctgcggctcgatcccctgggagattctctgtggtttcaaacaccgcctgccgcgggtcgagatctga

SEQ ID NO: 32935 - protein, 376 aa, Synechococcus sp. WH 8102
MSELSPRQRAWVEVYPTAIEANCRLLCRQLVTGCQLMAVVKADGYGHGAVTVARASLRGGASSLGVATLQEGLELRDAGIEAPVLILSALPSPEDLRHCLEQRLMPTLSSLDEANTAAAVAAERGNERFPVQLKLDTGMARLGGEWQEGAQLVQSIRTLPQLELVGLYSHLACADELGDQLTHLQLQRFRSVIEALPDGGSGLCCHLANSAGTLQDPRLHLDMVRVGLALYGQSPADHLGLDLALQPALAVKARVSLIREVPSGSGVSYGHRFVTSRPSRLAVIAIGYADGVVRALSGRIDVLHRGRRVPQVGNITMDQIILDATDVEELTVGDNVTLLGQDGDDCIRPQDWSARCGSIPWEILCGFKHRLPRVEI

SEQ ID NO: 32936 - DNA, 1071 bp, Chromobacterium violaceum ATCC 12472
  CDS (1)..(1071): transl_table=11
atgcgtccgttgatcgcgacgatacggctggaccatttgcggcataactatctgcaagcgcgcgccgcccacggcgaccgcgcgctggcggtgctgaaggccaacgcctacggccatggcgcggtccgttgcgcccaggcgctggccgacatcgccgacggcttcgccgtcgcctgcctggaggaggcgctggagctgcgcgccgccggcatcgccaaccccatcctgttgctggagggcgtgttcgacgccgaggaactgaaggcggtggacgagcatggcctgtggatggcggtgaccagcgaggagcaactgagcatggtcgagcagtcgaatccgtcgaggccgttcaatgtctggctgatgctggattccggcatgcaccgcgaaggcttcctgccggaaaattatcaccaggcttggcataggctgcaggccagcggcaaggcgggcggcatcaccaagatgactcacttcgcccgcgccgacgagcctgagatcccgatgaccttcgcgcagctggaggcgttcgacgccgcggtgcggggcctgccggccggcgacgagtcggtcgccaactcggccggcatcctgtgccacccgcgcgcgcagcgcaactggggccgcgtcggcatcgcgctgtacggcgtgacgccgctgccggccggattcgggcagggcgacgcgctgcgcccggtgatgcgtttctccagcaaggtgttcggcgtgcgcgagctgggcgtcggcgagcccatcggctacggcgacaacttcgtcaccgagcgcccgacgcgcgtcggcctggtggcctgcggctacgccgacggctacccgcggcgcgcttccagcggcagtccggcgttggtggatggacagcgcacgcggctgatcggccgggtgtcgatggacatgctgaccgtggatctgaccgatctgccggcagtcggcgtcggcagcgaggtcgagctgtggggggacggcgtgtcggtcaacgaggtggcggcccacgccggcaccataggctacgagcccttgtgcaacgtcaagcgcgcgcgcttcgtctaccgttga

SEQ ID NO: 32937 - protein, 356 aa, Chromobacterium violaceum ATCC 12472
MRPLIATIRLDHLRHNYLQARAAHGDRALAVLKANAYGHGAVRCAQALADIADGFAVACLEEALELRAAGIANPILLLEGVFDAEELKAVDEHGLWMAVTSEEQLSMVEQSNPSRPFNVWLMLDSGMHREGFLPENYHQAWHRLQASGKAGGITKMTHFARADEPEIPMTFAQLEAFDAAVRGLPAGDESVANSAGILCHPRAQRNWGRVGIALYGVTPLPAGFGQGDALRPVMRFSSKVFGVRELGVGEPIGYGDNFVTERPTRVGLVACGYADGYPRRASSGSPALVDGQRTRLIGRVSMDMLTVDLTDLPAVGVGSEVELWGDGVSVNEVAAHAGTIGYEPLCNVKRARFVYR

SEQ ID NO: 32938 - DNA, 1074 bp, Chromobacterium violaceum ATCC 12472
  CDS (1)..(1074): transl_table=11
atgacacgccctatccggctggagatttccctcccggccatccgccataatttcctgttcacccgccagcattcccaggcccgcagcctgttcgccgtgatcaaggcgaacgcctacggccacggcttattggacactgcaaaggcgttggccgatcaggccgacggttttgccctgctcaatatcgaagatgccgtgcgcctgcgcgaagcgggattcgatcaccccatctcgctgctggagggaccgttcgacgcggccgaagccgccgcgatggccgattaccgcctgggcggcgcggtccactcacaacaacagatggactggctggccaaaggttccgcggatcggcccatcgacgtctggctgaaaatcaacagcggcatgaaccggctgggtttccgcccgcaagaggccgccgccgcccaagcccggttgcaggcgctgcccggcgcgcggctgaccgcggtcatgacccacttcgccaccgccgatgaagattacggcgtcgccgagcaatgggcccgcttcgagccggtggccgtcgccagcggactgaaggtctgcgccgccaattccgccgcactgctgcgccatccgcatacccacggcgacatcggccgccccggcatcgtgctctacggcgcctcgccgttcgaaaacgaaaccggcgccggcctcggcctgatgccggcgatgacgctgtcggccgacatcatcgccgtgcaacagctgcaacccggcgacgcggtgggctacggccggcgtttcatcgccgaccgggccatgcgcatcggcgtggtcgcctgcggctacgccgacggctatcctcgcgtcgccgccaacggcgcgccggcggcggtggacggccaaccctgtcgactggcgggccgggtatcgatggacatgctgacggtggatatcagccatctgccccaggccggcgtcggcagccgggtggagctgtgggggccaaacgcgccgatagagaaagtggccgcggccgccggcaccatcagctacgagctgatgagcgcggtgatgccgcgggtaccgcgcgtcgtgcgcagctga

SEQ ID NO: 32939 - protein, 357 aa, Chromobacterium violaceum ATCC 12472
MTRPIRLEISLPAIRHNFLFTRQHSQARSLFAVIKANAYGHGLLDTAKALADQADGFALLNIEDAVRLREAGFDHPISLLEGPFDAAEAAAMADYRLGGAVHSQQQMDWLAKGSADRPIDVWLKINSGMNRLGFRPQEAAAAQARLQALPGARLTAVMTHFATADEDYGVAEQWARFEPVAVASGLKVCAANSAALLRHPHTHGDIGRPGIVLYGASPFENETGAGLGLMPAMTLSADIIAVQQLQPGDAVGYGRRFIADRAMRIGVVACGYADGYPRVAANGAPAAVDGQPCRLAGRVSMDMLTVDISHLPQAGVGSRVELWGPNAPIEKVAAAAGTISYELMSAVMPRVPRVVRS

SEQ ID NO: 32940 - DNA, 1029 bp, Wolinella succinogenes DSM 1740
  CDS (1)..(1029): transl_table=11
atggcagagctacgcatcaactctcaggctttttttcacaatcttaaactcttggcgaatcatgtcggctccaaagaaaaagtcgccgtggtgctcaaagacaatgcctatggacacgggcttttggagatggcgcttctgtgcaaggaggcgggaatcgcaagcgcgtttgtgaaaaatgaggccgaagcgataagaatcgccccctattttgagagtgtgacggcgctctatggagatgtggagtcaaagagccccgcgaatgtttgggttgcgcttcactctttggagcagattcgaagaatccctaagggtcgcagcgtggagctgaaagtggatacagggatgaatcgcaatggaatcatggaagaggagctctttgtagcgcttgaagccattcgtgctcaagggctgattctttgtggggtgatggcgcataatggctatggggatgagctggggagcgagtttttctctcagcagaggcgttttgagggggtgagggcaagagtggaggagtatgctagggagcatggcttgcctcgacctcgattccatgcgctcagctcctcgggggctttgcgaagtcggaatattcaagatgatctagtgcgctttggaatcgccatctatggctatctctgtgcgcatcctttggtggtgagcgagatagggcttaggcctgtgctctccctttgggcgagacgaatcaccaccaaatcccttcccaagggggcgagaatcggctatgggggcaagagcgagctggaggaggaggcgaagaaggtctcgacctatgatgtgggatatggagatggattctatcgactcaatgaacaccacaaacttctcaccgcccaaggagagcggattttgcctagggtttcgatggattgtctaagtgtggtgggcgagcgcgaggaggtctgtttgatggaggatgcgagcgagctggctaggctctttgatacgattccctatgaggtgctcacgagattttcaccctttttgaagcgtgtggtgatttag

SEQ ID NO: 32941 - protein, 342 aa, Wolinella succinogenes DSM 1740
MAELRINSQAFFHNLKLLANHVGSKEKVAVVLKDNAYGHGLLEMALLCKEAGIASAFVKNEAEAIRIAPYFESVTALYGDVESKSPANVWVALHSLEQIRRIPKGRSVELKVDTGMNRNGIMEEELFVALEAIRAQGLILCGVMAHNGYGDELGSEFFSQQRRFEGVRARVEEYAREHGLPRPRFHALSSSGALRSRNIQDDLVRFGIAIYGYLCAHPLVVSEIGLRPVLSLWARRITTKSLPKGARIGYGGKSELEEEAKKVSTYDVGYGDGFYRLNEHHKLLTAQGERILPRVSMDCLSVVGEREEVCLMEDASELARLFDTIPYEVLTRFSPFLKRVVI

SEQ ID NO: 32942 - DNA, 1146 bp, Gloeobacter violaceus PCC 7421
  CDS (1)..(1146): transl_table=11
gtggacgggtttgatgcgacgcgacgcgcctgggtggagatcgacctcgatgccctcaggcacaatgttcaacaaatcagacaaagattgcggtcccattgccgggtgatggcggtggtcaaagccgacgcctacggccacggcgccctgagtgccggccgcgccgccctggaggcgggggccgcctgcctgggggtggccaccctcgaagaaggtgcgcagttgcgcgagagcggcctgggttgtccgatcgtcgtcctgggacccatccacaccggcgccgaagttgccgcagtcgagcactggcggttggaaccgacgctttgcacgccgcgccaggtgctcgtctgtgcggaacacctgagtgctccccatccggtgcacctcaaaatcgacacgggcatgacccgcctgggcgcaccctggcaggatgccgtcgaatttgtgcgcctggcctaccggctaccccgcctgcaggtggcctcggtctactcgcacctggccaccgccgatgagccggactccgccgccctgggcgagcaacaccgccgcttcgagcgggtgctgggcgaactggaagccgccggggtgcgtcccgagtgtgtgcacctggccaattccgccgccgccctgggcgatcccggattgcactacgacctggtgcgcgtgggtgtggccctctacggcctctaccccgcccccgaattttatggagccgccgaactgcggccggtgatgcaggtcagggcgcgggtcacccaggtgcgggaagtgccggcggacaccggcgtgagctacggccacttctggcgtaccccgaccccgagccgcctggccaccgtcgccatcggctacgccgacggggtgccgcggcggctctcgggccaactgcaggtgctggtgcacgggagacgggctccccaggtaggtgcgatcaccatggaccagatcgtcatcgactgcacccacctgagcgcggtggaggagggcgatgtggtgacgctgctgggccgcgacggcaacgaagcaatcggcgccgccgactgggccgaccccctgggtaccattgcttacgaaattctttgcggttttaagcaccgcctgccacgggtggtgcgctccacggcaccggtatttaacgtttag

SEQ ID NO: 32943 - protein, 381 aa, Gloeobacter violaceus PCC 7421
MDGFDATRRAWVEIDLDALRHNVQQIRQRLRSHCRVMAVVKADAYGHGALSAGRAALEAGAACLGVATLEEGAQLRESGLGCPIVVLGPIHTGAEVAAVEHWRLEPTLCTPRQVLVCAEHLSAPHPVHLKIDTGMTRLGAPWQDAVEFVRLAYRLPRLQVASVYSHLATADEPDSAALGEQHRRFERVLGELEAAGVRPECVHLANSAAALGDPGLHYDLVRVGVALYGLYPAPEFYGAAELRPVMQVRARVTQVREVPADTGVSYGHFWRTPTPSRLATVAIGYADGVPRRLSGQLQVLVHGRRAPQVGAITMDQIVIDCTHLSAVEEGDVVTLLGRDGNEAIGAADWADPLGTIAYEILCGFKHRLPRVVRSTAPVFNV

SEQ ID NO: 32944 - DNA, 1089 bp, Photorhabdus luminescens subsp. laumondii TTO1
  CDS (1)..(1089): transl_table=11
atgccacgtccgatttcggcaacgatccatcttgatgcattggaaaataatttggcgattattcgtaataaggtcggtaatagtaaaatctgggctgttgttaaagcaaatgcttatgggcatggtctgcattgtatatggcggtctcttgatcaggctgatgggtttgctttacttgattttcatgaagcgattttattgcgggagcaggggtggcagggtgcaatcttactattggaagggtttttcaaacccgaagatttgccaataattgatgaatatcagttgacaacggtggtgcatagccattggcaacttgaagcaatagaagcggccaatttgagtaaacccatcaatatttatctcaaactcaacagcggtatgaatcgattgggatttcctgcggatcaatatagcgcggttttatcattagcaagagggatccggcaaattgggcaaataacgttaatgtcacattttgcgaatgcggataaggataataaggagatcagcgttactgaacaacttaacgttattcattcggtgagtcagggattggatatttctcaatgtttggcgaattcagccgcttccttgtggtatccacaaactcatagagattgggtacgtcccggtatcgtgctttatggtgcctcacccagtggaaagtggaaagatattgccgatattgggttgaaagcggtgatgagtctgcaaagtgagattattgctattcagaatctcaaggcaggagataaaataggttatggcagtgaatatacagcgccaggccctatgcgagtcggtaccgtcgcctgtggctatgctgatggttatccccgttgtgccatgacgggaacaccgattattgttgatggcgttaggacccaagtattaggtacggtatcaatggatatgttatcggtggatttaacgccttgtccgcaggcccaaattggcagccctgttgaattgtgggggcaaaatttaccggtggatgatgtggcggagagctctggaacaattggctatgaattattgtgcgcattggcaaatcgggtcccggtatctataccctatggattttga

SEQ ID NO: 32945 - protein, 362 aa, Photorhabdus luminescens subsp. laumondii TTO1
MPRPISATIHLDALENNLAIIRNKVGNSKIWAVVKANAYGHGLHCIWRSLDQADGFALLDFHEAILLREQGWQGAILLLEGFFKPEDLPIIDEYQLTTVVHSHWQLEAIEAANLSKPINIYLKLNSGMNRLGFPADQYSAVLSLARGIRQIGQITLMSHFANADKDNKEISVTEQLNVIHSVSQGLDISQCLANSAASLWYPQTHRDWVRPGIVLYGASPSGKWKDIADIGLKAVMSLQSEIIAIQNLKAGDKIGYGSEYTAPGPMRVGTVACGYADGYPRCAMTGTPIIVDGVRTQVLGTVSMDMLSVDLTPCPQAQIGSPVELWGQNLPVDDVAESSGTIGYELLCALANRVPVSIPYGF

SEQ ID NO: 32946 - DNA, 1080 bp, Photorhabdus luminescens subsp. laumondii TTO1
  CDS (1)..(1080): transl_table=11
atgaaagcggcaaccgcagttattgaccgccgcgcgctgcgacataacttgcaacgggtaagggagattgctcctaaaagcaatttgattgcagttgtgaaagcaaacgcttatggccacggtttactggagacagcacatacgctggacgatgccgattgtttcggtgtcgcgcgaattggtgaagcattgacgttgcgtcatggtggtatcgtcaaaccgattctgttactggaaggatgctttgatgcggctgacctgctagtactggttgctaaccatattgaaactgtggttcacagtgttgaacagttgcaagctctagaacaagctaagttatctcatccggtaaaagtatggatgaaattggatagcgggatgcatcgcttaggtgtaaggccggaagatgcggaagaattttatcaacggctgagtcgttgtaaaaatgtacagcagcctgtcaatattgtcagccattttggccgggctgatgaaccaacggtagacaccacttgccagcagatagcctgttttcaggctttctgtgctgacaaaccgggagaaaaatctattgatgcatcgggaggtatcctgttgtggccggaagtccatcaagattgggttcgtcccgggctgatgatgtatggtgtatcgccattatctgataaaacggccgtggattttaacctgatcccagcgatgactctaaaatcgagcttaattgctgttcgtaagcataaagctggcgaatcggttggctatggtgggatctgggtcagtgaacgtgatacttatcttggggttgtagctatcggttatggtgatggttatccgcggagtgcgccttcaggaacgccaatacatattaatggtcgtgaagtgccgattgctggccgtgtttcaatggatatgatctctgttgatttggggccagaggcgacagataaagtgggtgatgaagtggtgctctggggagatgtactgccagtggaacgggttgctaagcacactggtatcattacttatgagctggtgactaaactcacttccagagtggtgatggaatacttggacgaataa

SEQ ID NO: 32947 - protein, 359 aa, Photorhabdus luminescens subsp. laumondii TTO1
MKAATAVIDRRALRHNLQRVREIAPKSNLIAVVKANAYGHGLLETAHTLDDADCFGVARIGEALTLRHGGIVKPILLLEGCFDAADLLVLVANHIETVVHSVEQLQALEQAKLSHPVKVWMKLDSGMHRLGVRPEDAEEFYQRLSRCKNVQQPVNIVSHFGRADEPTVDTTCQQIACFQAFCADKPGEKSIDASGGILLWPEVHQDWVRPGLMMYGVSPLSDKTAVDFNLIPAMTLKSSLIAVRKHKAGESVGYGGIWVSERDTYLGVVAIGYGDGYPRSAPSGTPIHINGREVPIAGRVSMDMISVDLGPEATDKVGDEVVLWGDVLPVERVAKHTGIITYELVTKLTSRVVMEYLDE

SEQ ID NO: 32948 - DNA, 1149 bp, Corynebacterium diphtheriae NCTC 13129
  CDS (1)..(1149): transl_table=11
atgaacctgctcgaaactcgcatctcgtgcgacgccattgctgcgaacacgcgacgtttaaaagacatggttgctcccgctcagctcatgtgtgttgtaaaagctgacggctacaatcacggtgccccagaagttgctactgtgatggcgcgtaacggtgccgaccaatttggtgtcgcaacgcttgcggaagcacatcagctacgagacgcgggtatcactctccccatcctgtgctggatctggtcacccgagcaggacttttccgccgccattgaccgtgacatcgacttagccgccgtcagcatggatcacgttcgtgcactgatcgcagaggctatgcgtcgtcccgcaggtacccgagtgcgggtgaccgtgaaaattgacacggaacttcaccgatctggaattgacgaagcaaactggacagaagcctttgagcttcttcatgcttgcccccaagtcaacgtcacgggcgtatttagtcacttggcatgcgcagacgacttggaatcggactacaccgaccaccaagcagaggtatttcgcagggcgatttccgcaggtagaaacgtaggcctagaccttcctgttaatcatctagcggcatcgccagcaacactaacccgccccgacttgcactttgacatggtccgacctgggcttgccctctatggtcacgaaccgatagcagggctcgaccatgggctgcgcgaagccatgacatggattggttcagtaacagtggtcaaacccatcgcggcaggccaaggaaccagctacaacatgacatggcatgcgcccgcagatggctacctctgcgtggtgccggtgggctatgcggacggattaccgcgcaacgtacaaggacatttagaagtaacgatcgccggcacgcgctacccacaagtagggcgcgtttgtatggaccagattgtggtattccttggcgataattcccgcggtgttgcccctggtgatgaggcaattatttttggtccaagagatacccaagcgatgaccgtcacggagctggcctgcgctacgggaaccatcaactatgaaatcttgtgccgcccgaccggacgaagccatagaacctatagtgctcttgacgccgttgcgcccacgcaccctactgaaagctga

SEQ ID NO: 32949 - protein, 382 aa, Corynebacterium diphtheriae NCTC 13129
MNLLETRISCDAIAANTRRLKDMVAPAQLMCVVKADGYNHGAPEVATVMARNGADQFGVATLAEAHQLRDAGITLPILCWIWSPEQDFSAAIDRDIDLAAVSMDHVRALIAEAMRRPAGTRVRVTVKIDTELHRSGIDEANWTEAFELLHACPQVNVTGVFSHLACADDLESDYTDHQAEVFRRAISAGRNVGLDLPVNHLAASPATLTRPDLHFDMVRPGLALYGHEPIAGLDHGLREAMTWIGSVTVVKPIAAGQGTSYNMTWHAPADGYLCVVPVGYADGLPRNVQGHLEVTIAGTRYPQVGRVCMDQIVVFLGDNSRGVAPGDEAIIFGPRDTQAMTVTELACATGTINYEILCRPTGRSHRTYSALDAVAPTHPTES

SEQ ID NO: 32950 - DNA, 1242 bp, Rhodopseudomonas palustris CGA009
  CDS (1)..(1242): transl_table=11
atgcatatccttcccgatccgaacgccaccgtcgccgagttgttgacgccggaggcgggcaaagctgctgagttcgccgcggccaacgcggccgcgtccggcattctcaccatcgatctcgacgcgctggtcgcgaactggcgcaagctcgaaaagaccgccatcccctccgaatgcgccggtgtggtcaaaggcgacgcctatggctgcggcgccggccccgtcaccaaggcgctgctcgcggccggctgcaagaccttcttcgtcgcaacgctgagcgaagcactagtcgtgcgcgaagccgcgcccaacgcgacgctctacgtgctcgacgggttcttcccgaactcaggggacgaattcgccaagctgaattgccagccggtgatcggtgatctgtacgaactcgccgaatgggacgtgttctgccgccgcaccggttggcgtggcggcgcggcgcttcacatcgacaccggcatgagccggctcgggctgaccatcgtcgaggcgcaaggcatcgtgccgcggattgtcgccggtgaccacggcatcacgctggtgatcagccacctggcctgcgccgatctcgtcaaccatcagctcaatgccaagcaggccgcggcatttcgcgagatcgccggtcagttcaccggcgtgtcggcctcgctgtcggcttcgtcgggcatcttcctcgggtcgcagttcgcgttcgatctggtccgcccgggcgcggcgctgtacggcatcaaccccacgccggaagccgacaatccgatgcagccggtggtcgacctgaaggcacgtatcgtccaggtccgcagcgtcgagcgcggcgacaccgtcggctacggcgcgacctggagcgcacggcgtccgagcaagatcgcggtggtgtcggccggctatgcggacggttacttccgcgcggccggctcgagcgacggcacccgcggcgccgacgtgatcatcgccggtcaacgctgcccgatcgccggccggatctcgatggacctgctcgcggtcgacatcaccgacctgcccgccaacgccgcgcgccgcggcatgatggccaccctgatcggcgacggcatcaccgtcgacgaactcgggcatcacttcggcaccatcggctacgaagtgctgactagcctcggccggcgctacacccggatctacaaaggcggcgacgccaagccgctgaccgaaccggccccggtcgagccggtggctccggcgagctga

SEQ ID NO: 32951 - protein, 413 aa, Rhodopseudomonas palustris CGA009
MHILPDPNATVAELLTPEAGKAAEFAAANAAASGILTIDLDALVANWRKLEKTAIPSECAGVVKGDAYGCGAGPVTKALLAAGCKTFFVATLSEALVVREAAPNATLYVLDGFFPNSGDEFAKLNCQPVIGDLYELAEWDVFCRRTGWRGGAALHIDTGMSRLGLTIVEAQGIVPRIVAGDHGITLVISHLACADLVNHQLNAKQAAAFREIAGQFTGVSASLSASSGIFLGSQFAFDLVRPGAALYGINPTPEADNPMQPVVDLKARIVQVRSVERGDTVGYGATWSARRPSKIAVVSAGYADGYFRAAGSSDGTRGADVIIAGQRCPIAGRISMDLLAVDITDLPANAARRGMMATLIGDGITVDELGHHFGTIGYEVLTSLGRRYTRIYKGGDAKPLTEPAPVEPVAPAS

SEQ ID NO: 32952 - DNA, 1149 bp, Geobacter sulfurreducens PCA
  CDS (1)..(1149): transl_table=11
atggacagccggcccaccattgctgaagtcgatctcgccgccctccgccacaactacgaccttgtcgtccgtacgattccccgggggtgcggaatcctggcggtagtcaaggccgacgcctacggccacggtttcatggatatcgcccgcgagttggagacactgggagtgactgccttcggcgttgcctttctggccgagggaattcaactgcgcaagagcggaatcgatcgtcccgtcctgatcctgggaggggtttatcccggccaggaacgcaagtgtgtcgggttcaatctgtccacggccctgttcagcctggagcaggcgcgggttctggacgatgcggccggtcgcctgtatcgccgggccagggtccatgcgaagatcgataccggcatggggcgcctcggcatcccccacgaggaggcgtcggccttttttagcgccctgcgggagttgaagcacctggacctggaggggatcatctcccacttcgcctccgccgacgaactcgacgaggatggccggcgctactccgatctccaggcgagccggtttgccgcggcggtcgcggcggcccgccacgaggggttcgagcctcgctatgtccatatcgccaacagcgcggccgccttcgggatggacctgccgttctgcaacctcgtccggcccggcatcgtcctctacggcgcgctcccttccggcgacttcgaggggaagatggcgctcaagcccatcatgcgcctgcgcagttccatcgccatgctcaaatgggtggaaccgggcacaagcatcagctacgcccgccgcttcaccgctcccgaccggcgactcgtggccagtattccggttggctacgcagacggctacagccgttctctcaccaaccgtggggaggttgtcgtgcgcggccggcgcgctccggtcgtgggcaccgtctgcatggactggatcatggccgacgtgacccacgtctccggcgtgaccgttggcgacgaggtgacgcttctggggtgcgaccaggagggaaactgcgtccgtgccgaagaacttgccgagtgggccggtaccatcccctacgaaattttctgcggcatcagcaagcgggtgccgcgcgtctacctcaacccgtcgatcaggcacaggtga

SEQ ID NO: 32953 - protein, 382 aa, Geobacter sulfurreducens PCA
MDSRPTIAEVDLAALRHNYDLVVRTIPRGCGILAVVKADAYGHGFMDIARELETLGVTAFGVAFLAEGIQLRKSGIDRPVLILGGVYPGQERKCVGFNLSTALFSLEQARVLDDAAGRLYRRARVHAKIDTGMGRLGIPHEEASAFFSALRELKHLDLEGIISHFASADELDEDGRRYSDLQASRFAAAVAAARHEGFEPRYVHIANSAAAFGMDLPFCNLVRPGIVLYGALPSGDFEGKMALKPIMRLRSSIAMLKWVEPGTSISYARRFTAPDRRLVASIPVGYADGYSRSLTNRGEVVVRGRRAPVVGTVCMDWIMADVTHVSGVTVGDEVTLLGCDQEGNCVRAEELAEWAGTIPYEIFCGISKRVPRVYLNPSIRHR

SEQ ID NO: 32954 - DNA, 1131 bp, Lactobacillus johnsonii NCC 533
  CDS (1)..(1131): transl_table=11
atggttccaggaattcatcgtccagccgtagtaaaggtaaacttgggcgctattaaaagaaatctgaaaaatgagatggggcatctagagcccggtcaaaagatgcttgccgttgtaaaagcaaacggctacggacacggttcagtagaagtagctagagtggcagataaggtaggagcagccggattttgcgttgcaattttagatgaagcattagagttaagacgtgcagatattacaaaaccaattttagttttaggcgttgtttctcctgaatatgctccaattgctgctgtaaataacgtctcattgactgttccaaacttagaatggcttaaagaagcagagaagtatttaaaagatgcaaatttgcaattgaagattcatttaggtattgattccggaatgggaagaatcggatttaatgaagacgcagactttattactgctaatgagtttttagagaataacgataatttctttattgaaggaatgtttgcccattttgcttctgctgatagcagtgatgaaacttatttcaaacatcaatgtgaaaaatttaatcatatgaagagcttgcttactgtaaagccaaagtggattcatgttgataatacggcagcaagtatttttcatgacggaattaaaagtgatttagttagatttggtattggaatttatggtttaaatccttcttctaatcctaattctccagatttaaaatcaaatattaagttagaacctgccttgtcatttgaaagtgaattgactcatgttaagacaattcatcaaggtgatggtgttggatacggttcgacctttgttgcagatgaagatacaattattggaaccgtacctgttggttatgcggacggatttattagaaaatttcaaggtttcaaagttaaagtgggagatacatactgtccaattgttggccgaatttgtatggatcaatttatggttaagatgcctaaaaagatgccagtagggaccaaagtaactatcatttcttctaatcctaatgatcaaaataatattaaagctgcagctgattatgttgacacaattcattatgaagtggcttgcttattaaatgatcgtttaccacgtgtatattacgaaaattaa

SEQ ID NO: 32955 - protein, 376 aa, Lactobacillus johnsonii NCC 533
MVPGIHRPAVVKVNLGAIKRNLKNEMGHLEPGQKMLAVVKANGYGHGSVEVARVADKVGAAGFCVAILDEALELRRADITKPILVLGVVSPEYAPIAAVNNVSLTVPNLEWLKEAEKYLKDANLQLKIHLGIDSGMGRIGFNEDADFITANEFLENNDNFFIEGMFAHFASADSSDETYFKHQCEKFNHMKSLLTVKPKWIHVDNTAASIFHDGIKSDLVRFGIGIYGLNPSSNPNSPDLKSNIKLEPALSFESELTHVKTIHQGDGVGYGSTFVADEDTIIGTVPVGYADGFIRKFQGFKVKVGDTYCPIVGRICMDQFMVKMPKKMPVGTKVTIISSNPNDQNNIKAAADYVDTIHYEVACLLNDRLPRVYYEN

SEQ ID NO: 32956 - DNA, 1209 bp, Bdellovibrio bacteriovorus HD100
  CDS (1)..(1209): transl_table=11
atggaaatgtaccgtcgcacgtttgcggaaattaatctggatcatctgaagcacaatatccaagtgctgcagaaggcctttccgcaagccccttttctgtgtcccatggtcaaggccaatgcctatggccacggggacgtgcaattggcgcgtttccttgaaagtctgggcatcaagcacttgggtgtgtgtctgattgaagaaggtctgctgcttcgtcgttccggtgtgaatgctgaaattctggtcttccgcggttttgatcgcgaaggggcagaaaaaatcatcgaatacaacatgacaccggtggtgagttcctgggagcagattgatcatctggaggccgtggcctcggaccccgtggggattcacctgaaatttgacaccggcatgaatcgtctgggattccgtcccgaagaagcacaaaagctattcgatcgcctgtggcagaacaagaagatccgattgaaagccctggtgactcatctgtttaacggcgaagatgccacggattctcaaggcatcagtgcccgccagttgcgtgatctgaatcgggtcagcacggtgtttaagccttttaatattttctgccatgctttgaactcggccgggatcatgagtgccctgcagatgaaagacgccgggaacacgccggcggatcatccgctgttcatgcaaaactggggtctgcgcccggggctgatgatctatggttacaatccattgggtcagaacagcttcgggggcctaaaaccggtgatgagtttgaaatctcatgtggccacctacagacagcttcatatcggtgaaactgtttcttacggcggcacctggacggccaagcaggattctgtcattgctgtggtccccattggatatgccgatggttaccatcgtattttatccaaccagtcttctgtggtttttgcaggcaaaagggttccccttgtcggaagcatctgtatggattatctgatgctggatgtgacggaagtggtgcgcggaaaagatctgaaagactttaaggatcaggaagtgaccttgttcggatttgcttccgatggcagtttcctgtccccggaagagctggcggttcaggccaaaagcatcacctgggaaatgctgacaagtgtgggcgagcgcgtgccacgtatttactccggcctggatgtcggatttgtgtttgaggaaagcagaggccaacgatga

SEQ ID NO: 32957 - protein, 402 aa, Bdellovibrio bacteriovorus HD100
MEMYRRTFAEINLDHLKHNIQVLQKAFPQAPFLCPMVKANAYGHGDVQLARFLESLGIKHLGVCLIEEGLLLRRSGVNAEILVFRGFDREGAEKIIEYNMTPVVSSWEQIDHLEAVASDPVGIHLKFDTGMNRLGFRPEEAQKLFDRLWQNKKIRLKALVTHLFNGEDATDSQGISARQLRDLNRVSTVFKPFNIFCHALNSAGIMSALQMKDAGNTPADHPLFMQNWGLRPGLMIYGYNPLGQNSFGGLKPVMSLKSHVATYRQLHIGETVSYGGTWTAKQDSVIAVVPIGYADGYHRILSNQSSVVFAGKRVPLVGSICMDYLMLDVTEVVRGKDLKDFKDQEVTLFGFASDGSFLSPEELAVQAKSITWEMLTSVGERVPRIYSGLDVGFVFEESRGQR

SEQ ID NO: 32958 - DNA, 1140 bp, Treponema denticola ATCC 35405
  CDS (1)..(1140): transl_table=11
atgagagcgacaaaggctattatccatttggataacttacaatataacattaaagaaataaaaaagcggcttaacaagaatgtaaagatttgtcttccggtcaaggccgatgcctatgggcatggggctgtgagggttgcggttgcagcaataagggcaggcgtttcttatttggctgttgcctccattcaggaagctgtcgaattaagagaggccggtattgtagccccgattatttctttaagtcttcccgtgcttgaagaaattcctgagcttttaaaatacgatattgagcccttggttatagatgaggagtttataaacgatttaaaccgttttgcaaaaaaactaaataaaaaagcctgggttcatcttaaaatagataccggaatgcgcaggataggctgctcgcctatggaagccgttaaacttgcggtacagatagaccgtgcagaaaatcttgagctaaaaggagtgtgtacgcatttcgctgtttccgattctaccgatgaaaaaaatattaaatttacaaaaaaacagatttctgtttttaaggactcaataaaagaaataaaaaaagcggggattaatcccggattaattcatgccgcaaattcaggatctgttcttcaatatcccgaagcccagttcgatatggtgcgtccgggaatcttggtctacggttatgcaccctctccatccctaaattctttaatagatttaaagcctgtaatggagcttgttacacaggtagtgcttatcaaaaaaattgaaaaggatacaagcgtttcttatgatagatgttggacagccgaaaaagaaacatttgttgcaacccttcctataggctatgcggacggactcatgcgttcccttagcggattaaaagtgagaataggaaaagatttttttccgatcatcggacgcatttgtatggatcaatgtatgatagatataggcgcttctccatgggttcaaagatgggatgaggtttgtatcttcggtcctgtttcaaaagaacatcctaaaaataatacggcccaagatcttgcaaaaattgccggaactattccttatgagctgacatgcgatataaacaaaagagttccgcgtatttttattgatgaaaccatacaataa

SEQ ID NO: 32959 - protein, 379 aa, Treponema denticola ATCC 35405
MRATKAIIHLDNLQYNIKEIKKRLNKNVKICLPVKADAYGHGAVRVAVAAIRAGVSYLAVASIQEAVELREAGIVAPIISLSLPVLEEIPELLKYDIEPLVIDEEFINDLNRFAKKLNKKAWVHLKIDTGMRRIGCSPMEAVKLAVQIDRAENLELKGVCTHFAVSDSTDEKNIKFTKKQISVFKDSIKEIKKAGINPGLIHAANSGSVLQYPEAQFDMVRPGILVYGYAPSPSLNSLIDLKPVMELVTQVVLIKKIEKDTSVSYDRCWTAEKETFVATLPIGYADGLMRSLSGLKVRIGKDFFPIIGRICMDQCMIDIGASPWVQRWDEVCIFGPVSKEHPKNNTAQDLAKIAGTIPYELTCDINKRVPRIFIDETIQ

SEQ ID NO: 32960 - DNA, 1176 bp, Bacillus cereus ATCC 10987
  CDS (1)..(1176): transl_table=11
atgagtttgaaatatggaagagatacaattgttgaagttgacttaaatgcagtaaaacataatgtaaaagaatttaaaaaacgtgtgaatgatgaaaatattgcaatgatggctgctgtaaaagcaaatgggtatggccacggagcagttgaagttgcgaaagctgctattgaagcgggaataaaccagcttgcagttgcatttgtagatgaagcgatagagttaagagaagcaggaattaacgtgccgattttaattttaggctatacgtcagtagcggctgcggaagaagcaattcaatatgacgttatgatgactgtttatagaagtgaagatttacaaggtataaatgaaatcgcaaaccgtcttcaaaagaaagcgcaaattcaagtgaaaattgatacagggatgagtcgtatcggtttacaagaagaagaggttaaaccatttttagaagaattaaaacgtatggagtatgtggaggtagtaggaatgtttacacattactctacggcagatgaaatcgataaatcatatacgaatatgcaaacaagtttatttgagaaagctgtcaatgcagcaaaagaattaggaattcatattccgtatattcatagttcaaatagtgcaggttcaatggaacttagcaatacatttcaaaatatggttcgtgtaggtatcggaatttatggaatgtatccttcaaaagaggtagatcattcagttgtttctctacagcctgcgttgtcgttaaaatcaaaagtagcccatattaagcatgcgaagaaaaatcgcggtgtaagttatgggaatacgtatgtaacgactggtgaagaatggattgccactgtaccgattggttatgctgatggctataaccgtcagttatctaataaagggtatgcattaataaatggagttcgagtacctgttattggtcgtgtttgtatggatcagcttatgttagacgtttcaaaagcaatgccagtacaagtgggagacgaagtagtattctacggtaaacaaggcgaagaaaacatcgcagtagaagaaatagcggatatgttaggtacaattaactatgaagttacatgtatgttagacagaagaatcccgcgagtttataaagaaaataatgaaacgactgctattgtaaatatactaagaaaaaactga

SEQ ID NO: 32961 - protein, 391 aa, Bacillus cereus ATCC 10987
MSLKYGRDTIVEVDLNAVKHNVKEFKKRVNDENIAMMAAVKANGYGHGAVEVAKAAIEAGINQLAVAFVDEAIELREAGINVPILILGYTSVAAAEEAIQYDVMMTVYRSEDLQGINEIANRLQKKAQIQVKIDTGMSRIGLQEEEVKPFLEELKRMEYVEVVGMFTHYSTADEIDKSYTNMQTSLFEKAVNAAKELGIHIPYIHSSNSAGSMELSNTFQNMVRVGIGIYGMYPSKEVDHSVVSLQPALSLKSKVAHIKHAKKNRGVSYGNTYVTTGEEWIATVPIGYADGYNRQLSNKGYALINGVRVPVIGRVCMDQLMLDVSKAMPVQVGDEVVFYGKQGEENIAVEEIADMLGTINYEVTCMLDRRIPRVYKENNETTAIVNILRKN

SEQ ID NO: 32962 - DNA, 1122 bp, Methanococcus maripaludis S2
  CDS (1)..(1122): transl_table=11
atggtttcacatccgatatgggcagaaattgacttaagcgcaattaaaaacaatattaaagaaataagacgaattacaaaccccaaatcccaggtaatggcagtagtaaaagcaaatgcttacggacacggctcagtcgaggtttcaaaaatatgccttgaaaacggggccgataggttagcagttgcacgttcaacggaagctcttgaacttagggatgcaggaataacctgtccaatacttgtatttggatatgttaccgaagaagaaattttgaaaatggttgaaaatgatataactttaaccgtttattcacttgaaatcgcaaattcaatccaaaaaattgctgaaaaattgggaaaacattcaaaaatccatatcaaagtagacaccggaatgagtagacttggatttttgcccgagaaatcgtcggtagaaaccataaaaaaaatcagggaactggaaaacatcgaagttgaaggaatttacacgcattttgcagatgcagataattctgataaaacatacaccactatgcaattttctaaatttacgagttttttacacgatctcgaggaaaatggaattgatattccaataaaacacgcatcaaatagcgctgcaataattgaccacccggaaacacatctcaatatggtaagacccggaattattctatacgggctttacccttcagaactggtccacaaggaaagaattaatttacaacctgcaatgagtttgaaggtacttgtaacgcatgtaaaagacgttccagaaaatacaaaaataagttatggatgcacttttgaaaccaaaaaacaatcaaaaattgcatcacttccaatagggtatgccgatggattcacaagaatgttacgaaatgggaatgtcctgatccatggattgcgggttcctgttgttggcagaatctgcatggatcagtgcatgattgatgttacaagtattgaaaacgtaaacgttggagacgttgtcacagtatttggaaaagacggaactgaaaaaatctccattgaagagtttggtaataaattgggaaccataaattacgaacttgtttgcatggtatctgcaagagttccaagaatatatttacattaa

SEQ ID NO: 32963 - protein, 373 aa, Methanococcus maripaludis S2
MVSHPIWAEIDLSAIKNNIKEIRRITNPKSQVMAVVKANAYGHGSVEVSKICLENGADRLAVARSTEALELRDAGITCPILVFGYVTEEEILKMVENDITLTVYSLEIANSIQKIAEKLGKHSKIHIKVDTGMSRLGFLPEKSSVETIKKIRELENIEVEGIYTHFADADNSDKTYTTMQFSKFTSFLHDLEENGIDIPIKHASNSAAIIDHPETHLNMVRPGIILYGLYPSELVHKERINLQPAMSLKVLVTHVKDVPENTKISYGCTFETKKQSKIASLPIGYADGFTRMLRNGNVLIHGLRVPVVGRICMDQCMIDVTSIENVNVGDVVTVFGKDGTEKISIEEFGNKLGTINYELVCMVSARVPRIYLH

SEQ ID NO: 32964 - DNA, 1086 bp, Thermus thermophilus HB27
  CDS (1)..(1086): transl_table=11
atgcctgctggccctatagggctcgttgaggtggaagagcgggcctgggtggaggtggacctcgccgccctttgggcgaactaccggcttctcgccgggcgggcgggaggggaggtgatccccgtgctcaaggcggacgcctacggccacggggcccttcccctcgcccgcttcctggagggaaagggcgtggggcgcttcgccgtggccaccctggaggaggggaggcgcctccgggaagggggcatcaagggggaggtcctccttctcggaagcctccaccccctggaggcggaggaggccttggagcttggcctcgtgcccaccctctccaccctggaggcggcggaggccctttcccagagggcccgcgccctgggccttgtgccccgggcccacctcaaggtggacacgggcatgaaccgggtgggctttccctgggaggaggcggcttcggccctgcgggcggtggaggccttgggggtgagggtggagggcgtctacacccacctcgccaccgccggggaggacgcggccttcgtggagacgcagcggcgccgcttccaggaggtgcgccgcgccttgggggaggggtacttctaccacctggagaactccctgggcctcctccgccacggggccacggcgggggtgcgggtggggctcgccctctacggcctcgtccccggctttggcctcaggcccatcctccggatcctcgcccggcccaccctggtgaagcgcctgaaggcgggggaccgggtggggtacgggggggtctatgtggcccggggcggggagtggctcgccaccctgcccgtggggtacgccgacgggcttccctggggggcggtgcggttcgtgaaggggccggacggccgccttctggaggtggcgggccggatctccatggaccagaccaccgtccttctccccggccccgtgggcctcgaggccgtgtttgaggtgctctcggccgacttcggccccacgggcctcctcgcctgggccgaggcccggggcaccctcccttatgaggtggccgtccacctttcccggaggcttccccgccgctacctggagtag

SEQ ID NO: 32965 - protein, 361 aa, Thermus thermophilus HB27
MPAGPIGLVEVEERAWVEVDLAALWANYRLLAGRAGGEVIPVLKADAYGHGALPLARFLEGKGVGRFAVATLEEGRRLREGGIKGEVLLLGSLHPLEAEEALELGLVPTLSTLEAAEALSQRARALGLVPRAHLKVDTGMNRVGFPWEEAASALRAVEALGVRVEGVYTHLATAGEDAAFVETQRRRFQEVRRALGEGYFYHLENSLGLLRHGATAGVRVGLALYGLVPGFGLRPILRILARPTLVKRLKAGDRVGYGGVYVARGGEWLATLPVGYADGLPWGAVRFVKGPDGRLLEVAGRISMDQTTVLLPGPVGLEAVFEVLSADFGPTGLLAWAEARGTLPYEVAVHLSRRLPRRYLE

SEQ ID NO: 32966 - DNA, 1131 bp, Desulfovibrio vulgaris subsp. vulgaris str. Hildenborough
  CDS (1)..(1131): transl_table=11
atgcccatatcctacaacaaggcgagtgttgtcgtcagtctccaatccataatcgccaactatcgccggattcgtacggtggcacagcggcccatgcccgtcatcaagtccgatgcgtacggccacggccttgaagctgtgggcatggcccttgaggccgaaggtgcacgtgaatgcgccgtcggtacggtgggggagggggcgaagctgcgcaaggccggtttcggggcggatatcgtcgccctgcttggggccctcgacagagaggacgcccagttggcggcctcttccggcatcatccccaccgtccttgatatcgccgggcttgaacgccttgccgcgcagggtacccccgaaaggccggtgcgcgtggcgctcaagttcgatacgggcatggcccgtctcggcttcacggaacatgatgtgtctgccctttgcgagcgtctgcgcaccctgccttcggtgcggcccgtcatggcggtatcgcatctcgccgttgccgacgaccccacccagtcggccttcacgatggcgcagggggccgcattcgcgcgtatcatggcggggcttcgaagcaacttccccgatatcatggggtcgctgtcaaactccgcagccacgctggcgcacccgcaactgcactgggacgtgcagcgtcccggcatcgccctctatggttcgaatccccttcgcgggacggcccttgcacggcatggcgaagggctgttgcccgccatgtccgtctccgtgccggtgttgcaggtccatccgctgcccgcggggcgtagtatcagctacgggcggacgtacaccgccaccaaagatgcgaccgtggccatcatagccgccggatacgccgacaactacagccgcgccctgtcagggcgtggtgttgctgtagctggcgggcggcgtgtgcctgttcttggtcgcgtgtgcatgcagaccacggccatcgacgtcaccgacgtacccggcatcgccacgggagaccgtgtatggctgcttggtggccccggccccgccacggtctcggctgatgaactggccgacctgtgggggacgatatcctatgaagtgctgtgtctgcttggcatgaacccgcgcaggcatgacgactctgtggagtag

SEQ ID NO: 32967 - protein, 376 aa, Desulfovibrio vulgaris subsp. vulgaris str. Hildenborough
MPISYNKASVVVSLQSIIANYRRIRTVAQRPMPVIKSDAYGHGLEAVGMALEAEGARECAVGTVGEGAKLRKAGFGADIVALLGALDREDAQLAASSGIIPTVLDIAGLERLAAQGTPERPVRVALKFDTGMARLGFTEHDVSALCERLRTLPSVRPVMAVSHLAVADDPTQSAFTMAQGAAFARIMAGLRSNFPDIMGSLSNSAATLAHPQLHWDVQRPGIALYGSNPLRGTALARHGEGLLPAMSVSVPVLQVHPLPAGRSISYGRTYTATKDATVAIIAAGYADNYSRALSGRGVAVAGGRRVPVLGRVCMQTTAIDVTDVPGIATGDRVWLLGGPGPATVSADELADLWGTISYEVLCLLGMNPRRHDDSVE

SEQ ID NO: 32968 - DNA, 1107 bp, Listeria monocytogenes str. 4b F2365
  CDS (1)..(1107): transl_table=11
atggtgacaggctggcatcgtcctacatggattgagatagaccgcgcagcaattcgcgaaaatataaaaaatgaacaaaataaacttccagaaaatgtggatttatgggcagtagtcaaagctaatgcatatggtcacggaattatcgaagttgctagaacagcgaaagaagctggagcaaaaggtttctgtgttgccattttagatgaggcgttggctcttagagaagctgggtttcaagatgactttattcttgtacttggcgcaactagaaaagaagatgcaaatttagcggccaaaaaccacatttccctcactgtttttagagaggactggctagaggaactaaccttagaagcgccacttcgcattcatttaaaagtagatagcggtatggggcgtcttgggattcgtacaaccgacgaagcaaggcgaatcgaaacgacaattgctaaagacaatcaactacaactagaaggtatctacacgcattttgcgacagccgaccaacttgaaactagttatttcgaacaacaattagctaagttccaaaccattttaacgagtttaaaaaatcgcccaacgtatgttcatacagccaattcagctgcttcattattacagccacaaatcgggtttgatgcgattcgctttggtatatcgatgtacgggttaaccccttccaccgaaatcaaaactagcttaccatttgagcttaaaccagcccttgcactctataccgaaatggttcatgtgaaagaactcgcaccaggtgatagtgttagctacggagcaacctacactgcaacagaacgagaatgggttgcaacgttaccgattggctatgcagatgggttgattcgtcattacagcggatttcatgttttagtagacggggaactagccccaattataggacgcgtttgtatggatcaaaccatcataaaactaccgcgcgaatttcaaactggttcaaaagtaacgataattggcacggaccatggaaacacgataacagcagatgatgccgctcactatttagatacaataaattatgaggttacttgtttgttaaatgagcgtatacctagaaaatacatccattag

SEQ ID NO: 32969 - protein, 368 aa, Listeria monocytogenes str. 4b F2365
MVTGWHRPTWIEIDRAAIRENIKNEQNKLPENVDLWAVVKANAYGHGIIEVARTAKEAGAKGFCVAILDEALALREAGFQDDFILVLGATRKEDANLAAKNHISLTVFREDWLEELTLEAPLRIHLKVDSGMGRLGIRTTDEARRIETTIAKDNQLQLEGIYTHFATADQLETSYFEQQLAKFQTILTSLKNRPTYVHTANSAASLLQPQIGFDAIRFGISMYGLTPSTEIKTSLPFELKPALALYTEMVHVKELAPGDSVSYGATYTATEREWVATLPIGYADGLIRHYSGFHVLVDGELAPIIGRVCMDQTIIKLPREFQTGSKVTIIGTDHGNTITADDAAHYLDTINYEVTCLLNERIPRKYIH

SEQ ID NO: 32970 - DNA, 1119 bp, Bartonella quintana str. Toulouse
  CDS (1)..(1119): transl_table=11
atgaacaaatccatgaataataaagcaaacccattacttccttatacagctgtagcaaccatcgatgtgagtgccattgttgctaattataaaactttagcccaacgtgttgctccagctgaatgttcagcagttgtgaaagccaatgcttatgggctgggtgctgataaaattgccccggcactctatcgtgctggttgccgcattttttttgtagctcaaatcgaagaagcacttcaattaaaagacattttaccgtcaaatgttacacttgctcttcttaatggacctccacacgctacagaagagtttatagctcaagcaggtattgtccctgttctaaactcttggaatgccattgaaaattggcaaaaactttgtcaaaaaaaggataaaaaatttcccgcaatcattcaaatcgataccaatatgaatcgattaggacttgataaaaaagaattacaacaacttatcaaaaaaccgactatttttgaaaaagcagagataaaatatatcctcagtcaccttgcgaacggagatgatgccacacattcctccaattatacacaattggctgcttttaaaaccgtacttacacaattgcctacctgcagagcttcctttgccaattctggtggtatttttcttggtccagatttttattttgaccttgttcgcccaggcattgcactttacggaatcgatccccaaggaaaacatccaacccttttcaaacctgttttaaaacttgaagctcaagtcattcaaagccgctctattgaggcaggaatccccgttggttacgaagaaagtttcattaccagaagaccaagcactctcataaccatttctatcggctatgcagacggttggctacgcattctttcaaataaaggaaccgtttatttcaatgggcacaaactccctattgttggacgtatttcgatggattccatgacagtggatgctaccaatcttgataaaaaacctcaaagcggtgactgggtagagctcatcggacctcatcaaacacttaaaaaagtatcgatagatgccaacactattcctcatgaaattctgacttctttaggatctcgctatcaacgtatttatatttaa

SEQ ID NO: 32971 - protein, 372 aa, Bartonella quintana str. Toulouse
MNKSMNNKANPLLPYTAVATIDVSAIVANYKTLAQRVAPAECSAVVKANAYGLGADKIAPALYRAGCRIFFVAQIEEALQLKDILPSNVTLALLNGPPHATEEFIAQAGIVPVLNSWNAIENWQKLCQKKDKKFPAIIQIDTNMNRLGLDKKELQQLIKKPTIFEKAEIKYILSHLANGDDATHSSNYTQLAAFKTVLTQLPTCRASFANSGGIFLGPDFYFDLVRPGIALYGIDPQGKHPTLFKPVLKLEAQVIQSRSIEAGIPVGYEESFITRRPSTLITISIGYADGWLRILSNKGTVYFNGHKLPIVGRISMDSMTVDATNLDKKPQSGDWVELIGPHQTLKKVSIDANTIPHEILTSLGSRYQRIYI

SEQ ID NO: 32972 - DNA, 1176 bp, Bacillus thuringiensis serovar konkukian str. 97-27
  CDS (1)..(1176): transl_table=11
atgagtttgaaatatggaagagatacaattgttgaagttgacttaaatgcagtaaaacataatgtaaaagaatttaaaaaacgtgtgaatgatgaaaatattgcaatgatggctgctgtaaaagcgaatgggtatggtcatggggcagttgaagttgcaaaagctgctattgaagcaggaataaatcagcttgcagttgcatttgtagatgaagcgatagagttaagagaagcaggaattaacgtgccgattttaattttaggctatacatcagtagcatctgcggaagaagcaattcaatatgacgttatgatgactgtttatagaagtgaagatttacaaggtataaatgaaatcgcaaaccgtcttcaaaagaaagcgcaaattcaggtgaaaattgatacaggaatgagtcgcattggtttacaggaagaagaggttaaaccatttttagaagaattaaaacgtatggagtatgtagaggtagtaggaatgtttacacattactctacggcagatgaaatcgataaatcatatacgaatatgcaaacaagtttatttgagaaagctgtcaatacagcaaaagaattaggaattcatattccatatattcatagttcaaatagtgcaggttcaatggaacttagcaatacatttcaaaatatggttcgtgtaggtatcggaatttatggaatgtatccttcaaaagaggtagatcattcagttgtttcgttacagcctgcgttgtcgttaaaatcaaaagtagcccatattaagcatgcgaagaaaaatcgcggtgtaagttatgggaatacgtatgtaacgactggtgaagaatggattgccactgtacctattggttatgctgatggttataatcgtcagttatctaataaagggcatgcattaataaatggagttcgagtacctgttattggccgtgtttgtatggatcagctcatgttagacgtttcaaaagcaatgccagtacaagtgggagacgaagtagtattctacggtaaacaaggcgaagaaaacatcgcagtagaagaaatagcggatatgttaggtacaattaactatgaaattacatgtatgttagatagaagaattccacgtgtgtataaagaaaataatgaaacgactgctattgtaaatatactaagaaaaaactga

SEQ ID NO: 32973 - protein, 391 aa, Bacillus thuringiensis serovar konkukian str. 97-27
MSLKYGRDTIVEVDLNAVKHNVKEFKKRVNDENIAMMAAVKANGYGHGAVEVAKAAIEAGINQLAVAFVDEAIELREAGINVPILILGYTSVASAEEAIQYDVMMTVYRSEDLQGINEIANRLQKKAQIQVKIDTGMSRIGLQEEEVKPFLEELKRMEYVEVVGMFTHYSTADEIDKSYTNMQTSLFEKAVNTAKELGIHIPYIHSSNSAGSMELSNTFQNMVRVGIGIYGMYPSKEVDHSVVSLQPALSLKSKVAHIKHAKKNRGVSYGNTYVTTGEEWIATVPIGYADGYNRQLSNKGHALINGVRVPVIGRVCMDQLMLDVSKAMPVQVGDEVVFYGKQGEENIAVEEIADMLGTINYEITCMLDRRIPRVYKENNETTAIVNILRKN

SEQ ID NO: 32974 - DNA, 1149 bp, Staphylococcus aureus subsp. aureus MRSA252
  CDS (1)..(1149): transl_table=11
atgtcagataaatattatagatctgcgtatatgaatgtagatttaaacgctgttgcatcaaatttcaaagtattcagtacattgcatccaaataaaacagtgatggctgtcgttaaagccaatgcctatggactaggtagtgttaaagtagcacgtcatttaatggaaaatggtgccacattttttgctgtagcaacgttagatgaagcgatagaacttagaatgcatgggattactgctaaaattttagtcttaggtgtgttaccagctaaagatattgataaagcgatacaacaccgagttgccttaacggttccgtctaaacagtggttgaaagaagcaattaaaaacatttctggtgagcaagagaaaaagttatggttgcatattaaattagatacaggaatgggacgtttaggtattaaagatactaaaacgtatcaagaagtgattgaaatcattcaacaatatgagcaacttgtatttgaaggcgtgtttacacactttgcctgtgctgacgaaccaggagatatgacaactgaacaatatcaccgttttaaagatatggtcaatgaagcaattaaacctgaatatatacattgtcagaactcagcaggttctctattaatggattgccaattctgtaatgcaataagaccaggaatttccctttatggatattatccatcagagtatgtacagcaaaaagttaaagtacaccttaaaccaagtgtgcaattaattgctaatgtagttcaaacaaagacgctacaagcgggtgagtctgtaagttatggtgcaacttatacagctactgatccaacaacaatagcattgttacctattggatatgcagatggctatttacgcattatgcaaggtagctttgtaaatgtaaatggtcatcaatgcgaagttattggtcgcgtatgtatggatcagacaattgtaaaagtgccagatcaagttaaagctggagattcggtgattttaatagataatcatagagaaagtccacagtcggtagaggtggcagctgaaaagcaacatactattaattatgaagtgctttgtaacttgtcgagacgtttgccgcgaatctatcatgatggtgatcaacgttttgtaacaaatgaattgttaaaataa

SEQ ID NO: 32975 - protein, 382 aa, Staphylococcus aureus subsp. aureus MRSA252
MSDKYYRSAYMNVDLNAVASNFKVFSTLHPNKTVMAVVKANAYGLGSVKVARHLMENGATFFAVATLDEAIELRMHGITAKILVLGVLPAKDIDKAIQHRVALTVPSKQWLKEAIKNISGEQEKKLWLHIKLDTGMGRLGIKDTKTYQEVIEIIQQYEQLVFEGVFTHFACADEPGDMTTEQYHRFKDMVNEAIKPEYIHCQNSAGSLLMDCQFCNAIRPGISLYGYYPSEYVQQKVKVHLKPSVQLIANVVQTKTLQAGESVSYGATYTATDPTTIALLPIGYADGYLRIMQGSFVNVNGHQCEVIGRVCMDQTIVKVPDQVKAGDSVILIDNHRESPQSVEVAAEKQHTINYEVLCNLSRRLPRIYHDGDQRFVTNELLK

SEQ ID NO: 32976 - DNA, 1098 bp, Acinetobacter sp. ADP1
  CDS (1)..(1098): transl_table=11
atgccacgtccgattcaggctgttattcatcttgaagcacttgcgcacaatcttaagattgtgcgtgcatctgccccagaaagtcaagtctttgcagtagttaaagccaacgcttatgggcatggaattgaacgcgtttatcaggcatttaaacaggcagatggatttgcactgctggatattgaagaagccaaacgattacgcgctctgggctggacagggccgattttattgctcgaaggcattttttcgccgcaggatctatttgactgcgttcaataccagttgagctttactgtacatcatgatgttcagattgactggatcgaaggtcatcctgaagacgcccagttcgatatttttcttaaaatgaatagtggcatgaaccgtcttgggtttaaacctgtgcagtatcgtcatgcctggcagcgtttaaatgcactttcccaagtcagacacctgacgcatatgatgcatttttctgatgcggatggtgagcgttttggcgagtcgggaattacctatcaacatgatctgtttgaagacaccattcgtgatttgccaggaccaaaatcggtcagcaacagcgctgctattttacgccatccgttgcactccgatgtggtgcgtggcggaattatgctctatggcagttcacccgattatccaacacatggtcttcatgactggtcactcaaacccacgatgagcttgcgtagcgagattattgctatccagatgctggaacccaatgaaagtgtgggctatggctcaagttttgtggcagatcaaccgcttcggatcgggattgtggcatgtggctatgcagatggttatcaacgaatttctccgacaggaacgcctgtactggttgatggtattgaaacgagaaccattggacgtgtgagtatggacatgctcgccgttgatctgagcgcagttcctaaggcaagaattggttcggaggtggtgctttggggatactcctccacgggtgtgattttaccgattgatgatgtcgcggcagcatctggcaccgtcggttatgaactgatgtgtgctgtgaccgcacgtgttccttttacaattcaaacataa

SEQ ID NO: 32977 - protein, 365 aa, Acinetobacter sp. ADP1
MPRPIQAVIHLEALAHNLKIVRASAPESQVFAVVKANAYGHGIERVYQAFKQADGFALLDIEEAKRLRALGWTGPILLLEGIFSPQDLFDCVQYQLSFTVHHDVQIDWIEGHPEDAQFDIFLKMNSGMNRLGFKPVQYRHAWQRLNALSQVRHLTHMMHFSDADGERFGESGITYQHDLFEDTIRDLPGPKSVSNSAAILRHPLHSDVVRGGIMLYGSSPDYPTHGLHDWSLKPTMSLRSEIIAIQMLEPNESVGYGSSFVADQPLRIGIVACGYADGYQRISPTGTPVLVDGIETRTIGRVSMDMLAVDLSAVPKARIGSEVVLWGYSSTGVILPIDDVAAASGTVGYELMCAVTARVPFTIQT

SEQ ID NO: 32978 - DNA, 1083 bp, Erwinia carotovora subsp. atroseptica SCRI1043
  CDS (1)..(1083)
atgaaaacggcaactgccgtcattaaccggcgtgcgttacgccacaacctgcaacgaatccgccagttagcgcctggcagccagatcgttgccgtcgtgaaagccaacgcctacggccacggcatgatcgaatccgctcataccttctgcgatgctgactgttacggcgtcgcgcgactctccgaagcgctggcgctgcgtgccgcaggcatcaccaaacctatcgtcctgctggaaggctttttctccgccgacgatctcccgcttctggtggaacaccagctagaaaccgccgttcacagcctcgaacagcttgctgcgttggagcaagccacgttgccgcagccgatacgcgtgtggatgaagctcgatactggcatgcaccgccttggcgttctgccggaacatgccgacgcgttttggcaacgcctgaccgaatgtcggaatgtcgtgcagccggtcaatatcatgagccacttttgccgcgccgatgaacccgaggccggaaccaccgaacgccagttggcctgcttcgatgcctttacccaaggtaaacccggcgcacagtccatcgcggcttccggcggtattctactgtggccgcaagcgcaccgcgatcgcgtccgccccggcattatcctctatggcgtgtcgccgctggataacgaagacgccgcgcatttcggcttccagcctgccatgacctttacgtctcaccttatcgccgttcgtgaacacaaagcgggtgaaaccgtcggctatggcggcacttggaccagcccgcgcgatacccgtctgggcgtcgtcgctgtcggctacggcgatggctacccgcgttgcgcccccgcaggtacgcccgtgctcatcaacggtcgcgaagtaccgctttccggccgcgtatcgatggatatgattacggttgatttagggccggatgctcaggataaggtcggcgatgaagtcatcctttgggggccaacgctatcggttgaacgcattgcggcacacacgggtgccagcgcctacgagctgatcacccgtttaacacagcgcacggcgttggaatacgtcgacggtgagtaa

SEQ ID NO: 32979 - protein, 360 aa, Erwinia carotovora subsp. atroseptica SCRI1043
MKTATAVINRRALRHNLQRIRQLAPGSQIVAVVKANAYGHGMIESAHTFCDADCYGVARLSEALALRAAGITKPIVLLEGFFSADDLPLLVEHQLETAVHSLEQLAALEQATLPQPIRVWMKLDTGMHRLGVLPEHADAFWQRLTECRNVVQPVNIMSHFCRADEPEAGTTERQLACFDAFTQGKPGAQSIAASGGILLWPQAHRDRVRPGIILYGVSPLDNEDAAHFGFQPAMTFTSHLIAVREHKAGETVGYGGTWTSPRDTRLGVVAVGYGDGYPRCAPAGTPVLINGREVPLSGRVSMDMITVDLGPDAQDKVGDEVILWGPTLSVERIAAHTGASAYELITRLTQRTALEYVDGE

SEQ ID NO: 32980 - DNA, 1128 bp, Propionibacterium acnes KPA171202
  CDS (1)..(1128): transl_table=11
atgccacgttgtccatcgccttctcacgccattattgatctgtctgccatcgctgcgaacctcgccgtcgtgaggaaacgcgcaggcgaccgaaaggtcctctttgccgtcaaggccgacgcctatgggcatggggcagtggaagtctcgcgctatgtcgaaaaacaccggtatgccgactggctcgccgtcgccacggtcgctgaaggccaagagctggttgaagccggcatcaccctgcccatactcaaactctcccccgccgatccttgggacatggatgcagccattacgtccgggattcgtctcaccgtggtggatttcgacaccctggaggcggtaagcaaagccgctgtacgactaggaatcactgccaagattcatatcgctgttgatagcggcatgggacgcatcgggctgcgtcctgaatgccttgctgaactcactgctgccgctgaccgcgccaaaggcgtcgaagtcgaaggcgtcttcactcacctgcccattagcgatgtgccggagggggcggagttcacccgccgcgagatcgacactttcatgactgctgtctcgctgatagaaacacatcgtgggccgttcccccttgtgcacctggccaattccggcgccatcctcgggcacgatctggggaaaacctccatggtgcgcgccggcatcgttgggtacggatacgatcccaaccctcacgccgaccgtgccgacctacaccctgccctgtcctggatcagccacgtcaccttcgttaaaactgtcagtgtgggggataccatcggctacggcagaacatggacagccagcgaaacgacaaaaatcgccaccgtcccagtcggttacgccgacggactgtcccgaggactgtcaaataaaggacacgttctcattagagggtccgttcatcccatcgtcggtcggatctgcatggaccaattcatggtcgatcttggccccgattcgaacgtcacggtgggagatgaggtggtgctcattggaacccaggaggacgaaactctgaccgctgatgacatggccgaactcctcggaaccattagctacgagatcacttgcgccatttccaaacgcgtggatcggtactgggtcgggcagtga

SEQ ID NO: 32981 - protein, 375 aa, Propionibacterium acnes KPA171202
MPRCPSPSHAIIDLSAIAANLAVVRKRAGDRKVLFAVKADAYGHGAVEVSRYVEKHRYADWLAVATVAEGQELVEAGITLPILKLSPADPWDMDAAITSGIRLTVVDFDTLEAVSKAAVRLGITAKIHIAVDSGMGRIGLRPECLAELTAAADRAKGVEVEGVFTHLPISDVPEGAEFTRREIDTFMTAVSLIETHRGPFPLVHLANSGAILGHDLGKTSMVRAGIVGYGYDPNPHADRADLHPALSWISHVTFVKTVSVGDTIGYGRTWTASETTKIATVPVGYADGLSRGLSNKGHVLIRGSVHPIVGRICMDQFMVDLGPDSNVTVGDEVVLIGTQEDETLTADDMAELLGTISYEITCAISKRVDRYWVGQ

SEQ ID NO: 32982 - DNA, 1113 bp, Leifsonia xyli subsp. xyli str. CTCB07
  CDS (1)..(1113): transl_table=11
atgacgatcgtggacgccgtcgccgaaccactcccccgcgctgtggtcgatctggccgccctgcgccgcaatgtggcgacgctcacgcgcctgatcgcgcccgccgagaccatgctggcggtcaaggccgacgcctacgggcacggcctgctgccgatcgcggaagccggagtgcaggcgggcgccacctcgctcgccgtgctggagatctccgccggactagtgctgcgccgggccggggtgaccgtcccgctgctcgcctggctgcacggcaccggcaccgactggcgcgcgggcatcgagaacgacatccagctcggcatctccgcccgctggcagctggaggccatcgccgccgccgccgcggaccgcgccgcgatcgtgcacctgaaggtggacaccgggctcagccgcaacggcgccacccgcgaggagtggccggcgctggtggatgccgcgctcgcgctgcaggagaccggggtcgtgcgcctccgcgccgcctggtcacacctcgccgatgcctcgatcgccgacgacgaggccgctctcgcggagttccgggaagcggtcgccgaggccgaagcccgtggcgcccgcttcgagatgctgcacctcgccgcgagctcggcgggcatccggatgccggaggcccggttcgctctggtccgcttcggcatcgccgcctacgggctctcccccttcgacgacaccaccggcgccgagctcggcctgcggccggtcatgcggctggaggcgccggtcatcgctgtgcatgtcgacggcaccacgcacgtccgcctcggcatcggcttcgcggacggcgtccccactctcggcctcgcccggacctcggtcctgctggggggacggcgctgccccgtgatcgccgtggaggcggacgcaatgctggtggatgccggagcccagcgcgtcgagcggggcgacaccgccgtgctcttcggcccgggcgacagcggcgaggccacggccgaggagtatgcggaatgggccgggacgatcgccgacgagatggtcaccggcgtcgcggcgcgggttccgcgggtctacgtgggcgacgacgagggcgcggggctcaccggcacgcgcgggtaa

SEQ ID NO: 32983 - protein, 370 aa, Leifsonia xyli subsp. xyli str. CTCB07
MTIVDAVAEPLPRAVVDLAALRRNVATLTRLIAPAETMLAVKADAYGHGLLPIAEAGVQAGATSLAVLEISAGLVLRRAGVTVPLLAWLHGTGTDWRAGIENDIQLGISARWQLEAIAAAAADRAAIVHLKVDTGLSRNGATREEWPALVDAALALQETGVVRLRAAWSHLADASIADDEAALAEFREAVAEAEARGARFEMLHLAASSAGIRMPEARFALVRFGIAAYGLSPFDDTTGAELGLRPVMRLEAPVIAVHVDGTTHVRLGIGFADGVPTLGLARTSVLLGGRRCPVIAVEADAMLVDAGAQRVERGDTAVLFGPGDSGEATAEEYAEWAGTIADEMVTGVAARVPRVYVGDDEGAGLTGTRG

SEQ ID NO: 32984 - DNA, 1119 bp, Leifsonia xyli subsp. xyli str. CTCB07
  CDS (1)..(1119): transl_table=11
gtgagcgctcccttccgcgagctcgtcgtcgacctcgacgcggtgagcgcgaatgtcgtgcgcctgcgcgaacgggccgggaccccgcacctgatggcggtcgtgaaggcggacgcctacggccacggggccgtcgagtccgcttgcgccgcgctcgccgggggcgcggactggctcggcgtggccgatctctccgaggcgtcgcagctgcgggccgccgggatcgaagcgcccctgctcgcgtggctccacgacccggacgaggacttcgtcgcggccatcgcggccggagtggatattggggtctcctccctcgcccacctggaggccgcggcagcggccggtggcggcagcccggccttcgtccagctcaagctggagacggggctcagccgcaacggcctccccgaggagcagtgggaggctgtgttcgcccgcgcgcacgaactcgagaggagcgggcggatcgtggtccgcggcgtcttcagccacctctccaacgcttcgcctgcggaggaccgcgccgccatcgcagcctacgagcgcgggctcgcccgcgccgaggccgctggactcgcgccggagctgcggcacatcgctgcgagcgcggctgcgatcagcctgccggaggcgcggttcaccctggtccggctcgggctcgcgatctacggcctcagccctttcggcgccgcctccgccaccgagctcgggctgcgccccgcgctgacgctgcgggcgcgcgtcgccgccgtccgccgcgttcccgccgggaagggcgtttcctacgactacacgtaccgcaccgaacgcgagacgacgctcgcgcttgtgcccgtcggctacggcgacggccttccgcgtcacgcgtccaacctcggcccggtgtcgatcggcggcgagcgtttccgcgtctccgggcgcatcgcgatggaccagttcgtcgtggatgtcggcgacgcgccggtggccgtcggcgatgaggtcgttctgttcggcgatccggcccgcggcgtccccggtgcggacgactgggcggcggccgccgaaacgatcaactacgagatcgtcacgcgcctgggcggacggctccgccgcaccttccgcggcggcccggcgtga

SEQ ID NO: 32985 - protein, 372 aa, Leifsonia xyli subsp. xyli str. CTCB07
MSAPFRELVVDLDAVSANVVRLRERAGTPHLMAVVKADAYGHGAVESACAALAGGADWLGVADLSEASQLRAAGIEAPLLAWLHDPDEDFVAAIAAGVDIGVSSLAHLEAAAAAGGGSPAFVQLKLETGLSRNGLPEEQWEAVFARAHELERSGRIVVRGVFSHLSNASPAEDRAAIAAYERGLARAEAAGLAPELRHIAASAAAISLPEARFTLVRLGLAIYGLSPFGAASATELGLRPALTLRARVAAVRRVPAGKGVSYDYTYRTERETTLALVPVGYGDGLPRHASNLGPVSIGGERFRVSGRIAMDQFVVDVGDAPVAVGDEVVLFGDPARGVPGADDWAAAAETINYEIVTRLGGRLRRTFRGGPA

SEQ ID NO: 32986 - DNA, 1122 bp, Desulfotalea psychrophila LSv54
  CDS (1)..(1122): transl_table=11
atgaaacgaaattcctttaataatgtgactgtatgtcgttctgccttaagaaaaaattttaagaccatgcaggacaagatgggccagggtgggaagctgatggctatggtcaaggctgatgcctatggtcatggcgcagttgaggtggcaaaggccctgcaggatgttgcctgtagctcttttggcgtagctgagattcgagaggctgtcctcctgcgagatgctggtattaccggtgatatctttgttatgcttggctttgatctggatgcggtcggccttatgtttgactataggctaacccccgttgttcactgctatgaagatattgtggccctttctgtagagggggtgaaacgtggttatgaaataggttgtcatataaaggtcgatacaggtatgaggcgtctgggctttgagcctgagcaggtacttggcgtagcccataatatttcccgactttcaggggtctttgttgccggaatgttaagccatttccccgaggcagatgttgtcaattctccatcaagtcgtgatggtattcgtcgctttgcaagtttagatgtggttttaaaatctgaattttcaactgtttgtcatcttgcaaattccggtggcgtgcttaactttcccgagtctctttttgatatgggccgttcgggtattagtatttatggttatcatcctgcaggtgcgatagagggtggaggcacgagtccctttattcctgccatgagttttcgtagcagaattttacaggttaaaaaggtggccgccggaacaggcgtcagttacggtcatagctatattaccaaaaggccaacacttcttgctgttttgccaacggggtatgaggatggttatcgtaggtctctgtccaataaggccgaggttttgattcgtggtcagcgggctcctgtacgtgggcagatatgtatgaatgcctgtgttgtggacgttaccgatattgaaaatgtgacggcaggggatgaggtcgtactcctcggtgagcagggaaatgagagaattacagcggatgatattgccgaatgggcagataccattagctatgaaatactttgtatgctggggcatacaaacaatagattgtatgtagattga

SEQ ID NO: 32987 - protein, 373 aa, Desulfotalea psychrophila LSv54
MKRNSFNNVTVCRSALRKNFKTMQDKMGQGGKLMAMVKADAYGHGAVEVAKALQDVACSSFGVAEIREAVLLRDAGITGDIFVMLGFDLDAVGLMFDYRLTPVVHCYEDIVALSVEGVKRGYEIGCHIKVDTGMRRLGFEPEQVLGVAHNISRLSGVFVAGMLSHFPEADVVNSPSSRDGIRRFASLDVVLKSEFSTVCHLANSGGVLNFPESLFDMGRSGISIYGYHPAGAIEGGGTSPFIPAMSFRSRILQVKKVAAGTGVSYGHSYITKRPTLLAVLPTGYEDGYRRSLSNKAEVLIRGQRAPVRGQICMNACVVDVTDIENVTAGDEVVLLGEQGNERITADDIAEWADTISYEILCMLGHTNNRLYVD

SEQ ID NO: 32988 - DNA, 1230 bp, Yersinia pseudotuberculosis IP 32953
  CDS (1)..(1230): transl_table=11
atgcacgttcgttttcgtcatttattcttattaccattaataactttggtcgcttgtagccaacccgtatcaaaaaaccatcttagcctgacctcactatctgccaacgcccagcaacctgtagtaaataatgcgtggcttgaaatctctcaaggtgcgctggatttcaatactaaaaagatgcttacactgctggataataaatccacactttgtgcaatattaaaaggtgatgcctatggacatgacctgaccttagtcacaccggtgatgctaaaaaacaatgtgcaatgtattggggttgccagcaatcaggaactaaaaatggtacgtgatctaggatttacggggcagttgatacgggtcagaagtgcaacattaaaagaaatgcaacaagctatggcttacgatgttgaagaacttattggcgataaaaccgtcgctgagcagttaaataatattgcaaaactgaatggaaaagttctgcgtatccatctggcactgaactccgcagggatgtctcgtaatgggctggaggtcagtaaggcccgcggtttaaatgacgcaaagacaattgcaggtttaaaaaatctgacaatcgttggcatcatgtcgcactacccggtggaagatgctagcgaaatcaaagcagacttggctcgattccagcaacaagccaaagatgttatcgcggtcacggggctaaaacgtgaaaagattaagctccacgtcgccaatacattcgcgaccttagcggtgcctgattcatggttggatatggtccgtgtgggaggggtgttttatggtgacaccatcgccagcacagagtataagcgggtcatgaccttcaaatctaacatcgcatcgctgaacaactaccctaagggcggtactgttggctatgaccggacctatacattgaaacgtgattccctgctggcgaatatccccgtgggttatgccgatgggtatcgccgagtatttagtaatgcggggcatgtgattattcaaggtcagcgcctgcccgtattaggcaaaacatcaatgaatacggtcatagtagacgtcaccgatctgaaaaaagtgagtttaggtgatgaagttgtcttgttcggtaagcaaggcaatgcggaaattcaggcagaagaaattgaagatctcagtggcgcactctttaccgaaatgtcaattctgtggggcgcaaccaataagcgtattctggtagattaa

SEQ ID NO: 32989 - protein, 409 aa, Yersinia pseudotuberculosis IP 32953
MHVRFRHLFLLPLITLVACSQPVSKNHLSLTSLSANAQQPVVNNAWLEISQGALDFNTKKMLTLLDNKSTLCAILKGDAYGHDLTLVTPVMLKNNVQCIGVASNQELKMVRDLGFTGQLIRVRSATLKEMQQAMAYDVEELIGDKTVAEQLNNIAKLNGKVLRIHLALNSAGMSRNGLEVSKARGLNDAKTIAGLKNLTIVGIMSHYPVEDASEIKADLARFQQQAKDVIAVTGLKREKIKLHVANTFATLAVPDSWLDMVRVGGVFYGDTIASTEYKRVMTFKSNIASLNNYPKGGTVGYDRTYTLKRDSLLANIPVGYADGYRRVFSNAGHVIIQGQRLPVLGKTSMNTVIVDVTDLKKVSLGDEVVLFGKQGNAEIQAEEIEDLSGALFTEMSILWGATNKRILVD

SEQ ID NO: 32990 - DNA, 1101 bp, Borrelia garinii PBi
  CDS (1)..(1101): transl_table=11
atgagtagtaacaaaacaataataataaatttaaataatttagaacataacttaaatttaattaaaaataaaattggtgaaaaagaaatagtggctaccctaaaaggcgacgcatatggtcacggacttataaatatctttaaattttttaaagaaaaaaaaataaattattttggactttctaatattgaagatgctaaaacacttaaaaaaattgataaaaatataaaaatattgatgtacattaaagtagataaaaaagaaattaaaaatttgattaaacttgagttattaccatttgttgcagattttgaatatctatttttaatagaaaaagaatgtgcattccaaaaaaagaaaataaaagttcacttaaaaattgatattggcatgaatagatatggaataagaatagatagtgcccttgaaatagctacatatattcaaaattcacaatttctagaactagaagggatctgctcacatcttccggcaacagaaaactttaaaactacacaaaaacaaatagaaaaatttttattggttttggaaacacttaaacaaaaaaatataaatccaaaatttatccatatttctaattcggggcacattatcaactacaaactaaatccacaatttaatatggtaagaccgggtcttattctttacggttattgtcaatcactaaaaaacaaaaaaactaccctaaatttcaaacccgtattaaatttattttcaaaagtaatatttatcaaaaatgtaaaaaaaggggaaaaaatttcatattcgggcatatttcaagccaaagaggatatgaaaataggaattattccaatcggatattttgatggaatacctcaaaatataaataataatttttattttttaataaacaatcaaaaatgtaaaataaagggaaaggtctgcatgaacctaacaatagtagaaattcctaaaaacttaaaagttagaataggttcaaaagtagaaattgtatcagaaaaattaagtatagataaaatgagtaaattttctaaaagaagtcattatgaattactatgtaatataggaaaatatgagaaaagaaaatacttagattaa

SEQ ID NO: 32991 - protein, 366 aa, Borrelia garinii PBi
MSSNKTIIINLNNLEHNLNLIKNKIGEKEIVATLKGDAYGHGLINIFKFFKEKKINYFGLSNIEDAKTLKKIDKNIKILMYIKVDKKEIKNLIKLELLPFVADFEYLFLIEKECAFQKKKIKVHLKIDIGMNRYGIRIDSALEIATYIQNSQFLELEGICSHLPATENFKTTQKQIEKFLLVLETLKQKNINPKFIHISNSGHIINYKLNPQFNMVRPGLILYGYCQSLKNKKTTLNFKPVLNLFSKVIFIKNVKKGEKISYSGIFQAKEDMKIGIIPIGYFDGIPQNINNNFYFLINNQKCKIKGKVCMNLTIVEIPKNLKVRIGSKVEIVSEKLSIDKMSKFSKRSHYELLCNIGKYEKRKYLD

SEQ ID NO: 32992 - DNA, 1134 bp, Symbiobacterium thermophilum IAM 14863
  CDS (1)..(1134): transl_table=11
atggatctggacggcatgcgcccgacgtgggcggaggtcgatctgaacgcggtccgggcgaacatccgggcgttgaagcggatctcgaaggctcctcgactgatggcggtggtgaaggcgaatggctacgggcacggcgccgtgcccgtggcgacggcggccatcgaggccggggcggactggctgggcgtcgcgtcggtggaggagggcgtgaccctgcgtcgccacggcatctccgcgcccatcctggtgctgggttacgtgtcccccggccaggccgaggccgtgctgacggaggggctgcgggtagccctcttcgacggcgaactggggcaggccctgaaccgggaggggcgcaggctgggccgctgggcccgcgtccacctgaaggtggacaccggcatggggcgcatcggcctgcagcccgccgaggtgggccgcctcggccgcgaactggccaggctggaccatgtggaggtggagggggtcttcacccacctggcgaccgccgatgagccggggaacccgtacacccgtctgcagctggagcggtacgaggcggccctggcggagctggcggcggcgggtgtccggcccgccatccggcacgccgccaacagcgcggggctcatgctccacccggaggcgcactacgacatggtgcgcagcggcatcgcggtggtggggctgcccccggcgccgggcgtggcgtggcccgtgaagctcgcccccgccctcacctggaagacccgggtggggctggtgaagtggctggaggccggccactcgatctcctacggctgcacctacacgaccgcccgccgcgagcagatcgcaaccttgccggtgggctacgcggacggctacccccggagactctccaaccgggcgcaggtcttgatccggggccggcggtgccccgtggtcggtgtggtgaccatggaccagatgatggtccgggtgccggacgatctgccggtccgggtcggggacgaggtggtgctgatcgggcggcagggcggcgaggagatcacggcgacggagctggccgggctggcggacacgatcagctacgagatcgtctgcggcatctcgcggcgggtgccccgtttttacggcggggagaccgcgtga

SEQ ID NO: 32993 - protein, 377 aa, Symbiobacterium thermophilum IAM 14863
MDLDGMRPTWAEVDLNAVRANIRALKRISKAPRLMAVVKANGYGHGAVPVATAAIEAGADWLGVASVEEGVTLRRHGISAPILVLGYVSPGQAEAVLTEGLRVALFDGELGQALNREGRRLGRWARVHLKVDTGMGRIGLQPAEVGRLGRELARLDHVEVEGVFTHLATADEPGNPYTRLQLERYEAALAELAAAGVRPAIRHAANSAGLMLHPEAHYDMVRSGIAVVGLPPAPGVAWPVKLAPALTWKTRVGLVKWLEAGHSISYGCTYTTARREQIATLPVGYADGYPRRLSNRAQVLIRGRRCPVVGVVTMDQMMVRVPDDLPVRVGDEVVLIGRQGGEEITATELAGLADTISYEIVCGISRRVPRFYGGETA

SEQ ID NO: 32994 - DNA, 1170 bp, Bacillus cereus ZK
  CDS (1)..(1170): transl_table=11
atggaagaagcaccattttaccgtgacacttgggtggaagtggatttagatgccatttataacaacgttacacatattaaagaatttatcccgagtgatgtagaaatttttgccgttgttaaagggaatgcatatgggcacgattatgtaccggtggctaaaacagcattagaagcgggggcgacaaggttagcagttgcgttcttagatgaagctttagtgcttcgaagagctggtattactgcaccaattttggtgttaggtccttctcctcctcgtgatataaatgtagctgctgaaaatgatgtagcattaactgtttttcaaaaggaatgggtagatgaagcaatcaaactttgggatggttcgtctacgatgaaataccatattaatttcgatagtggtatggggagaattggaatacgtgaacgtaaagaattaaaaggatttttaaaaagcttagaaggtgcaccattcttagaattggaaggagtttatacgcattttgcaacagcagatgaggtggagacttcttactttgataagcaatataacacatttttggagcagttaagttggttgaaagaattcggagtgaatcctaagtttgttcatacagctaatagtgctgcaacgctacgttttcaagggattacatttaatgcagtacgaattggcattgcgatgtatgggttatctccatctgtagaaatacgcccttttttaccgtttaaattagaaccagcgctatcattgcatacgaaagttgctcatattaaacaggtgattaaaggggatggaattagttataacgtcacttatcgaacgaaaactgaagaatggattgcgaccgttgcaattggttatgcagatggctggcttagaagattacaaggatttgaagtacttgtaaatggtaaaagggtaccgattgtagggcgagtaacgatggatcaattcatgattcaccttccttgtgaagtgcctcttggtacgaaagttacactcattggaaggcaaggagatgaatatattagcgctacagaggttgcggaatattcagggactattaattatgaaattattacgacgatcagttttcgtgtgccgagaatatttatacggaatggaaaagttgtggaagtaattaattatttgaacgatatatag

SEQ ID NO: 32995 - protein, 389 aa, Bacillus cereus ZK
MEEAPFYRDTWVEVDLDAIYNNVTHIKEFIPSDVEIFAVVKGNAYGHDYVPVAKTALEAGATRLAVAFLDEALVLRRAGITAPILVLGPSPPRDINVAAENDVALTVFQKEWVDEAIKLWDGSSTMKYHINFDSGMGRIGIRERKELKGFLKSLEGAPFLELEGVYTHFATADEVETSYFDKQYNTFLEQLSWLKEFGVNPKFVHTANSAATLRFQGITFNAVRIGIAMYGLSPSVEIRPFLPFKLEPALSLHTKVAHIKQVIKGDGISYNVTYRTKTEEWIATVAIGYADGWLRRLQGFEVLVNGKRVPIVGRVTMDQFMIHLPCEVPLGTKVTLIGRQGDEYISATEVAEYSGTINYEIITTISFRVPRIFIRNGKVVEVINYLNDI

SEQ ID NO: 32996 - DNA, 1074 bp, Mannheimia succiniciproducens MBEL55E
  CDS (1)..(1074): transl_table=11
atgaaaccagcaacagtaaaaatcagttcagttgcactgaaacataatattcaaataattaaacagaaagcaccgcacagtaaaatcatcgctgtggtgaaagcaaatgcttacggacacggcgttgaatttgtctcttctaccttagagaatttagttgatggttttggtgtggcgcgtttagccgaagcccttagcgtccgttctaacggcgtaaccaaaccgatccttttgttggaaggttttttctctcctaaagatttacccattctttccgtcaataatattcaaaccgtcgtacataaccaggatcaattggatgcaattaaacgggcgaatcttgaaaatccgataaaagtctggctgaaaattgatacgggcatgcaccgtttaggtgttagtctggaagaggtggattattactataacgaattgatgaattgtccgaatgtggatgaagtggggtttgtaagccatttcagccgcgctgacgaaaccgacagcgattataccaatattcagttaaaccgctttttggatgccacaaaaaacaaaaaaggcaaccgcactattgcggcttccggcggcattttattttgggaagattcccatttggaatatattcgtccggggatcattatgtatggcgtatcgccgattaatattccgagcagtgaatacggtttgatcccggtgatgaccttgacctcttcactaattgccgtgcgtgatcataaaaaaggcgagcctgtgggttacggcggtatttgggtgagcgagcgggatacgaaaatcggcgtggtggcgattggctacggtgacggttatccccgcaatgtgccggcaggtacaccgatttatattaatggacgccgggtgccgattgtcggccgtgtatctatggacatggttacggtggatctcggtcccgattgtaaagacaaagtaggcgatgaagcggttctttgggggaaagaattgccaatcgaggaagtggcggaaattaccggtctgctaagttatgaattaatgaccaaattaacgccgcgggttcttacggaatatgttgattaa

SEQ ID NO: 32997 - protein, 357 aa, Mannheimia succiniciproducens MBEL55E
MKPATVKISSVALKHNIQIIKQKAPHSKIIAVVKANAYGHGVEFVSSTLENLVDGFGVARLAEALSVRSNGVTKPILLLEGFFSPKDLPILSVNNIQTVVHNQDQLDAIKRANLENPIKVWLKIDTGMHRLGVSLEEVDYYYNELMNCPNVDEVGFVSHFSRADETDSDYTNIQLNRFLDATKNKKGNRTIAASGGILFWEDSHLEYIRPGIIMYGVSPINIPSSEYGLIPVMTLTSSLIAVRDHKKGEPVGYGGIWVSERDTKIGVVAIGYGDGYPRNVPAGTPIYINGRRVPIVGRVSMDMVTVDLGPDCKDKVGDEAVLWGKELPIEEVAEITGLLSYELMTKLTPRVLTEYVD

SEQ ID NO: 32998 - DNA, 1182 bp, Bacillus licheniformis DSM 13
  CDS (1)..(1182): transl_table=11
atgaaaaagctttgccgtgaagtttgggtagaggtaaatcttgatgcgatcaaaaaaaatttgcgcgcgtttcggcggcatattccgaaaaagagcaaaattatggctgtcgtaaaagcgaatgcttatggtcacggatcggtggaagttgcacgccatgcacttgaacatggtgcgagtgagctcgccgttgcctcggtggaggaagcggtcgttttacgaaaagcggggattaaagcgccgatccttgtgcttggtttcaccccgctgagctgtgtgaaagaagcggcagcttggaatatatcgttatcagcttttcaagttgactggattaaagaagcgaacgagatattggaaaatgaagcagatcctaaccggctggctgttcatatcaatgtggataccggcatggggcgtttaggtgtacgaacaaaggaaaagcttttagcaatcgtggaagcgctgacggcaagtgaaaacctcgaatgggaaggaatttttacgcatttttccacagctgacgaaccggatactgagctaaccatgattcaacacgaaaagtttatcagctttcttcgctttctgaaagaacaaggctttaagctgcctacggtgcatatgaacaatacggccgcggcgatcgcttttccggaattcagcgctgatatgattcgcttaggcatcggaatgtatggattatatccttccgattatatcaggcagcttaatctcgttaagcttgtgcctgcactaagcttgaaggcgcgaatcgcttatgtgaaaaccatgttgactgaaccgcggacggttagttatggtgctacatatgttgcagagcgcggggaagtcattgccacaattccggtcggctatgctgacggctattcccgtgaactttccaaccgcggttttattcttcatcgaggaagacgagtgccggtggcgggaagagtaacaatggatatgataatggtcagtctgggagagggtgaaggtaaacaaggagaggaagtcgtgatttacggccggcaaaagggagcagagatatctgttgatgaaattgcggaaatgcttgatacgatcaactatgaagtggtatctaccataagctggcgcgtccctcgtttttatataagagacggcgagatttttaaaaagtcgaccccgctgttatacgtgtag

SEQ ID NO: 32999 - protein, 393 aa, Bacillus licheniformis DSM 13
MKKLCREVWVEVNLDAIKKNLRAFRRHIPKKSKIMAVVKANAYGHGSVEVARHALEHGASELAVASVEEAVVLRKAGIKAPILVLGFTPLSCVKEAAAWNISLSAFQVDWIKEANEILENEADPNRLAVHINVDTGMGRLGVRTKEKLLAIVEALTASENLEWEGIFTHFSTADEPDTELTMIQHEKFISFLRFLKEQGFKLPTVHMNNTAAAIAFPEFSADMIRLGIGMYGLYPSDYIRQLNLVKLVPALSLKARIAYVKTMLTEPRTVSYGATYVAERGEVIATIPVGYADGYSRELSNRGFILHRGRRVPVAGRVTMDMIMVSLGEGEGKQGEEVVIYGRQKGAEISVDEIAEMLDTINYEVVSTISWRVPRFYIRDGEIFKKSTPLLYV

SEQ ID NO: 33000 - DNA, 1074 bp, Legionella pneumophila subsp. pneumophila str. Philadelphia 1
  CDS (1)..(1074): transl_table=11
gtgtcaagacctacacgtttagtgatagagcccagtgctttattgcataatttatctcaaatcaagcatttagctccaggcaaaaaagttatcgctatggtaaaagccaacgcctatggctgtggagtcagggaagttgcccctgtccttgatgggcgtattgaggcttttggagtagcctgccttgaggaggctctggctattcgagctttaggtgttgaaaccccgtgcattctctttcagggcgtctttagttctgatgaattgtcagtagccgttgagaatgatttcgcctgtgttcttcatcacgcacagcagttggaatggctaatcaagactccgttgccttacccgataaaagtatgggtgaaggtaaacacaggcatgcacagactgggatttaaaatccatgaattgcaaaaagtgatgggggcattgcaaacctgtacctgggttgataaaagtatagggttaatgactcatttggcttgcgcagatgaacctcatcgtcctgagaatcaacaacagatctctttgtttcaggagatatccatacctgggtttcgccaacgcagtatcgctaattcggcggcaattatttcattccctgattcgcaggctgatgtggtgaggcccgggattatgttgtatggtgtttccccatttgcaaatcaaaatgcccatgatttaggtttaatccctgtcatgcgttttatgtcagccatcagcgcgattcatgataacccatcttttgcccaggtaggctatggtggaacctggaaaagtgataaaccttcgcgaattggtgttgttgcagcaggttatggcgatgggtacccacggcatatttccgagaaaacaccggtttgggttagagggagggaggtgtctattgttggcagagtttctatggatatgctgaccatcgatttgacagagcaccctgatattgagatcggcgatgaagttgagctttggggaacacatgttttagtagagcgcattgccaaatcagcaggtacagtaggatacgaattattatgtcaaatttcggagagagtacgttacaaataa

SEQ ID NO: 33001 - protein, 357 aa, Legionella pneumophila subsp. pneumophila str. Philadelphia 1
MSRPTRLVIEPSALLHNLSQIKHLAPGKKVIAMVKANAYGCGVREVAPVLDGRIEAFGVACLEEALAIRALGVETPCILFQGVFSSDELSVAVENDFACVLHHAQQLEWLIKTPLPYPIKVWVKVNTGMHRLGFKIHELQKVMGALQTCTWVDKSIGLMTHLACADEPHRPENQQQISLFQEISIPGFRQRSIANSAAIISFPDSQADVVRPGIMLYGVSPFANQNAHDLGLIPVMRFMSAISAIHDNPSFAQVGYGGTWKSDKPSRIGVVAAGYGDGYPRHISEKTPVWVRGREVSIVGRVSMDMLTIDLTEHPDIEIGDEVELWGTHVLVERIAKSAGTVGYELLCQISERVRYK

SEQ ID NO: 33002 - DNA, 2547 bp, Bacteroides fragilis YCH46
  CDS (1)..(2547): transl_table=11
gtgccgattggcgcttcaataaatgtgcaaatatgccaatgctttaatattatgtcatatacaattgaatcaatcgttgaaaaaataggtgcacggcgtctgggaaacaagcctgctgccatcgactggctactgactgacagccgttcgttatgttttccggaagagaccctcttttttgccattcccaccaaaaggaacaacggcgcacgctacatccctgacctttatgaacggggagtgcgcaattttgtagtcacaagcgaagatttcaaagggctcaccatggacagtgagcaactaaaagtgacaatggctcaggaatgcaatttccttattgtccccaatactttaaaagcacttcagaaattggccgaacaacaccgtggttccttccagattccggtagtcggcattacgggcagcaatggaaagaccattgtaaaagaatggcttcaccaattgctcagccccgaccgggttatcgtgcgttcaccgcgcagctacaattcgcaaatcggtgtcccgctgtcagtctggcaaatgaacgaggaatccgaactgggcattttcgaagccggcatttcggaaatgggcgaaatgcgtccgttacagaatatgattaagccgacaataggcatcctgaccaacattggcggagcacatcaggaaaacttcttttcactgcaagagaagtgcatggaaaaactaagcctgtttaaagattgcgacgtagtcatttacaatggcgacaacgaaatgataagcaactgcgtaggaaagtcaatgctgactgcccgtgaaatcgcatggagcatgagggatatcgaacgtccgctctatatcagcagggttgagaagaaagaagatcataccgtcatctcctaccgctatctggagatggacaatacattctgtattccctttatcgatgatgcttccatagagaactcactgaactgcctcgctgcctgcctgtacctgatggtaccggccgaccagatcaccgaacgaatggccaggctcgaacctgtagcgatgcgccttgaagtaaaagacggaaagaacaactgtatcttgatcaatgacagttataattcggaccttgcttcgctggatatcgctctcgactttctttaccggcgttcgcagtcaaaaggcctaaagcgcactttgatcctttcggatatcctggaaaccggacaaagcacgacaacactctaccgcaaagtggcacaactggttcacagccgcggcattgaaaagattatcggtgtaggtgccgaaatatcctcatgcgcatcaaagtttgatatagaaaaatatttcttccccgataccaaggcacttctggcatcagatgtaattaagaaactcagaaatgaaatcatcctgataaaaggctcccgcaacttcggtttcgacctcgtttcggaagaactggaactgaaagtacacgaaaccatcctggaagtaaacctgggagctatggtagccaacctgaatcactaccgctcgatgctcaaaccggaaactaaaatggtgtgcatggtgaaagcgtctgcttatggagcaggttcgtacgaaatagccaaaacccttcaggagcatcacgctgactatctggcagtggccgtagccgatgaaggttccgaccttcgcaaagcagggatcacagcctccattatcatcatggatcccgaactgaccgctttcaaaaccatgttcgactataaactggaaccggaagtatacaatttccatttactcgacgcattgataaaagccgccgaaaaagaaggtatcaccaacttccccattcacgtaaaactggatacgggtatgcaccgattgggattcgaagagaaagacatcccgcaactgattcgccggttaaagaaccagaatgcactgattccccgctctgtcttttcccatttcgtaggcagtgattctgcccagttcgacgcttttacccggcagcaaatagaacgatatgaaaagatgtcaaaggaactgcaagatgcattcccgcacaaaatactgcgccatatctgcaacacagccggtatcgaacgcttccccggtgcacagttcgacatggttcgtcttggcatcggattgtatggaatcagtccgatcgataactcaatcatcaacaacgtgagtaccttgaaaacaacgattctccaaatacgggacgtggcggaagaagatactgtaggttatagccgcaaagggcatctgatacgtccctcacgtatcgctgctatacccatcggatatgccgacggcctgaaccgccatttgggatgcggacatggctattgccttgttaatggcaaaaaagccccatacgtaggaaatatctgcatggatgtgtgcatgatcgacgtaacggatattgattgtagagaaggtgatcaagctatcatcttcggtgacgaattaccgattaccgccttatcggatgcgctcgaaaccatcccttatgaagtattgacaggtatttcaacccgggtcaagagagtatattatcaagattaa

SEQ ID NO: 33003 - protein, 848 aa, Bacteroides fragilis YCH46
MPIGASINVQICQCFNIMSYTIESIVEKIGARRLGNKPAAIDWLLTDSRSLCFPEETLFFAIPTKRNNGARYIPDLYERGVRNFVVTSEDFKGLTMDSEQLKVTMAQECNFLIVPNTLKALQKLAEQHRGSFQIPVVGITGSNGKTIVKEWLHQLLSPDRVIVRSPRSYNSQIGVPLSVWQMNEESELGIFEAGISEMGEMRPLQNMIKPTIGILTNIGGAHQENFFSLQEKCMEKLSLFKDCDVVIYNGDNEMISNCVGKSMLTAREIAWSMRDIERPLYISRVEKKEDHTVISYRYLEMDNTFCIPFIDDASIENSLNCLAACLYLMVPADQITERMARLEPVAMRLEVKDGKNNCILINDSYNSDLASLDIALDFLYRRSQSKGLKRTLILSDILETGQSTTTLYRKVAQLVHSRGIEKIIGVGAEISSCASKFDIEKYFFPDTKALLASDVIKKLRNEIILIKGSRNFGFDLVSEELELKVHETILEVNLGAMVANLNHYRSMLKPETKMVCMVKASAYGAGSYEIAKTLQEHHADYLAVAVADEGSDLRKAGITASIIIMDPELTAFKTMFDYKLEPEVYNFHLLDALIKAAEKEGITNFPIHVKLDTGMHRLGFEEKDIPQLIRRLKNQNALIPRSVFSHFVGSDSAQFDAFTRQQIERYEKMSKELQDAFPHKILRHICNTAGIERFPGAQFDMVRLGIGLYGISPIDNSIINNVSTLKTTILQIRDVAEEDTVGYSRKGHLIRPSRIAAIPIGYADGLNRHLGCGHGYCLVNGKKAPYVGNICMDVCMIDVTDIDCREGDQAIIFGDELPITALSDALETIPYEVLTGISTRVKRVYYQD

SEQ ID NO: 33004 - DNA, 1071 bp, Burkholderia mallei ATCC 23344
  CDS (1)..(1071): transl_table=11
atgccgcgcccgatttccgccacgatccacaccgcagctctcgcgaacaacctctccgtcgtgcgccgccacgccgcccagtcgaaggtctgggcgatcgtcaaggcgaacgcgtacgggcacggtctcgcgcgcgtctttcccgggctgcgcggcaccgacggcttcggcctgctcgacctcgacgaggccgtgaagctgcgcgaactgggctgggcggggccgatcctgctgctcgagggcttcttccggtcgaccgacatcgacgtgatcgaccgctacagcctgacgaccgcggtgcacaacgacgagcagatgcgcatgctcgagaccgcgcggctgtcgaagcccgtgaacgtccagctgaagatgaacagcggcatgaaccggctcggctacacgcccgagaagtaccgggccgcctgggagcgcgcgcgcgcatgcccgggcatcggccagatcacgttgatgacccatttttcggacgccgacggcgaacgcggcgtggccgagcagatggcgacgttcgagcgcggcgcgcaaggcatcgccggcgcgcgcagcttcgcgaactcggccgccgtgctctggcacccgtcggcgcacttcgactgggtgcggcccggcatcatgctgtacggcgcgtcgccgtccggccgtgcggcggacatcgccgaccggggcctgaagccgacgatgacgctcgcctccgagctgatcgccgtgcagacgctcgcgaaagggcaggcggtcggctacggatcgatgttcgtcgccgaggacacgatgcgcatcggcgtcgtcgcgtgcggctatgcggacggctatccgcggatcgcgcccgagggcacgcccgtcgtcgtcgacggcgtgcgcacgcggatcgtcggccgcgtgtcgatggacatgctgaccgtcgatctcacgcccgtgccgcaggcgggcgtcggcgcgcgcgtcgagctgtggggcgagacgctgccgatcgacgacgtcgccgcgcgttgcatgacggtcggctacgagctgatgtgcgcggtcgcgccgcgcgtgcccgtgcgtgccgagtaa

SEQ ID NO: 33005 - protein, 356 aa, Burkholderia mallei ATCC 23344
MPRPISATIHTAALANNLSVVRRHAAQSKVWAIVKANAYGHGLARVFPGLRGTDGFGLLDLDEAVKLRELGWAGPILLLEGFFRSTDIDVIDRYSLTTAVHNDEQMRMLETARLSKPVNVQLKMNSGMNRLGYTPEKYRAAWERARACPGIGQITLMTHFSDADGERGVAEQMATFERGAQGIAGARSFANSAAVLWHPSAHFDWVRPGIMLYGASPSGRAADIADRGLKPTMTLASELIAVQTLAKGQAVGYGSMFVAEDTMRIGVVACGYADGYPRIAPEGTPVVVDGVRTRIVGRVSMDMLTVDLTPVPQAGVGARVELWGETLPIDDVAARCMTVGYELMCAVAPRVPVRAE

SEQ ID NO: 33006 - DNA, 1125 bp, Burkholderia pseudomallei K96243
  CDS (1)..(1125): transl_table=11
atgcctcgccccatcgtcgcccgcattcatcccgacgccgtcgcgcacaatcttgcaatcgtccggcaaaaggcgccgaacgcgcgtatctggtcggtcgtcaaggcgaacgcgtacggccacggcatcgagcatgtctatccggcgctcgccggcgcggacggcatcgcgctgctcgacctagacgaagcggtgcgcgtgcgcgagctcggctggacgaagcccgtgctgctgctcgaaggcatcttcgaggcggccgatgtcgagatcgcggatcgccatcggctgacggtcgccgtgcacggcgacgagcagttgaaactgctcaccgccgcgaagacgacgcgcccgatcgacatccaactgaagatgaactccgggatgaaccggctcggctaccggccgcacgcgttgcgcgccgcgtgggaacgcgcggccgccgcgccgtcgatcggccgcatcgcgctgatgatgcatttcgcgaacgccgacgaaggcgagatcgactggcagatgagcgtgttcgacgcggcgacgcagggcctgcccggcgagcgcacgctgtcgaactcggccgccgtgctgtggcatccgcgcgcgcaccgcgactgggtgcgccccggcacgatcctgtacggcgcgtcgcccacgggcgcgagccgccacgtcgccgacgtaccgctgcgggccgcgatgacggtcacgagccggatcatcggcgtgcaaacgctgacgccgggcgagacggtcggctacgggcgctgcttcgcggccgagcgcgagatgcgcatcggcgtcgtcgcctgcggctacgcggacggctatccgcgccacgcgcccaccggcacgccgatcgcggtcgacggcgtgcgcacgcaagtggtcgggcgcgtgtcgatggacatgctgaccgtcgacctcacgccgtgtccgaacgcgggcgtcggctcggccgtcgagctgtggggcgagcaggtgcgcgtcgacgacgtcgccgaagccgcgggcacgatcggctacgagctgatgtgcgcgctcgcgcggcgcgtgccggtcaccgtcgatccgtcgcccgccgcggccgcgctcgcccagccggtgcgcaccggaagctacgggcgctga

SEQ ID NO: 33007 - protein, 374 aa, Burkholderia pseudomallei K96243
MPRPIVARIHPDAVAHNLAIVRQKAPNARIWSVVKANAYGHGIEHVYPALAGADGIALLDLDEAVRVRELGWTKPVLLLEGIFEAADVEIADRHRLTVAVHGDEQLKLLTAAKTTRPIDIQLKMNSGMNRLGYRPHALRAAWERAAAAPSIGRIALMMHFANADEGEIDWQMSVFDAATQGLPGERTLSNSAAVLWHPRAHRDWVRPGTILYGASPTGASRHVADVPLRAAMTVTSRIIGVQTLTPGETVGYGRCFAAEREMRIGVVACGYADGYPRHAPTGTPIAVDGVRTQVVGRVSMDMLTVDLTPCPNAGVGSAVELWGEQVRVDDVAEAAGTIGYELMCALARRVPVTVDPSPAAAALAQPVRTGSYGR

SEQ ID NO: 33008 - DNA, 1080 bp, Methylococcus capsulatus str. Bath
  CDS (1)..(1080): transl_table=11
gtggtgcccgcagcccgtgccgtcctggacatggcggccttcgcccacaatttcgcctggattcgcgccgccgcgccggattcgaaaatcatggccgtgatcaaggccaacgcctacgggcacggactgatccgggccgcgcgagcgctgccggcagcggatgcgtttgccgtggcgcgggtggaagagggcatcgttctgcgtcaggccggtatcgctcaacgcatcgccgtgttgcagggttatggcgacgaagaagggatgaggctgagcgcccgccatggtctcgaaccggtgatccattccggcttccagcttgatctgctggagcggctcgatacttccgtcccaatgggggtgtggctcaaggcggacagcgggatgcatcggctgggtctggccgacgaggagttcgcccgggcgcggttgcggctggcgcggatgcctcaggtgcgccagccggtgcctgtcatgacccatctggccaatgccgacgccaccgatgatccgaccaccgaaatccagctgcgttgttttgggcggatggcaggcgggcggggcgaattcagcatcggcaactcggcggggttgatggcctgggcggcggcccgcagtgcctgggtcaggcccggcatcctgctgtatggcgtatcgccgtttcctggacggagcggaccggaagaaggtttgatgccggtcatgaccttgcagagccgcctgatcgcggtcaagcaactgaagaccggcgatgcggttggatacggcggcgacttcatctgccgccgcccgacccgcatgggcatcgcggccataggctacggcgatggttacccccgccgcgcggccaccggcacgccggtgctggtccggggcaggcgcgtgccgctgatcggccgggtctcgatggacatgatatcggtcgatctgaccgactgcccgtcggcggaaatcggcgataccgtgacgctatggggacaagggctgccggtggaggaaatcgcgcttcacgccgacaccattccctacgtgttactgtgcaatgtcacccagcgggtgaacatggtggagacagtcgcctga

SEQ ID NO: 33009 - protein, 359 aa, Methylococcus capsulatus str. Bath
MVPAARAVLDMAAFAHNFAWIRAAAPDSKIMAVIKANAYGHGLIRAARALPAADAFAVARVEEGIVLRQAGIAQRIAVLQGYGDEEGMRLSARHGLEPVIHSGFQLDLLERLDTSVPMGVWLKADSGMHRLGLADEEFARARLRLARMPQVRQPVPVMTHLANADATDDPTTEIQLRCFGRMAGGRGEFSIGNSAGLMAWAAARSAWVRPGILLYGVSPFPGRSGPEEGLMPVMTLQSRLIAVKQLKTGDAVGYGGDFICRRPTRMGIAAIGYGDGYPRRAATGTPVLVRGRRVPLIGRVSMDMISVDLTDCPSAEIGDTVTLWGQGLPVEEIALHADTIPYVLLCNVTQRVNMVETVA

SEQ ID NO: 33010 - DNA, 1146 bp, Nocardia farcinica IFM 10152
  CDS (1)..(1146): transl_table=11
gtggcaggatcgggagacgtgagtgcccaagtggaggccgtggtcgacctcgatgcgattgcccataatgtgcgggtcctgcgtgagtacgcgggcgatgcggcgatgatggtcgtcgtcaaggcggacggctacaaccacggggcggtggaggtggcgcgcacggcgctggcggcgggggcgcgggaactgggcgtgaccaccgtggccgaggcgctgcgactgcgcgaggcggggatcacggcaccggtgctgtgctggctgaacaccctgtccgccgattacgccgccgcggtcgccgccgacatcgagatcggcgtctccggcaccgagcaactgcgcgccgtcgccaccgcggcccgcgccaccggccgcaccgccaccgtgacgctcaaagtcgacaccggactcaaccgcaacggcatcgccgccgacgagctgccgaccgtgctcgacctgctcggtgagctggtcgaggagaagacggtgcgattgcgcgcgatgttctcccacctggcccacgccgacgagcccaaacacccgttcctcgacgaacagcgcgaccgcttcaccgccgcggccgccgcggccaccgcccgcgggctgcgtcccgaactgctgcacctggccaactccgccgccaccgtgacccggcccgacctggccttcgacatggtgcggcccggcatcgccgtctacggcctgagccccgtgcccgaactcggcgatttcgggctgcggcccgccatgaccttccaggcgcaggtcgcgctggtcaaacgcgtcgccgagggcgagggcgtctcctacggccaccagtggatcgctccccgtgacaccaccgtcgcgctgatacccgccgggtatgccgacggcgtgttccggccgctcagcggccgcttcgacgtgtggctcggcggtacccgccgccccaacgtcggccgggtctgcatggaccagttcgtcgtcgacctcggcgacgacgccgcgggcgtggcggcgggcgacaccgccgtgctgttcggcggtgggcccggcgtgccgggtgcccaggagtgggccgacctgctcggcaccatccactacgaggtggtctgctcgccgcgcggccgggccgtccgccggtacgtcggaacgggccgctga

SEQ ID NO: 33011 - protein, 381 aa, Nocardia farcinica IFM 10152
MAGSGDVSAQVEAVVDLDAIAHNVRVLREYAGDAAMMVVVKADGYNHGAVEVARTALAAGARELGVTTVAEALRLREAGITAPVLCWLNTLSADYAAAVAADIEIGVSGTEQLRAVATAARATGRTATVTLKVDTGLNRNGIAADELPTVLDLLGELVEEKTVRLRAMFSHLAHADEPKHPFLDEQRDRFTAAAAAATARGLRPELLHLANSAATVTRPDLAFDMVRPGIAVYGLSPVPELGDFGLRPAMTFQAQVALVKRVAEGEGVSYGHQWIAPRDTTVALIPAGYADGVFRPLSGRFDVWLGGTRRPNVGRVCMDQFVVDLGDDAAGVAAGDTAVLFGGGPGVPGAQEWADLLGTIHYEVVCSPRGRAVRRYVGTGR

SEQ ID NO: 33012 - DNA, 1080 bp, Photobacterium profundum SS9
  CDS (1)..(1080): transl_table=11
atgaaagcggcgacagcttatatcaataccgacgcgctaacacataacattcgacagctgcatttacaggcaccgaatagtaaattattagccgtagtgaaagcgaatggatacggacatggcttgctgcatgtagcaaaaagtttacccgatgctgatgcatttggtgttgcgcgtattgaggaagcgttaacgttacgtgcgggtggagtcgttaaacctatcttattattagaaggtttttatggcgcgtctgatttgcctgttatcgtgacgaataatattcatactgtcgtccattccattgagcaactagaggcgctagaatcggctgaattagacaatcaagcggttgtttggttgaagattgatacaggaatgcaccgcttaggtgtgcgacctgaacagctcgatgacgtcgtgcaacgcttacatgcctgcgataatgtcgccaaaccattgagatatatgagtcactttggttgtgctgatgatctggcgagcaatgtcactaaccagcaaattaataccttcctatcattaactgaaggctgccgtggtgagcgttctctagctgcttcagcgggaatactggcttggcccgatagccagcttgaatggattcgtcctggcattattatgtatggtgtctctccatttactgaaccagaccgttcagcggaagcctttaatatgcagccggtaatgacgctaacctctagcttgattgctgttcgcgacgtgaaagaaggtgagcaagtcggttatggtggtatatggaccagtgagcgcgatacaaaagtcggtgttattgcgattggttacggtgatggctacccgcgcacagcaccgaatggcaccccagttttagttaacggtcgtatcgtacccatggctgggcgtgtatcgatggatatgctgactgtcgatcttggacctaacgcgcaagataaagtcggtgatgaagcaattttgtggggcaatggtttacctgcagaagttgtcgctgagcatattggcacgatcgcgtacgagctagtgactaagctgacatcacgtgttgatatgacctatttataa

SEQ ID NO: 33013 - protein, 359 aa, Photobacterium profundum SS9
MKAATAYINTDALTHNIRQLHLQAPNSKLLAVVKANGYGHGLLHVAKSLPDADAFGVARIEEALTLRAGGVVKPILLLEGFYGASDLPVIVTNNIHTVVHSIEQLEALESAELDNQAVVWLKIDTGMHRLGVRPEQLDDVVQRLHACDNVAKPLRYMSHFGCADDLASNVTNQQINTFLSLTEGCRGERSLAASAGILAWPDSQLEWIRPGIIMYGVSPFTEPDRSAEAFNMQPVMTLTSSLIAVRDVKEGEQVGYGGIWTSERDTKVGVIAIGYGDGYPRTAPNGTPVLVNGRIVPMAGRVSMDMLTVDLGPNAQDKVGDEAILWGNGLPAEVVAEHIGTIAYELVTKLTSRVDMTYL

SEQ ID NO: 33014 - DNA, 1215 bp, Photobacterium profundum SS9
  CDS (1)..(1215): transl_table=11
ttgaaactgaaacttagcctagttgctcttgccctaatgggtcaaactaccgccaatgccgcccctctgctggtcgatttcgataataacgagcgcgaagaacgcgttcagtcaagcaatgcatggctggaaatcgatacccaagcattttctggcaacattcagttacttcaaaaccagctaaaagccgatacaaaaatctgcgctatcatgaaagccgacgcttacggtaatggtatcgcaggcctaatgccatccatcatcgccaaccaagtgccatgtgttgggatcaccagcaacgaagaagctcgtgtggtacgtaagcacggtttcattggcaaaatcatgcgagtacgtgccgcgagcaaaaatgaaattgaaggcggcctgcaataccagatggaagaattaatcggtaccaaggcacaagccgatcaaatcatcgaaatcgcccgagcaaacggcacaactatcccggttcacctagcactgaatacctcaggcatggggcgtaacggtctggatctgacaacttatgaaggtcaggtagaaggtgtcgaaatcgctggcgatcccaatctggaaatcgtaggcatgatgacccacttcccgaacgaaggccttgacgaaatcaagcgcaaggtaaagcgcttcaaggtagaaacgaaatggctgatggacagcaccgatctaaagcgtaaggacgtcaccctacatgttgccaactcttacattacgctgaacttacccgaagctcacctagacatggttcgcccaggcggcatgctttacggcgattacccagcaacagcaccataccagcgcatcgtttcattcaaaacacatgttgcgtcactgcaccacttcccagcaggcagcaccatcggctacggcagtaccgcggtactagagcgcgattctgtactggcaaaccttcctatcggctactcagacggctttgcccgctctctgggtaacaaggcagaggtactgatcaacggccagcgtgctcgcgtgatgggcatggtatcaatgaacaccaccatggtcgatgtcacagacatcgtcgacgtacagaccaacgaggaagtggttatttttggccgtcaaggctttgaagaaatcactggcgaagagaccgaagagaaaagcaatcgtattctgccagaacattacactgtttggggtgcaaccaacccacgtatctaccgttaa

SEQ ID NO: 33015 - protein, 404 aa, Photobacterium profundum SS9
MKLKLSLVALALMGQTTANAAPLLVDFDNNEREERVQSSNAWLEIDTQAFSGNIQLLQNQLKADTKICAIMKADAYGNGIAGLMPSIIANQVPCVGITSNEEARVVRKHGFIGKIMRVRAASKNEIEGGLQYQMEELIGTKAQADQIIEIARANGTTIPVHLALNTSGMGRNGLDLTTYEGQVEGVEIAGDPNLEIVGMMTHFPNEGLDEIKRKVKRFKVETKWLMDSTDLKRKDVTLHVANSYITLNLPEAHLDMVRPGGMLYGDYPATAPYQRIVSFKTHVASLHHFPAGSTIGYGSTAVLERDSVLANLPIGYSDGFARSLGNKAEVLINGQRARVMGMVSMNTTMVDVTDIVDVQTNEEVVIFGRQGFEEITGEETEEKSNRILPEHYTVWGATNPRIYR

SEQ ID NO: 33016 - DNA, 1218 bp, Photobacterium profundum SS9
  CDS (1)..(1218): transl_table=11
atgaattttaaaatgacgctattatcattggcgattacttttccatcattttctatttacagtgcgccactagtcattgatcaaaacctaccaagtgagcaatcaattcaacaatcaaattcttggctagaagtaagcttgggtcagtttaaatccaatatagaacagttcaaatcacacattaaagctgatactaaaatttgtgctgtgatgaaggccgatgcttatgggaatggcatatttggcttaatgccaaccattcttgaacaacagattccttgcgtggcgattgcgagtaatgcagaagctcgagcagtacgagaaagcggctttaaagggcagttgctccgtgttcgctctgcaagtttaggagagatcaaacagagtttagatctcaacatcgaagagttgattggtagccaccaacaagcaaaattcattgctgagttaggagtagagcgcaatcaaaaaatcaacgtccatttggcattgaatgacggtggaatgggtcgaaatggtattgacatgtccactgagcaaggaaaagcagaagctcttgatattgcaacgcaagctaacttaaacattgtcggcataatgacgcacttcccaaactacaatgctgataaagtacgagtaaaattaaaggactttcaaacaaattcatcttggctcatcaaacaagctgatttaaaacgtgacgagttaactcttcacgtggctaattcttatgtttcgataaatgtacctgaagcgcaactagatatggtgcgccctggcggtgtattgtatggcgatctacctactaatccagaatacccatcgattgtttctttcaaaactcgaattgcttctatacaccaactccctgccagccagaccgtgggctatgacagtacgtatataaccaagcgagatagcgtacttgcaaaccttcccgttggctattcagatggttaccctcgtagaatgggaaatcaggccgacgtcattatcaatggacaacgtgcgaaagtcgtcggtgtcacatcaatgaatacctccattgttgatatcacagacataaaaggagtgaaacaaggtcaagaagttacactatttggcaaacaaaaaaacgtacagattagtgtggctgaaatggaagattactcaaaattgattttccctgagttatataccatgtgggggcaagcaaaccctcgttattacttaaaatag

SEQ ID NO: 33017 - protein, 405 aa, Photobacterium profundum SS9
MNFKMTLLSLAITFPSFSIYSAPLVIDQNLPSEQSIQQSNSWLEVSLGQFKSNIEQFKSHIKADTKICAVMKADAYGNGIFGLMPTILEQQIPCVAIASNAEARAVRESGFKGQLLRVRSASLGEIKQSLDLNIEELIGSHQQAKFIAELGVERNQKINVHLALNDGGMGRNGIDMSTEQGKAEALDIATQANLNIVGIMTHFPNYNADKVRVKLKDFQTNSSWLIKQADLKRDELTLHVANSYVSINVPEAQLDMVRPGGVLYGDLPTNPEYPSIVSFKTRIASIHQLPASQTVGYDSTYITKRDSVLANLPVGYSDGYPRRMGNQADVIINGQRAKVVGVTSMNTSIVDITDIKGVKQGQEVTLFGKQKNVQISVAEMEDYSKLIFPELYTMWGQANPRYYLK

SEQ ID NO: 33018 - DNA, 1050 bp, Rhodobacter sphaeroides 2.4.1
  CDS (1)..(1050)
atggccaccgcgaccctcaccatcgacctggacgccatcgccgccaactggcgcgcgctcgaccagatgaccgcctccgactgccagaccggcgccgtcgtgaaggctgacagctacgggctcggcgcggccaaggtcgcccatgccctcgcgcgggccggtgcccgccgcttcttcgtcgccacctgcgaggaaggggccgacgtgcgccgcgcgctcggctccgggccgcagatctgcgtcttctcggggcatatggagggcgacaccgccctcatccgcgatttcgacctgacgccgatgctgaactcgatcgaccagctcacccggcatttcgaggcgctgggcggccagcccttcggcctgcagctcgacagcgggatgaaccggctcgggctcgagcccggcgaatgggaggccgtggccggcttcgcgctcgaggcgggaccggaactgctgatgagtcacctcgcctgttcggacgatcccgaccatccgatgaatgccgagcagctcggcgccttccgggccatgaccgacggcaccggcgtgccgcgctcgctctcggccacgggcggcatcctgctgggccccgcctggcatttcgagctgacccgccccggcatcggcctctacggcggccgcccgttcgagaatgcgcgcccggtggtgcggctctcgctgccggtgatccaggtgcgcgaggtcgagatcggcgagcccgtgggctattccaacacctggacggccgaacatacctcgaccatcgccacggtcgccgcgggctatgccgacgggctgccgcgcacgctgtcctcgcgcgccacgctttatgcgggccgggtgccctgcccgctggtgggccgggtgtcgatggatctcatcacggtggatgtgagccacctgcccgaagtgcccgagacgctcgacatcctcgggccgcaccagacgccggacgatctggccgacacggcgggaaccatcggctacgagatcctgacgagcctcggccgccgctaccagcgccgctacggggccctcgcggcgtga

SEQ ID NO: 33019 - protein, 349 aa, Rhodobacter sphaeroides 2.4.1
MATATLTIDLDAIAANWRALDQMTASDCQTGAVVKADSYGLGAAKVAHALARAGARRFFVATCEEGADVRRALGSGPQICVFSGHMEGDTALIRDFDLTPMLNSIDQLTRHFEALGGQPFGLQLDSGMNRLGLEPGEWEAVAGFALEAGPELLMSHLACSDDPDHPMNAEQLGAFRAMTDGTGVPRSLSATGGILLGPAWHFELTRPGIGLYGGRPFENARPVVRLSLPVIQVREVEIGEPVGYSNTWTAEHTSTIATVAAGYADGLPRTLSSRATLYAGRVPCPLVGRVSMDLITVDVSHLPEVPETLDILGPHQTPDDLADTAGTIGYEILTSLGRRYQRRYGALAA

SEQ ID NO: 33020 - DNA, 1131 bp, Lactobacillus gasseri
  CDS (1)..(1131)
atggttccaggtattcatcgtccagctgtggttaaagtcaatttgggcgcaattaagagaaatattgaaaatgaaatgcagcatcttgaaccaggccaaaagatgcttgctgttgtaaaagctaacggttatggccatggtgcagtagaagtagcaaaagtagcagatcaaattggagccgctggattctgtgttgcaattttagatgaggcgctagaattaaggcgtgcagatattactaagacgatcttagtcttaggtgtcgtttctcctgaatatgctcctattgctgcagcgaatgatatttcactgactgttccaaatttagaatggcttaaagaagcagaaaaatatttagaaaattcagacttacaattgaaaattcatttgggcattgattcaggaatgggtcgaattggatttaatgaggataaggactttattgctgctaataagtttttagaaaataatgataatttttatattgaaggaatgtttgcacattttgcttcagctgatagtagcgatgaaacttactttaagcaccaatgtgaaaaatttaaccatatgaagagtttgcttacagtaaagccaaagtggattcatgttgataatactgcagcaagcatttttcataatggaattaagagtgatttagttagattcggaattggaatttatggcttaaatccttcgtctaatcctaattcacctgatttgaagtcaaagattgccttagatccagctttatcatttgagagtgagttaacgcacgtgaagacaattcatcagggtgatggagttggatatggttcgacatttgttgccgataaggatacgattattggaacagtgccagttggttacgcagatggttttattagaaaattccaaggtttcaaagttaaagtaggtaatacatattgtccaattgttggtcgtatttgcatggaccagtttatggttgaaatgccaaaggaaatgccgcttggaactaaagtagtaattatttctgataatcctgatgatttaaataatattaaagcagcagctgattatgttgatacgatccattatgaagttgcttgtttattgaatgatcgcttaccgcgtgtttattacgaagactaa

SEQ ID NO: 33021 - protein, 376 aa, Lactobacillus gasseri
MVPGIHRPAVVKVNLGAIKRNIENEMQHLEPGQKMLAVVKANGYGHGAVEVAKVADQIGAAGFCVAILDEALELRRADITKTILVLGVVSPEYAPIAAANDISLTVPNLEWLKEAEKYLENSDLQLKIHLGIDSGMGRIGFNEDKDFIAANKFLENNDNFYIEGMFAHFASADSSDETYFKHQCEKFNHMKSLLTVKPKWIHVDNTAASIFHNGIKSDLVRFGIGIYGLNPSSNPNSPDLKSKIALDPALSFESELTHVKTIHQGDGVGYGSTFVADKDTIIGTVPVGYADGFIRKFQGFKVKVGNTYCPIVGRICMDQFMVEMPKEMPLGTKVVIISDNPDDLNNIKAAADYVDTIHYEVACLLNDRLPRVYYED

SEQ ID NO: 33022 - DNA, 1113 bp, Leuconostoc mesenteroides subsp. mesenteroides ATCC 8293
  CDS (1)..(1113)
atggtagaggcaataacacgtccaacacgtcttgaagtttccaagagcgctgttgaacataatataacgaccgttaaaaatgtatcaggtgcagacaaagtctttttgaccgttaagtcaaatgcctatggatttggtttgattcctatggctcaagctgctgtggcaggaggtatttatggcttaggtgtagctgttcttgatgaagctattgcactgcggcatgagcgcataaccgcaccaattttaattttaggtatttcacaggtaaagtatgttgaactaatggctgtccagcatatcatggcaactgttgtttcattggactggctggagaaagcagaacatcagttaactggtgaacagcgattacctgttacactaggtatcgatactggcatgggtagaattgggtttagagatcgtgaaactttatcgaaagcgatacagtttgttttggatcatgctgataagtttgaatatgttggactatcgacgcactttgccgaatctgattcatcagataccaggtacttccaaaagcaattaacacgttggcatcaattgacggatgacttgccaaaaccaaagtattatcatgttgctaattcgggtgctgcaatgtatcacgcagaagaggttccccatgaggttgtccgcgtaggaacggtgctttatgggattgagccctctcgtggtgaactagcagatggacgtaacctgaaacccgtcatggcccttcggagcgaggtgaattttgttaaacgcttacctgctggtgaaggtattagttattcacacaaatatacgacaactcaaaacgagtggataggcactgttcctattggttatggggatggttggctacgcaaattaatggggtttaaggttattattgacggtcaatacgcccctattgtagggcaagtagcaatggatcagttaatgatacgtttgcctcgtgaatatccagaaggtacaacggtaacctttattggtcaagatggagacttagagaatacaatcgaggacgttgcacagtttgcaggtttggcgccctgggaaatcacaacaggactacaagatagaatacatcgtattttagtagattag

SEQ ID NO: 33023 - protein, 370 aa, Leuconostoc mesenteroides subsp. mesenteroides ATCC 8293
MVEAITRPTRLEVSKSAVEHNITTVKNVSGADKVFLTVKSNAYGFGLIPMAQAAVAGGIYGLGVAVLDEAIALRHERITAPILILGISQVKYVELMAVQHIMATVVSLDWLEKAEHQLTGEQRLPVTLGIDTGMGRIGFRDRETLSKAIQFVLDHADKFEYVGLSTHFAESDSSDTRYFQKQLTRWHQLTDDLPKPKYYHVANSGAAMYHAEEVPHEVVRVGTVLYGIEPSRGELADGRNLKPVMALRSEVNFVKRLPAGEGISYSHKYTTTQNEWIGTVPIGYGDGWLRKLMGFKVIIDGQYAPIVGQVAMDQLMIRLPREYPEGTTVTFIGQDGDLENTIEDVAQFAGLAPWEITTGLQDRIHRILVD

SEQ ID NO: 33024 - DNA, 1122 bp, Leuconostoc mesenteroides subsp. mesenteroides ATCC 8293
  CDS (1)..(1122)
atgaactataatgcaccacatcgacatgctgtaattgagttgtcgcaatcagcagttgtgcataatttaaaagtgattaaagagaacacgcatgccaaagagattatggctgttttgaaagctaatgctttttcgcatggattacctgagatggcctctttgagtattacagctggggctacccgctttggcatggccatgctcgatgaagctttgatattacgtgatttgggctatatacaaccaattgatgtactcggattaacagatccacgctatgcgcgattggctgctgaacgtaatattacgctagcttttagtactaaggagtcaataaaagcagcagctgaacagttagctggtacaggattgacattaaaggtatcgttacccgttgacacgggcttaaaccgtattggttttaaaagtcgtgaagatttagtggcagcaattcaagaggtatcagcgcaagatacactcatttttcaaagtatgtggacgcattttgctactgcagatacaccaaatgttgactatgtggattttcaaatttccgaatggcagcgcttgacacatgatttaccagtagaaccaaatgaaaagcattttgcgaatacgggtattgctacttggtatcccgaaaaaattaatacggatattgttcgtttgggtattggattatttggcattaacggttctgtgccaataatgtcgatgccattcgagttgataccagctttatcattgaaagctaaggttgttaacagcaagccactgaaaaaaggtgatgcggtcggctatggggcagaatatcatgcaccaaatgatgggtatttgattactattccaattggacattctgacggttatccgttcaatgggagtggcatgcgtgctctggttgcggatggacaaattggtcatattgtcgggggcgtagccatggatcaatcaatgatccttgttactaatccagttgcagttggcactacggtgaccttaattggtcgtgttggtgatcaaagtataacgatgcaggatttggctgagcatacacaaagtagtattgtggcgttaatgaatgattttgcaccgagactgcaacgaataattgtttcataa

SEQ ID NO: 33025 - protein, 373 aa, Leuconostoc mesenteroides subsp. mesenteroides ATCC 8293 [sequence omitted]

SEQ ID NO: 33026 - DNA, 1086 bp, Azotobacter vinelandii
  CDS (1)..(1086)
atgcgccccgcccgtgccctgatcgatctcgccgccttgcggcacaactaccgcctggcccgcgagctgggcggcgcccgcgccctggcggtggtcaaggccgacgcctacgggcacggcgcagtgcgctgtgcccgcgccctggaggcggaggccgacggtttcgcggtggcctgcatcgaggaggcgctggagctgcgcgaggccggcatcgccgcgccgatcctactgctggagggcttcttcgagagcgccgagctggagccgatccagcgccacgacctgtggtgcgtggtgcattcgccgtggcaactggaggccatcgaacgtaccgcgctgacgcgtcccttgacctgctggctgaagctcgactccggcatgcaccgggtcggcttcgcgccggccgactaccgggcggcccacgcgcgcctcatggccagcggcaaggtggcgaggatcgtcgccatgagccatttcgcacgcgccgacgaactcgactgcccgcgggtcgccgagcaactggcgcagttcgagacggcgaccgccggcctcgtggcggagttcagcctgcgcaactccccggcgctgctcggctggccgcagtttttccggcatggccatggggacgaatggctgcggccggggatcatgctctacggggccacgcccttcgagcgctatcaggagcaggcggcgcaactgcgaccggtaatgaccctggagtccaggatcatcggcgtgcgcgagctgccggccggcgagccggtgggttatggcgcgcgtttcgtcgcctcgcggccgacccgcgtcggagtggtggccatgggctatgcggacggctacccgcggcatgcgccgaacggcaccccggtcgccgtcgatggtcggccggcgcaactgatcggccgggtatcgatggacatgctcaccgtggacctcaccgacctgccccaggccggactcggtagccgggtcgagctgtggggcgcccaggtgccggccagcgaggtggcggcagcggccggtaccatcgcctatcaattgttctgcaacgtgcggcgggtcgcccgttcctggctggactga

SEQ ID NO: 33027 - protein, 361 aa, Azotobacter vinelandii
MRPARALIDLAALRHNYRLARELGGARALAVVKADAYGHGAVRCARALEAEADGFAVACIEEALELREAGIAAPILLLEGFFESAELEPIQRHDLWCVVHSPWQLEAIERTALTRPLTCWLKLDSGMHRVGFAPADYRAAHARLMASGKVARIVAMSHFARADELDCPRVAEQLAQFETATAGLVAEFSLRNSPALLGWPQFFRHGHGDEWLRPGIMLYGATPFERYQEQAAQLRPVMTLESRIIGVRELPAGEPVGYGARFVASRPTRVGVVAMGYADGYPRHAPNGTPVAVDGRPAQLIGRVSMDMLTVDLTDLPQAGLGSRVELWGAQVPASEVAAAAGTIAYQLFCNVRRVARSWLD

SEQ ID NO: 33028 - DNA, 1113 bp, Desulfitobacterium hafniense DCB-2
  CDS (1)..(1113)
atggaaaatagacgaccggtttggacagagatcaacttacaagcgctgcagaggaattatgaccggattcaggccttgactgaaagtgaaatcatgcccatagtcaaagctgatgcatacggacatggagccttacaagcagtagaagcattttatgaaagaggtgcccgtcgtttcggagttgccttattgaatgaagctttggagcttagaagagcgtatccggatatcaaagtcatgctcatcggttctttacccgaagaatccatagagacagttgttaaagaagatattatttgcggggtgtatcagttagatcaagcagtaattttagcgaaagaagcagagagacagggcaagaaggcagtaattcatcttaaagtggatacaggaatggggcgcattggcttcagagaagaggattgggaagaacttttcggctgtaccaagctgcctggtctttacatagagggaatttatactcattttgccacggcggatcatagtgatctgaggtttgcccgggagcaactgaggaaatttttagtgatgtgtgataaaatcaaagcccagggaattcatatccctatccggcatgcggccaacagcggagctctgctgcagctgccggaggctcatctggacatggtgcggccggggattattctctatggacttcctccctcccagcatgtgggcaatgatttaggtttggagcccgtactttcctggaaagccaagatcagccatatcaaggtggtcccccaaggggaaaccatcagctatggcagaaccttcagaaccgcctatcccacccgggtggcgacgattcccctcggttatgccgatggtctgcgccggaatctatccaataagggtgaagttttaattaaaggcagaagaaccaccatgattgggagagtctgtatggatcagaccatgctggatgtcacgaaaataccggaggtgcaggtaggggatgtggttaccctactcggcatggatggttatgaacggatcgatgccacggaaatggccggttggttggatacgataaattatgagattgtctgtggaatatcgaagcgggttccacgggtgtatattaaataa

SEQ ID NO: 33029 - protein, 370 aa, Desulfitobacterium hafniense DCB-2
MENRRPVWTEINLQALQRNYDRIQALTESEIMPIVKADAYGHGALQAVEAFYERGARRFGVALLNEALELRRAYPDIKVMLIGSLPEESIETVVKEDIICGVYQLDQAVILAKEAERQGKKAVIHLKVDTGMGRIGFREEDWEELFGCTKLPGLYIEGIYTHFATADHSDLRFAREQLRKFLVMCDKIKAQGIHIPIRHAANSGALLQLPEAHLDMVRPGIILYGLPPSQHVGNDLGLEPVLSWKAKISHIKVVPQGETISYGRTFRTAYPTRVATIPLGYADGLRRNLSNKGEVLIKGRRTTMIGRVCMDQTMLDVTKIPEVQVGDVVTLLGMDGYERIDATEMAGWLDTINYEIVCGISKRVPRVYIK

SEQ ID NO: 33030 - DNA, 1188 bp, Nostoc punctiforme PCC 73102
  CDS (1)..(1188)
atgttaagtcgcaaagaaatccctggtgtagttcctaatcagcagtgcgacacctacgcgtggttttcgcaacgagcttgggtagaaattgatttgggggcgttgtcgtacaatgtacagcaattggtgcagtttttatcgccgcgtacccagttgatggcagtagtaaaagctgatgcttatggacatggagcgctaacagtcgcccaaactgtaattcaatcaggagctagttggctgggagtcgctacagttccagaagctattcaattgcgagaaggcgggattgaagcgcccattttgattttaggagcaactcatacaccagaacagattcatgcgatcgcacaatggaatcttcagcccacactctgtagccctaaacaagctttggtattttctaatatcctggaatccatgaatcatggttcgccagtgcccgtacacatcaaattagacacgggtatgtctaggttaggaactaattggcagcaagctggtgaatttgtgcaattagtgcagcgcttaccacatctatccattgccagtatttattctcatttggcaacagcagacgatcctgatacaacggcaatggaagaacagcatagacgatttgaggaagcgatcgctcaaatcaaagcaatggaaattgaagcgccttgcttgcacttggcaaactcagcagctgcactcacagatccggcattgcattacgatattgtacgtgtaggtttagccgtttacggactttacccagcaccgcatttacaaaatgcgatcgatctcaagcccgttttgcaacttaaagcacgagtcacccaagttaaaacaattgcggcaggaactgctgttagctacgggcataaatttattgccccgcgtgaacttcgcctcgctgttgtcggaattggttatgctgatggcgttcctcgtagtctttctaacaaaatgcaggcgttaattcacggtcagagagtgtcgcaaatcggcacaattacaatggatcagttgatgctggatgtaagtgccatacccaatatccaagaaggagaagtagtcaccttactaggaaagcagggaaaagaacaaatttccgcagacgattgggcagaacaactaaacactatttcttgggaaattctctgcgggttcaagcatcgtctgcctcgtgttgcagtcatgtaa

SEQ ID NO: 33031 - protein, 395 aa, Nostoc punctiforme PCC 73102
MLSRKEIPGVVPNQQCDTYAWFSQRAWVEIDLGALSYNVQQLVQFLSPRTQLMAVVKADAYGHGALTVAQTVIQSGASWLGVATVPEAIQLREGGIEAPILILGATHTPEQIHAIAQWNLQPTLCSPKQALVFSNILESMNHGSPVPVHIKLDTGMSRLGTNWQQAGEFVQLVQRLPHLSIASIYSHLATADDPDTTAMEEQHRRFEEAIAQIKAMEIEAPCLHLANSAAALTDPALHYDIVRVGLAVYGLYPAPHLQNAIDLKPVLQLKARVTQVKTIAAGTAVSYGHKFIAPRELRLAVVGIGYADGVPRSLSNKMQALIHGQRVSQIGTITMDQLMLDVSAIPNIQEGEVVTLLGKQGKEQISADDWAEQLNTISWEILCGFKHRLPRVAVM

SEQ ID NO: 33032 - DNA, 1359 bp, Bifidobacterium longum DJO10A
  CDS (1)..(1359)
atgagcatgaacgcagcacctgaaatcgcattctcgtccgagcagggcaaggccaactatgcggccgcccgccgccaataccccgcacaggccatcgtggacctcaaaaccatgcgcgacaacatggcccacctggtctccgtggtcggcgggcccgcttccggcacggcggtgatgggtgtggtcaaggccgacgcctacggccacggactgctgcccgccgccctggccgcgctcgccggcggcgccacatggctcggcaccgcgcagtcgcacgaagcgttgctgctgcgcaagctcggcatcggccccgaccgctgccatattttgacttgggtatacaacggcaccgaagtcccgttcgacgagctgatcgccgccgacatcgacgtatcggtcggctccctgcccggcatcgacgcggtggccgccgccgcacgcaagctcggcaagcccgcccgcgtacacgtcaaggtcgattccggcttcggtcgcaacggtttcacaccggccggattcgacgccgcgctcgccaaactcgtgccgctcgccaaagagggcgtgttgcatattgtgggtcagtggagccatctcgccgtggccgattcgcccgatgtgtccgaattcgtgtcctccaccgaccgccagatcgaaacattcaaggacttcacgcgccgcatggaacaggccggcattccgccggagatccgtcacctggccaacacagcggccactttggaccgcccggagattcacttcgaactcacccgccccggcatcggcctgtacggctacgagcccgatcccgcgatgggcaccccgcgcgactggcatctgaccccggccatgcgcctgcaggcgcagctcggcacggtcaaggatgtggaggccggccacggcatctcctacggccgcacctacctgaccctggacaacacctcgaccgctattgtgccgctgggctacgccgatggcatccaccgctccgcttccggtttcgatatggaaggtgccaagcacgtggagaagccgggcggcccggtgcgcatcatgaccaccgaaggcccgaagatctaccgcgtgtgcggccgcgtgtgcatggaccagttcatcgtggacctgcacggatccgccgccgaactcggcgttcacgagggcgacacggtcgaactgttcggcccgggccgcggcgaggattacgttgagcctaccgccgacgattgggcccgcgccgccgacaccatcagctacgagatcttcacctgcctgcgcaaccgcatcccgcgcctttacgagcatgccgccgaagtgctgcccgccgccgacctcgccaaactcgaccccgccacgctgctataa

SEQ ID NO: 33033 - protein, 452 aa, Bifidobacterium longum DJO10A
MSMNAAPEIAFSSEQGKANYAAARRQYPAQAIVDLKTMRDNMAHLVSVVGGPASGTAVMGVVKADAYGHGLLPAALAALAGGATWLGTAQSHEALLLRKLGIGPDRCHILTWVYNGTEVPFDELIAADIDVSVGSLPGIDAVAAAARKLGKPARVHVKVDSGFGRNGFTPAGFDAALAKLVPLAKEGVLHIVGQWSHLAVADSPDVSEFVSSTDRQIETFKDFTRRMEQAGIPPEIRHLANTAATLDRPEIHFELTRPGIGLYGYEPDPAMGTPRDWHLTPAMRLQAQLGTVKDVEAGHGISYGRTYLTLDNTSTAIVPLGYADGIHRSASGFDMEGAKHVEKPGGPVRIMTTEGPKIYRVCGRVCMDQFIVDLHGSAAELGVHEGDTVELFGPGRGEDYVEPTADDWARAADTISYEIFTCLRNRIPRLYEHAAEVLPAADLAKLDPATLL

SEQ ID NO: 33034 - DNA, 1074 bp, Pseudomonas syringae pv. syringae B728a
  CDS (1)..(1074)
atgcgtccagcccgcgcctttatcgatcttcaggcactgcgtcacaactaccaattggcccgtgaaagcagcggcggcaaagcgctcgccgtcgtcaaggccgatgcctacggccacggcgcggtgcgcgtcgcgcaggcactggaagcgcaggccgacggttttgcagtggcttgcatcgaagaggcgctagagctgcgtgcggcaggtatccgtgcgcccgtcctgctgctcgaaggctttttcgaagccgacgagctggcgctgattgtcgagcatgacctgtggaccgttgtacacgcgacctggcaactggaagctatcgagcaggcgcgcctgggcaagccgataaccgtctggctcaagctcgacaccggcatgcaccgtgtcggcctgcatcctcacgagtaccaggcgggttatcagcgtctgctggcaaccggcaaagtggccaggatcgtgctgatgagccacttctcccgcgccgatgagctgaacagcggctgcagtgatgagcagctcgcggtattcgagacctttcgcaaggggctggcagcagaaaccagtctgaaaaactccccggcggtgctgggctggccacagattccgagcgactggtcgcgcccgggcatcatgctctacggtgctacgccgtttgatcaggtgcacccgctggcggatcgcctgcaaccggtgatgaccctggaatcgaagatcatcagcgtgcgtgaactgcccgttggtgagcccgtgggctatggcgcgacatttgtctgtgaccggccgttgcgtatcggtgtagtggcgatggggtacgccgacggctatccgcgtcacgcgccgaccggcacgcccgtgcagatcgatggccagccatccaggctgctcggacgcgtgtccatggacatgctctgcgtggacctcaccgaggtgccgcaggccgggctcggcagccgcgtcgagctgtggggcaagcaggtgctcgccagtgaagtggcccagcgcgcagaaaccattccctacgaaatcttctgcaatctgcgtcgcgttccgcgcatctattccgaggactga

SEQ ID NO: 33035 - protein, 357 aa, Pseudomonas syringae pv. syringae B728a
MRPARAFIDLQALRHNYQLARESSGGKALAVVKADAYGHGAVRVAQALEAQADGFAVACIEEALELRAAGIRAPVLLLEGFFEADELALIVEHDLWTVVHATWQLEAIEQARLGKPITVWLKLDTGMHRVGLHPHEYQAGYQRLLATGKVARIVLMSHFSRADELNSGCSDEQLAVFETFRKGLAAETSLKNSPAVLGWPQIPSDWSRPGIMLYGATPFDQVHPLADRLQPVMTLESKIISVRELPVGEPVGYGATFVCDRPLRIGVVAMGYADGYPRHAPTGTPVQIDGQPSRLLGRVSMDMLCVDLTEVPQAGLGSRVELWGKQVLASEVAQRAETIPYEIFCNLRRVPRIYSED

SEQ ID NO: 33036 - DNA, 1032 bp, Actinobacillus pleuropneumoniae serovar 1 str. 4074
  CDS (1)..(1032)
atgatcaaagcgaatgcttacgggcaaggattattgcctgccgccgacacgctcgccgatttggttgaaggattcggggtcgcacgtttaagggaagcgctcgaaattcaagaaaccggttacaccggcaagattttattaatcgaaggattctttgatcgagaagaattactgaagaccctttccagacgattcgataccgttatacattgccaagaacaacttgaacttctcgaacaagttgccgaagaatggcaacaagaacaacaaaaaggcttttggaaacgcaaggcgaaaatttattttccgattaatgtttggttaaaaattgataccggtatgcaccgcctcggcgtacatcccgaacaggttgatatgttctatcaacgcttaaaggcctgtccgttagtggaaagtattagctttgtcagccattttagccgagcggacgaaccggattgcggttataccgaaaaacaaatcgccatatttgaagcggcgacctctccttatcctacacacgaacgcagtatttccgcttcgagcggtattttatattggaaacaggcgcattatgactgggttcgtcccggtattattatgcacggtatttctccgcactatacgccgattaccgatttaggttttaaaccggtaatgaccctctcatcttctttaattgcggtgagaacgcataaagcgggagaaccggtcggttacggcggtacttggattagtgataaagataccaaattaggtgtggtggcaatgggttacggtgatggctatcctcgcaatgcaccggaaggcacaccggttttagtaaacggacgaatcgtaccgattgtcggacgagtgtcgatggatatgctgacggttgatcttggtgctgacagtcaagataaagtcggtgatgaagtgattttctggggcaaagatctgttaattgaggaagtcgcacaacatatcggggtaatcagctatgaattgattaccaaacttaccccacgggtaatttttgaatacgaataa

SEQ ID NO: 33037 - protein, 343 aa, Actinobacillus pleuropneumoniae serovar 1 str. 4074
MIKANAYGQGLLPAADTLADLVEGFGVARLREALEIQETGYTGKILLIEGFFDREELLKTLSRRFDTVIHCQEQLELLEQVAEEWQQEQQKGFWKRKAKIYFPINVWLKIDTGMHRLGVHPEQVDMFYQRLKACPLVESISFVSHFSRADEPDCGYTEKQIAIFEAATSPYPTHERSISASSGILYWKQAHYDWVRPGIIMHGISPHYTPITDLGFKPVMTLSSSLIAVRTHKAGEPVGYGGTWISDKDTKLGVVAMGYGDGYPRNAPEGTPVLVNGRIVPIVGRVSMDMLTVDLGADSQDKVGDEVIFWGKDLLIEEVAQHIGVISYELITKLTPRVIFEYE

SEQ ID NO: 33038 - DNA, 1068 bp, Rickettsia sibirica 246
  CDS (1)..(1068): transl_table=11
atgagcttgtgtactgtagaaataaatctatctacaataaaaaataattaccttttattacaagatatttgcaaaacctcattagtcggtgctgccgttaaagctaacggttacggtcttggagcagtacaaatttctaaagctttaatagaagcaaattgtaggcatttttttgtggcctcaagtgaagaaggagtgaatttacgcaacgctttaggattagatgttaatattttagttcttaacggcgtttttgaacatgatgctttagagctgatagaatataatttaacacctgtcctaaataacttaaaacaaatagaaatttggcaaaaatttagtaatttgaaaaaccgattattgccttgttatttacatttcaatacggggattaatcgtcttggcttgagctctgatgagatagagcagctcattaatgatcgtgatttgttaaaagggctagatttacaatatattataagccatctagctatatccgaggaaatagataatccttataatctagaacaattaaacagatttaaagcttatttacaatatttcccaaacgtcaaagcaagccttgctaattccggcggcatatttttaggacaggattaccattttgatttagcaagaccaggggcagccttatatggtcttaatcccttaacaaagaatcccgtaaccttaaaagctcctataattcacttacagaatttgacactagatagccatatcggttataatatgacttttacaactaagcgtgatagtgtcattgcaacgttaccgcttggttatgccgatgggtttagtcgtaattttagcaatcaaggcgaagtatttattaacagtcgcagcgttcctatagtagggcgagtatcgatggatttaataaatatcgatgttaccgatctaccaccatccgagatttttctagggcaggaagcggaaattatcggaaattattgcacgcccgataaaatagcgagtattataggtactatcgggtatgaggtattaactaaccttggtagtagatataaaagaaagtatatcgggtag

SEQ ID NO: 33039 - protein, 355 aa, Rickettsia sibirica 246
MSLCTVEINLSTIKNNYLLLQDICKTSLVGAAVKANGYGLGAVQISKALIEANCRHFFVASSEEGVNLRNALGLDVNILVLNGVFEHDALELIEYNLTPVLNNLKQIEIWQKFSNLKNRLLPCYLHFNTGINRLGLSSDEIEQLINDRDLLKGLDLQYIISHLAISEEIDNPYNLEQLNRFKAYLQYFPNVKASLANSGGIFLGQDYHFDLARPGAALYGLNPLTKNPVTLKAPIIHLQNLTLDSHIGYNMTFTTKRDSVIATLPLGYADGFSRNFSNQGEVFINSRSVPIVGRVSMDLINIDVTDLPPSEIFLGQEAEIIGNYCTPDKIASIIGTIGYEVLTNLGSRYKRKYIG

SEQ ID NO: 33040 - DNA, 1107 bp, Psychrobacter sp. 273-4
  CDS (1)..(1107)
atgcgcacaatcactattaaacctgccgccattactcataatcttaatcaagttaaaaaatttgcaccagaaaccaaagtccttgctatggtaaaagccaatgcctatggacatggggttgctgctgtcttgccagcgctgcaacaagccaatggggttggtgtagcaaccttgatagaggcgctggaagcaaggcagttgggctgggacaaaacgattgctctgattgaaggagcatttactgtcgatgaatggcgacaagctattgagcacgatatcagttgcgtgattcatcatgcgccgcaattgacatgggcgttagagcatacgccacctgttcattgcgcaactcgtgtcgtttggctaaaatacaatacaggtatgaaccgcttgggctttaatgccgatggcgttattgtcgcggctcagcgtttacatgaagcaggctaccagctgattttgaccacccactttgccaacgctgacgaccagacgcatccattaaatgccatgcaaatccagcgttttaatgacatgcttagcactttgcaagaaaccgtcagcgcagatgttcaaggctcattatgcaattctgctggtattgttaatttccccacacatcatcatgattgggtacgcccaggcatcatgctatatggcagtacacctgtcattgaccaaagtgcgtatgagctagacttgcaagcagccatggaatttagtgctcaaattattgcactgcaaactgtcaatgcaggtgagggaatcggttatggtagtcgctggctggcacaacaagataccagaaccgcactggtgagtgtcggctatggtgatggctatccacgtgtgattgccgataagacttacgttactgtcattgataccatcaaccatcaaagctatccatgtactgtgattgggcgagtagcaatggatatgattgtcattgatgttagcaacgtaccagagggcactgcattaaatagcaaagtaatactatggggtaatgcgccacgtgtcgatgaagtcgctactcatgcaggtacgattagttatgagttgctgtgccgcttaagcttacgccctcaacgactacagggataa

SEQ ID NO: 33041 - protein, 368 aa, Psychrobacter sp. 273-4
MRTITIKPAAITHNLNQVKKFAPETKVLAMVKANAYGHGVAAVLPALQQANGVGVATLIEALEARQLGWDKTIALIEGAFTVDEWRQAIEHDISCVIHHAPQLTWALEHTPPVHCATRVVWLKYNTGMNRLGFNADGVIVAAQRLHEAGYQLILTTHFANADDQTHPLNAMQIQRFNDMLSTLQETVSADVQGSLCNSAGIVNFPTHHHDWVRPGIMLYGSTPVIDQSAYELDLQAAMEFSAQIIALQTVNAGEGIGYGSRWLAQQDTRTALVSVGYGDGYPRVIADKTYVTVIDTINHQSYPCTVIGRVAMDMIVIDVSNVPEGTALNSKVILWGNAPRVDEVATHAGTISYELLCRLSLRPQRLQG

SEQ ID NO: 33042 - DNA, 1188 bp, Anabaena variabilis ATCC 29413
  CDS (1)..(1188)
atgttaagtcgccaacaagcctcaagtatggctgctcatcaacagtgtgatacctatgcttggttttcacaacgcgcttgggtggaaattgacctagaggcgttgtcgcacaatgtccagcaactgaagcagtttttatcaccgcgtactcagttaatggcggtagtcaaagcagatgcttatggtcatggtgctgtaacggtggcgcagacagcattacaagcaggtgctagttgtttgggtgtcgccactgttccggagggtattcaactgcgagaggcgggtatgcaagcgcccattttgattttaggggctacccatacaccagaacaaattcaggcgatcgctcaatggcaactacaaccaactattggtagtcctaaacaagctttaatattttccaataccttggagactatccagcatgattctcctgtacccgtacatattaagttagatacagggatgtctagacttgggactaactggcaacaagcaggggaatttgtacagttagtagagcgtttaccccatttgaatattgctagcgtttactcccacctagcaacagcagatagcccagatccagggattatggaagaacagtatagaagatttgaggaggcgatcgctcaaatcaaagctttgagtattaaaattccctgcctgcatttagcaaactcggctgcaaccttggcagatccaagattacactacgatatggtacgggtaggtttagctgtgtatggactctatccagcccctcatttacagaagaaaatcagcctaaaaccagtcatccaagttcaggcgcgagttacccacgtcaaaacaattgctgcgggtactggtgtaagttacggacatcaatttattgccccccatgaaatgcgccttgctgttgtcggtattggttacgctgatggaataccgcgtaatttatccaacaaaatgcaggttttaattcgtggtcagcgagtaccacaaatcggtgctatcacgatggatcagttgatgatagatgttagtgctttaccagacctacaagaaggggaaattgtcaccttacttgggaaacaaggaaaagaaaaaatcaccgccgatgattgggcagaagagttaaatactatttcctgggaaattctctgtggatttaaacatcgcctacctcgtgtaggagtgatgtaa

SEQ ID NO: 33043 - protein, 395 aa, Anabaena variabilis ATCC 29413
MLSRQQASSMAAHQQCDTYAWFSQRAWVEIDLEALSHNVQQLKQFLSPRTQLMAVVKADAYGHGAVTVAQTALQAGASCLGVATVPEGIQLREAGMQAPILILGATHTPEQIQAIAQWQLQPTIGSPKQALIFSNTLETIQHDSPVPVHIKLDTGMSRLGTNWQQAGEFVQLVERLPHLNIASVYSHLATADSPDPGIMEEQYRRFEEAIAQIKALSIKIPCLHLANSAATLADPRLHYDMVRVGLAVYGLYPAPHLQKKISLKPVIQVQARVTHVKTIAAGTGVSYGHQFIAPHEMRLAVVGIGYADGIPRNLSNKMQVLIRGQRVPQIGAITMDQLMIDVSALPDLQEGEIVTLLGKQGKEKITADDWAEELNTISWEILCGFKHRLPRVGVM

SEQ ID NO: 33044 - DNA, 1215 bp, Synechococcus elongatus PCC 7942
  CDS (1)..(1215)
atgaaaccgattgatccccaaccaactccgcgttggccagcgcgacggttagagcaactttcctatcagcgggcttgggtcgaagttgatcagggggcgatcgcggccaacacgcgtcagatccgccagttcctcgcacccagttgtgaattgatggcagtcgtcaaagcggatgcctatggtcacggcgctgttgcgatcgccagtacggttttaggtgctggagccactgccttgggagttgccacgatcccggaaggagtacggttgcgggaggcggggatcactgcaccgattctgctgctgggatcgatccatagccccgacgaagtgcaagcgatcgctcattggcagatccagcccagtctcagcacccccaagcaggcattaatctgtgcggaagtattagatcgcttgggacagtctctccctgtccatctcaaacttgataccggcatgtcccgcctcggagcaccttggcaaactgcggtcgagttcctgcagctcgttcatggtttgccgtcgctccagcttgccagtctctactcgcacttcgcaacggcagacagcccagatcgcgcgccgctccagcaacaacatgcagcatttgaacaggcgatcgcccaaatccaagcagaaggattgccagtccctaagcttcacattgctaactcagcagcgacgctattggattcgagccttcactacgaccaagtccgtgttgggctagcgctgtatgggctttaccccgcaccgcaccttggcgatcgtctgtctttatatccagctttatcggtcaaagcacgggtgactcacgtcacgaccctgcctgcaggccaaggcgttagctacggccatcgctacgtgactcaacgggaaacgccgatcgccgttgttgggatcggttatgccgatggtgtgccgcgtgccctgtctaatcagatggaggtgctctaccgcggtcagcggctgccacagattggggcgatcacaatggaccagatgatgatcgacatctctgccatgccccaattggcaccgggagatgttgtcaccctgttggggcgatcggggtcagaacagattaccgctgacgattgggccgatcgcgccaatacgattagctgggaaattctctgcggctttaaagatcggctgccacgctttgccgtcgccgcggattggtcatccaatcaagtcactgtcaggtcttaa

SEQ ID NO: 33045 - protein, 404 aa, Synechococcus elongatus PCC 7942
MKPIDPQPTPRWPARRLEQLSYQRAWVEVDQGAIAANTRQIRQFLAPSCELMAVVKADAYGHGAVAIASTVLGAGATALGVATIPEGVRLREAGITAPILLLGSIHSPDEVQAIAHWQIQPSLSTPKQALICAEVLDRLGQSLPVHLKLDTGMSRLGAPWQTAVEFLQLVHGLPSLQLASLYSHFATADSPDRAPLQQQHAAFEQAIAQIQAEGLPVPKLHIANSAATLLDSSLHYDQVRVGLALYGLYPAPHLGDRLSLYPALSVKARVTHVTTLPAGQGVSYGHRYVTQRETPIAVVGIGYADGVPRALSNQMEVLYRGQRLPQIGAITMDQMMIDISAMPQLAPGDVVTLLGRSGSEQITADDWADRANTISWEILCGFKDRLPRFAVAADWSSNQVTVRS

SEQ ID NO: 33046 - DNA, 1122 bp, Ralstonia eutropha JMP134
  CDS (1)..(1122)
atgccaagaccgatccacgccgtcatccatcaacccgccattgcgaacaaccttgaggtcgtccgccgtcacgcccccggttcccgcgtatgggccgtcatcaaggccaatgcctatggccatgggatccgccgtgtgttcgccggcctgcgtggaacggacggcttcgggctgctcgacctgaacgaagccgtgcagctgcgcgacctcggctggcaaggcccgatcctgttgctggaggggtttttccaaccgcaggacgtgccgctccttgaacaataccggctcaccaccgcggtgcattgcgacgagcagctccggatgctggagagcgcacgcccgaagggtccgctggcgatccagctcaaactcaatacggggatgaaccgcctgggcttccacccgtcgcaataccgcacggcgtgggagcgcgcacgcgccatgccctgcgtgggcagtatcgtccacatgacgcacttttccgatgccgacaccccgcgtggcatcgcccaccagatcgaggccttcgacaaagccacggccaacctgccaggtgaggccagcctgtcgaactccgcggcggtcctgtggcatcccgaagcgcaccgcgcatgggtgaggcccggtgtcatcctgtatggcgcatcgccgaccggccgcgaggccgacattgcgggcgtcggcctgcagccggccatgtcgctgcacagcgagctgattgcggtccaggacctgcagcctggcgatacggtcggctacggttccatgttcaccgccgaccggccgatgcgcatcggcgtggtggcctgtggctatgcagatggctacccgcggcatgcaacgggttggggcgaacaccgcgcccccgtgctggtggacggcgtgcgcacccaactcgtgggccgcgtgtcgatggacatgctgtgcgtagacctggggccatgcccgaaggcgaggatcggcagtcctgtcacgttgtggggccagggcctgccgatcgacgatgtcgcgcaggccagcggcacggtgggttacgaactgatgtgcgcgctggcgccgcgcgtgccgaccacggtggcaaccattacggcgccggacagcgcctcgccgctgctggcctga

SEQ ID NO: 33047 - protein, 373 aa, Ralstonia eutropha JMP134
MPRPIHAVIHQPAIANNLEVVRRHAPGSRVWAVIKANAYGHGIRRVFAGLRGTDGFGLLDLNEAVQLRDLGWQGPILLLEGFFQPQDVPLLEQYRLTTAVHCDEQLRMLESARPKGPLAIQLKLNTGMNRLGFHPSQYRTAWERARAMPCVGSIVHMTHFSDADTPRGIAHQIEAFDKATANLPGEASLSNSAAVLWHPEAHRAWVRPGVILYGASPTGREADIAGVGLQPAMSLHSELIAVQDLQPGDTVGYGSMFTADRPMRIGVVACGYADGYPRHATGWGEHRAPVLVDGVRTQLVGRVSMDMLCVDLGPCPKARIGSPVTLWGQGLPIDDVAQASGTVGYELMCALAPRVPTTVATITAPDSASPLLA

SEQ ID NO: 33048 - DNA, 1074 bp, Methylobacillus flagellatus KT
  CDS (1)..(1074)
atgcgtgcgaccacagcgacgattgacctgggcgcgctgcgccataacctgaatctcgtacgccagcgtgcgccgggctccagggtgctggcggtggtcaaggcggatgcctacggacacggcctgctgcgggttgcgccggggctggcggaggccgacggttttggcgtattgcgcctggaagaggccctggcattgcgagaggcgggctatcgccaacgcctgctactgctggaaggaatattcagcatggatgagctgggcgccgccgcccagcacggcatcagtgttgtcgtgcacaacgcacagcagctcgccatgttcgaggcaatggcagctgcctccgtcaagcctatctcggtattcctcaaaatgaacagcggcatgaatcgactgggattcaagtctcaggcctacaaacaagcgttgcagcggctggaggcttgtcctgtggtagcagacgtcagcttgatgacgcatttcgccacagcggatgaagagcggggcattgccgaccagctcaaggagttcgatgctgtgacggcaggctggcaccatcccgtcagcctggccaattctgccgcaatcttgcgtttcccggaggctcatcgcgattgggtgagacccggcatcatattgtatggcgcatccccggtttcaggcgtcagtgcggccagtttcgggctgcggcccgctatgcgtttcactagcgaagtgatcgcagtgcaaacgctggaggccggggatatcctcggatacggtgcgcgtttcaccgctacgcaggcaaccagggtcgcgattgtcgcctgcggatatgcggacggctatccgcgccatgcgcccaacggtacgcctatcgccatcgacgggcatcgcacccaaaccctgggacgcgtctccatggacatgctgtttgccgacatcagccagttgcccgatgccgatgtcggcagccaggtggaactctggggcgaggttgtgcctgtggatgccgttgccgaagccgcgggtacggtagggtacgagttgttgtgcgcggtggcgccgcgcgtggtgttcaaggtgacaggctga

SEQ ID NO: 33049 - protein, 357 aa, Methylobacillus flagellatus KT
MRATTATIDLGALRHNLNLVRQRAPGSRVLAVVKADAYGHGLLRVAPGLAEADGFGVLRLEEALALREAGYRQRLLLLEGIFSMDELGAAAQHGISVVVHNAQQLAMFEAMAAASVKPISVFLKMNSGMNRLGFKSQAYKQALQRLEACPVVADVSLMTHFATADEERGIADQLKEFDAVTAGWHHPVSLANSAAILRFPEAHRDWVRPGIILYGASPVSGVSAASFGLRPAMRFTSEVIAVQTLEAGDILGYGARFTATQATRVAIVACGYADGYPRHAPNGTPIAIDGHRTQTLGRVSMDMLFADISQLPDADVGSQVELWGEVVPVDAVAEAAGTVGYELLCAVAPRVVFKVTG

SEQ ID NO: 33050 - DNA, 1098 bp, Rubrobacter xylanophilus DSM 9941
  CDS (1)..(1098)
ttggaggtgccgggacgcgtctgggccgaggtggacctcggcgccgtccgccacaacgtgcggaccctccgccgccgctcccgggccccgcgcctgatggccgtggtgaaggccgacgcctacggccacggggcggtgccggtcgcccgggcggcgctcgcgggcggggccgacagcctcgccgtggccaccgccggggagggcgccgagctgcgccgggccgggatccgggcgcccgtcctcgtcttcggggacctcaccccggaggggctgcgggccgccgctcgcgagcggctggcggtgagcgcccactccgtgccctccgcccgccgcatcgccgcctccggcctcgacctggaagtgcaccttaaggtggataccggcatgaaccggtgggggctcgagcccggcgaggtcggggcggcgctcaaggccctggggagaacccccgacggggtctacacccacctggcctgcgccgactccgacccggaggccaccgggcggcagctcgccctcttcgactccgtgctcgccgcgcaccccttcggcggggcgctcgcgcacgccgccaactcggccggcaccctctggcacccgggctcgcactacggctgcgtgcgccccggcatagccctctacgggctccaccccgccggggacgccggagacccggcggcggagggcctccggcccgcgctcgcgctcaagagctacgtcgccgcggtccggcgcctcgagcccggagagggcgtctcctacgggctgaccttccgcgccccggagccgatgctcgccgccaccgtgcccgtggggtacgccgacggctaccggcgggcgctctccggcagggccgaggcgctcatccgcggccgccggcggccgctgctcgggcgggtctcgatggacgcctgcgtcttcgcggcggatagggaggtgcgggtgggggacgaggtcgtgctcctcggcgagcagggaggtggggcggtccgggccgaggagctcgccgcccgcgccggcacgataaactacgagataacaaccggcctgaacccccggcgtgtggagaggagctacgcagatgttcaaggatcttga

SEQ ID NO: 33051 - protein, 365 aa, Rubrobacter xylanophilus DSM 9941
MEVPGRVWAEVDLGAVRHNVRTLRRRSRAPRLMAVVKADAYGHGAVPVARAALAGGADSLAVATAGEGAELRRAGIRAPVLVFGDLTPEGLRAAARERLAVSAHSVPSARRIAASGLDLEVHLKVDTGMNRWGLEPGEVGAALKALGRTPDGVYTHLACADSDPEATGRQLALFDSVLAAHPFGGALAHAANSAGTLWHPGSHYGCVRPGIALYGLHPAGDAGDPAAEGLRPALALKSYVAAVRRLEPGEGVSYGLTFRAPEPMLAATVPVGYADGYRRALSGRAEALIRGRRRPLLGRVSMDACVFAADREVRVGDEVVLLGEQGGGAVRAEELAARAGTINYEITTGLNPRRVERSYADVQGS

SEQ ID NO: 33052 - DNA, 1158 bp, Mesorhizobium sp. BNC1
  CDS (1)..(1158)
atgacagcggccaagcgagcgggggctttcctgacggtcgatctcgaggccgtcaccgcgaactggttgctgctggccggtagggccgctggcgcagagtgcgctgcggtcgtaaaggccgatgcgtatgggctaggcgctgcggaagtcgctactgccctgcaggatgccggatgcaggacctttttcgtcgcgcatcttgaggaagggttgtcactccggcgcacactgggttccggctccagaatatttgttctcaatggaacgccgccggacacacaagaagagttcgggcaagctgcgctgacgccggtggtcggtacgatcaacgaacttcaggcgtggcgtaagcatgcggcgacgaagcgtgggcccattccagtcgcgcttcaactggatactggaatgtcacgcttgggactatcgcctagcgatgtatcgggcatcgcggcagatactaccctgctgagaggcattcatatcgaactcgtcatgagccacctcgcatgcgccgacgaacccgggcattccgctaatgaatcgcaaaggtccaggttccaacggctccgacgaatgcttcctcaagcgccggcttctattgcgaactcatcgggaacattcctcggcaaaggattccatttttccatgatccggccgggtgctgccctgtacgggatcaatcctacgccttaccaacccaatccgatgtgtcaggtcgtcaaagtcgcggcccgcgtcctgcaggtgcgccaggcaagagcgggaactggaatcggctatggccacgcggcgcgtgctcgccgcctatcaatgctagccaccatcgcactgggctacgcggatggctggccctgccaagcgagcggagcagcgtactatcgcggccaacgacttccattcattggccgagtgtcgatggacagcattatcctcgatgtgactggatgctccaatccgccgcgggaaggagatctcgtggagtttatctgcccatcgcagacggttgatgaaattggcaggctggcgggaagcatcggctacgaggtgctaacgcggctggggagaaggtttcaccgccgctatatccgccccaatatatcaccggcgcagagcacacgcagcggatcccccctgctggcagatgatacagcagaatga

SEQ ID NO: 33053 - protein, 385 aa, Mesorhizobium sp. BNC1
MTAAKRAGAFLTVDLEAVTANWLLLAGRAAGAECAAVVKADAYGLGAAEVATALQDAGCRTFFVAHLEEGLSLRRTLGSGSRIFVLNGTPPDTQEEFGQAALTPVVGTINELQAWRKHAATKRGPIPVALQLDTGMSRLGLSPSDVSGIAADTTLLRGIHIELVMSHLACADEPGHSANESQRSRFQRLRRMLPQAPASIANSSGTFLGKGFHFSMIRPGAALYGINPTPYQPNPMCQVVKVAARVLQVRQARAGTGIGYGHAARARRLSMLATIALGYADGWPCQASGAAYYRGQRLPFIGRVSMDSIILDVTGCSNPPREGDLVEFICPSQTVDEIGRLAGSIGYEVLTRLGRRFHRRYIRPNISPAQSTRSGSPLLADDTAE

SEQ ID NO: 33054 - DNA, 1059 bp, Exiguobacterium sp. 255-15
  CDS (1)..(1059)
atgagttcaagaactgtcgttaccattgatcgggaagcggtgcggcataatgtcgcatcggttttcgcccggtctaacaagcagatttttgccgtggtcaaaaacaatgcttacaacttagggatgattgaaatggtcgccacattgatggaagccggtgtccggcatttcgcagtggcggaagtctatgaagcaattgaaatcaaaacgaattttccagacagttatgtcctggcgatgaatccggcatcggattttaaagaggtccgcttgcatggagtagcgctcggaattccttcgctcgattggctgacacgtcatcaggcggatttatcgggaattgaactgcatctaaaaataaatgtcgggatgaaccgttttggtgtcagttcgctcgaagaagcattagcggtgcttgaaaccgtacgggagcaagagctgacgttaacagggctctacacgcatttcccgcttgccgatgaaccgggagccgatcacgacggtcaggttgaacggttccttgaaatcggaaatccgttacaggcgaaacatagctttacttatatccatgccgaaaacagtgcaacgatcgtcaagcatgatccgcgcctcgcctgttgcaattacgtccggcccggtatattcctgtttggctattcgccgatcgaaaaaatggattggctcgtcccctcactccggatgacgacggaagtcgttgagattcgtcaagtggaagcaggggaacatgtcggctacggtacgtcgtatacggcaccgacagcgattcgtgtcgccgttctgccggtcggctacggggacggggttgtccgcggacggtcgtcactgccggtcatcatcaacggaaaacgttatccgatcatcagtaagttatttatgagtcatacgttcatcgccgtcgattcgacggtggaaatcggtgataaagttgttctgtacggagacggcatcgaaattgatgacatcacccggaccgggacagccaataattcggaacagatgtgtgcccgttcgtggcgtttaacacatcgttatttataa

SEQ ID NO: 33055 - protein, 352 aa, Exiguobacterium sp. 255-15
MSSRTVVTIDREAVRHNVASVFARSNKQIFAVVKNNAYNLGMIEMVATLMEAGVRHFAVAEVYEAIEIKTNFPDSYVLAMNPASDFKEVRLHGVALGIPSLDWLTRHQADLSGIELHLKINVGMNRFGVSSLEEALAVLETVREQELTLTGLYTHFPLADEPGADHDGQVERFLEIGNPLQAKHSFTYIHAENSATIVKHDPRLACCNYVRPGIFLFGYSPIEKMDWLVPSLRMTTEVVEIRQVEAGEHVGYGTSYTAPTAIRVAVLPVGYGDGVVRGRSSLPVIINGKRYPIISKLFMSHTFIAVDSTVEIGDKVVLYGDGIEIDDITRTGTANNSEQMCARSWRLTHRYL

SEQ ID NO: 33056 - DNA, 1113 bp, Dechloromonas aromatica RCB
  CDS (1)..(1113)
atgaaaacatcgcgtcccatccgcgcacgcattgcgccggcggcgattttgcacaactatcgtctggctaaacgtcacgctccccagtccaaggcttgggccgtgatcaaggccaatgcctacggacatggccaatggcgtgccgttgatgccttgcgcggcgaggccgatggttttgcgctgctcgaatgtgaaaacgcggttgccctgcgtgaggctggcgttactcaacccatcctgatgctggagggaatattcagtgcccgtgacgtgcgggccgttatcgaataccggctgaccagcgtcattcattgcctcgaacaattggaactactcgtccgcaatggccggttcgacacaccgatctctgtgtgcctgaagctgaatacagggatgaaccgcctgggttttacggccgcgaccttgccccgcgcctgggagatactccagcaattgccgcaggttgatgtcaccttgatgactcactttgccgacgccgatggtgagcggggcgtaacttggcaattggagcgctttcatgacctggccggagattgggcggggccggtgagtctcggtaattcggcagccattctgagccaccccaaggcgcacggcgactgggtgcggccgggcatcatgctttatggcgccagcccgtttgctgatcaaagtgcagttgatctgggtttgcgaccggtcatgacgctggagagtgccgtcatcggcatccaggatctggcagcgggggagcgggttggttatggcggaacttttactgccgatcggccgatgcggattggcgtcgtcgcctgtggatatgccgacggttacccgcgtcacgcaccgaccggcacacccatagcagtcatgggccgccggacgcgtacgataggccgggtatcgatggacatgctggcctgtgatctgactgatgttccggaggcgggtatcggctcgccggtgacgctgtgggggctgggtatagccggcgctgtgccggccgacgaagtggccgctgcggccggtactgttgcctatgagctcttctgtgccgtggcgccgcgtgtaccggtggtggtggatgacgctgtcgcggcagggcgcccataa

SEQ ID NO: 33057 - protein, 370 aa, Dechloromonas aromatica RCB
MKTSRPIRARIAPAAILHNYRLAKRHAPQSKAWAVIKANAYGHGQWRAVDALRGEADGFALLECENAVALREAGVTQPILMLEGIFSARDVRAVIEYRLTSVIHCLEQLELLVRNGRFDTPISVCLKLNTGMNRLGFTAATLPRAWEILQQLPQVDVTLMTHFADADGERGVTWQLERFHDLAGDWAGPVSLGNSAAILSHPKAHGDWVRPGIMLYGASPFADQSAVDLGLRPVMTLESAVIGIQDLAAGERVGYGGTFTADRPMRIGVVACGYADGYPRHAPTGTPIAVMGRRTRTIGRVSMDMLACDLTDVPEAGIGSPVTLWGLGIAGAVPADEVAAAAGTVAYELFCAVAPRVPVVVDDAVAAGRP

SEQ ID NO: 33058 - DNA, 1116 bp, Magnetospirillum magnetotacticum MS-1
  CDS (1)..(1116)
atgaccgaccttgcccgcgccaccgccctgctgaccatcgatgtggcggccatcgtcgccaactggaagcggctttccgccctggttgcccccgccgaggcttccgccgtggtcaaggcggattgctatgggctgggtatggaacacattgcaccggccctctccgccgctggatgccagtccttcttcgtggcctgcgtcaatgaaggcatcgcccttcgccggatcctgcccgccgcggtgatccatgtgctgagcggacctttgggcggcgatgagggcgagttcgccgcccataatctgatcccggtcctgaactccctggcccagatcaccggctgggccggttttgccaagaagggcagcggcgcaccggcggcggccatccatatcgacaccggcatgaaccgcctcggcttatccgagaccgagttggaacgcctggccgccaagccggaaatcaccgccgccatccgccccattctggtcatgagccacctggcctgcgccgatgacgccgattcgcccatgaatgcccggcagctgacgacgctgcggcggctggcatcccatcttcccgccctgccccaatccatcgccgcctcgtcgggcatcttcctgggccgcggctttcacttagggttggtgcgccctggcgccgccctctatgggctgaaccccatgccgggccgccccaatcccatgagccaagtggttaaactgcaaggaaaaatcgtccaggtccgtgacgttgacagcccccagaccgttggctatggtgccacccaccgtgtcgaggggaagcgaaagctggcggtcgtggcggtcggttatgccgatggctggttccggtccctctccaatcgcggacatggcatgatcgggggaatgaaggtgccggtggccggacggatttccatggatttgaccaccttcgacgtcaccgacgtcccggcggagcatgcccatcccggcgcctggatcgagttgatcggcccggatctcagcccggatcgtgtcgcggacgaagccggtaccatcggctacgagatcctcacctccctggggcgccgccatcatcgccgctggaccggcacggagacggcaaaatcatga

SEQ ID NO: 33059 - protein, 371 aa, Magnetospirillum magnetotacticum MS-1
MTDLARATALLTIDVAAIVANWKRLSALVAPAEASAVVKADCYGLGMEHIAPALSAAGCQSFFVACVNEGIALRRILPAAVIHVLSGPLGGDEGEFAAHNLIPVLNSLAQITGWAGFAKKGSGAPAAAIHIDTGMNRLGLSETELERLAAKPEITAAIRPILVMSHLACADDADSPMNARQLTTLRRLASHLPALPQSIAASSGIFLGRGFHLGLVRPGAALYGLNPMPGRPNPMSQVVKLQGKIVQVRDVDSPQTVGYGATHRVEGKRKLAVVAVGYADGWFRSLSNRGHGMIGGMKVPVAGRISMDLTTFDVTDVPAEHAHPGAWIELIGPDLSPDRVADEAGTIGYEILTSLGRRHHRRWTGTETAKS

SEQ ID NO: 33060 - DNA, 1071 bp, Burkholderia cepacia R18194
  CDS (1)..(1071)
atgccgcgcccgatctccgccaccatccataccgccgctctcgcgaacaatctctccgtcgtccgccgctttgccggcccgtccaaggtctgggcggtcgtcaaggccaacgcgtacggtcacggtctcgcccgcgcgtttcctggcctgcgcggcaccgacggcttcggcctgctcgacctagacgaggccgtcaagctgcgcgagctcggctgggccggcccgatcctgttgctcgaagggttcttccgctcgactgacatcgacgtgatcgaccgctacagcctgacgacgaccgtccacaacgacgagcagatgcggatgctggagacggcgcggctgtcgaagcccgtcaacgtgcagctcaagatgaacagcgggatgaaccggctcggctacctgccggaaaaataccgcgccgcatgggagcgcgcccgcgcgtgccacggcatcggccagatcacgttgatgacccatttttcggatgcggacaacgagcgcggcgtcgccgagcagctcgcgacgttcgagcgcggcgcggaaaacattgccggtgcgcgcagcctcgcgaactccgcagccgtgctgtggcatccggacacgcacttcgattgggtgcgcccggggatcgtgctgtacggcgcgtcgccgtccgggttgtcgtccgacatcgccgataccgggctgaagcctgcgatgacgctcgcgtccgagctgatcgcggtgcagacgatcgcgaagggccaggccatcggctatggctcgacgttctccgcgcaggcgccgatgcggatcggcgtggtcgcgtgcggttacgcggacggctatccgcgggtcgcgcccgaaggcacgcccgtgatcgtcgacggcatccgcacgcggatcgtcggtcgcgtatcgatggacatgatcaccgtcgacctgtccccgtgcccgcaggccggtgtcggcgcgcgcgtcgagctgtggggcaacgcgctgccgatcgacgacgtcgcccgccattgcggcacgatcggttacgagctgatgtgcgcggtcgccggccgcgtgcccgtgcgcgcggaataa

SEQ ID NO: 33061 - protein, 356 aa, Burkholderia cepacia R18194
MPRPISATIHTAALANNLSVVRRFAGPSKVWAVVKANAYGHGLARAFPGLRGTDGFGLLDLDEAVKLRELGWAGPILLLEGFFRSTDIDVIDRYSLTTTVHNDEQMRMLETARLSKPVNVQLKMNSGMNRLGYLPEKYRAAWERARACHGIGQITLMTHFSDADNERGVAEQLATFERGAENIAGARSLANSAAVLWHPDTHFDWVRPGIVLYGASPSGLSSDIADTGLKPAMTLASELIAVQTIAKGQAIGYGSTFSAQAPMRIGVVACGYADGYPRVAPEGTPVIVDGIRTRIVGRVSMDMITVDLSPCPQAGVGARVELWGNALPIDDVARHCGTIGYELMCAVAGRVPVRAE

SEQ ID NO: 33062 - DNA, 1104 bp, Rubrivivax gelatinosus PM1
  CDS (1)..(1104)
atgccgcgccccatcgaagccctgatccacgccgaggccctgacgcacaacctggcccgcgcccgagcggccgttcccgacgcgcgggtgtgggcggtggtcaaggcccatgcctacggccacggcatcgcgcgtgtcttcgaggcgctccgtgcggccgacggcttcgcgctgctcgatctggccgaggcgcagcaactgcgcgacctggggtggcgcggcccgatcctgctgctcgagggcgtgttcgaaccgcgcgacctggagctttgctcgcgcctgaacctctggcacacggtgcactgcgaggcgcagatcgactggctggcgatgcacaagacccaccagccgcaccgggtgttcctgaagatgaacagcggcatgaaccggctgggcttccggcccgcggcgttccgcgcggcgtggacgcggctccatgcgctgccgcaggtcgacgagatctcgctgatgagtcacttctcggacgccgacggcggccgcggcatcgccgcggcgatgcaggtcttcgacgacgccacgcgcgacctgccgggcgaacgcagcctctgcaacagcgcggccacgctgcgccacggcgccgacgctgcggtgcgtgccgactgggtgcgcgccggcatcatgctgtatggctccgcgcccgatttcccctcgcacgacatcgcccactgggacctgcagccgacgatgacgctgcgcgcgcgactgatcggcacgcaggatctgcaggccggcgacacggtgggctatggcagccgcttcaccgccgaggcgccgatgcgcatcggcgtggtggcctgtggctatgcggacggctacccgcgtcacgcgccgagcggcacgccggtgctggtcgatggcgtgcgcacgcggctggtcgggcgggtgtcgatggacatggtgaccgtcgacctgggcgggctgccccaggccgcgcgcggcagcgaggtcacgctgtggggtcgggcgtcgtccggcgcggtgctgccgatcgatgaggtcgcccacgcggccggcacggtggggtacgaaccgatgtgcgcgctggccgcgcgcgtgccggtgcggctggacgccgccggctga

SEQ ID NO: 33063 - protein, 367 aa, Rubrivivax gelatinosus PM1
MPRPIEALIHAEALTHNLARARAAVPDARVWAVVKAHAYGHGIARVFEALRAADGFALLDLAEAQQLRDLGWRGPILLLEGVFEPRDLELCSRLNLWHTVHCEAQIDWLAMHKTHQPHRVFLKMNSGMNRLGFRPAAFRAAWTRLHALPQVDEISLMSHFSDADGGRGIAAAMQVFDDATRDLPGERSLCNSAATLRHGADAAVRADWVRAGIMLYGSAPDFPSHDIAHWDLQPTMTLRARLIGTQDLQAGDTVGYGSRFTAEAPMRIGVVACGYADGYPRHAPSGTPVLVDGVRTRLVGRVSMDMVTVDLGGLPQAARGSEVTLWGRASSGAVLPIDEVAHAAGTVGYEPMCALAARVPVRLDAAG

SEQ ID NO: 33064 - DNA, 1125 bp, Rhodospirillum rubrum
  CDS (1)..(1125)
atgggtcatgaggaccgggcgacggcccttcttaccgtcgatcttgatgccatcgccgataactggctggccctgcgcggccggctgcgccccggggcgtcgtgcgccggggtggtcaaggccaatgcctatggcctgggggcgcgcaaggtcgttcccgccttgctggccgccggctgccgcgatttcgtcgtcgcccagatcgacgagggcctggatatcctcgatctgctgcccgccgacgcccgcctgttcgtgctctcgggcccgcccgagggggccgaggacgaggtgctcgacagcgcgctgatcccggtgctcaacagtcccgatcaaatcgaccgttgggccaaggcctgcgcgcgggccgggcgcaaggcgccagccgcccttcatgtcgataccggcatgcgccgcctggggctgacgccgctggaactcgacgccctgctcgccgatccccgcccgctcgccgccttcaccccagtgctggtgatgacccatctcgcctgcgccgacgagcccgatcatccgctcaacgccgagcagcgcgccctgttcgccgccgccgccgcccgcttccccggcctgcgcgccagccttgccaatacctcgggcattttcctgggccccgagtggcattttgatctggcgcgcccgggaattggtctttatggcggaaatccgaccgtcggtacagccaaccccatgcggcaagtggttaaattacaaggaaaaatcctgcaagttcgccgcattgacacccccttgagcgttggctatggtgcaacgcatacggccccggcgggaagcacgatcgcaaccgtcggtgtcggatatgccgacggatttccgcgttcggcgggcaaccgggccatggggcttctggccggtcgatccgttccggtcgttggtcgtgtgtccatggatctgctgaccttcgacgtatcggatgttcccgaaaacttggcgagacccggtgccatgatcgaccttcttggacccgatctgagtgtggacgccctggccgatcgcgccgatacggtgtcctacgaaattctcacgcgactaggcgcgcgctacccgcgccgctacggcggggtgagggaggggagcggccaatga

SEQ ID NO: 33065 - protein, 374 aa, Rhodospirillum rubrum
MGHEDRATALLTVDLDAIADNWLALRGRLRPGASCAGVVKANAYGLGARKVVPALLAAGCRDFVVAQIDEGLDILDLLPADARLFVLSGPPEGAEDEVLDSALIPVLNSPDQIDRWAKACARAGRKAPAALHVDTGMRRLGLTPLELDALLADPRPLAAFTPVLVMTHLACADEPDHPLNAEQRALFAAAAARFPGLRASLANTSGIFLGPEWHFDLARPGIGLYGGNPTVGTANPMRQVVKLQGKILQVRRIDTPLSVGYGATHTAPAGSTIATVGVGYADGFPRSAGNRAMGLLAGRSVPVVGRVSMDLLTFDVSDVPENLARPGAMIDLLGPDLSVDALADRADTVSYEILTRLGARYPRRYGGVREGSGQ

SEQ ID NO: 33066 - DNA, 1107 bp, Ralstonia metallidurans CH34
  CDS (1)..(1107)
atgccaagacccattcaagccgtcatccaccagcccgcgctggccaacaatcttgaggtggtgcgtcgccaagcacccgcatcccgcatctgggcggtggtcaaggccaacgcctacggccacggcatccgccgagtctttgccggcctcaaggccgccgacgggtttggcctgctcgatctctcggaagccgtgctgttgcgcgaccttgggtggcagggcccgatcctgctgctcgaaggcatcttccaggcgcaggatgtaccgctgctcgagcaataccgcctgaccaccgccgtgcactgcgaggagcagttgcggatgcttgagctggcccgccccaaggggccgctggcgatccagctcaagctgaataccggcatgaaccgcctgggcttccgtccggcgcagtaccgcgccgcctgggaacgggcccggaccatgtcctgcatcggcagcattgtccacatgacgcacttttccgatgccgacagcaagcgcggcattgcgcatcaggtggaagccttcgaagccgccacggccaacctgccgggggaggtcagcatggccaactcggcagccgtgctctggcatccgcaggcgcatcgcaactgggtgcgtcccggcatcatcctttacggcggatcgcccaccggggtgtcgtccgatatcgcagagaccggcctgcaaccggcgatgtctctccatagcgagctgatcggcatacaggatctgcaaccgggcgatacggtcggctatggttccatgtttactgccgaccgcgcgatgcgggtcggggtggtggcgtgcggctacgccgacggctacccacgccacgcggtgggctggggcgagcgccgcgcgccggtgctggtcgacggcgtgcgcacgcaattggtggggcgggtgtcgatggacatgatctgcgtcgacctgaccccctgcccgaaggcaaaggtaggcacgccggtcacgctctggggccatggtctgccaatcgacgacgtggccgccgccagcggcacggttggctatgaactgatgtgcgcgctggcgccgcgcgtgccgacttccgttgccacgttgaccaccgccgacgccgtataa

SEQ ID NO: 33067 - protein, 368 aa, Ralstonia metallidurans CH34
MPRPIQAVIHQPALANNLEVVRRQAPASRIWAVVKANAYGHGIRRVFAGLKAADGFGLLDLSEAVLLRDLGWQGPILLLEGIFQAQDVPLLEQYRLTTAVHCEEQLRMLELARPKGPLAIQLKLNTGMNRLGFRPAQYRAAWERARTMSCIGSIVHMTHFSDADSKRGIAHQVEAFEAATANLPGEVSMANSAAVLWHPQAHRNWVRPGIILYGGSPTGVSSDIAETGLQPAMSLHSELIGIQDLQPGDTVGYGSMFTADRAMRVGVVACGYADGYPRHAVGWGERRAPVLVDGVRTQLVGRVSMDMICVDLTPCPKAKVGTPVTLWGHGLPIDDVAAASGTVGYELMCALAPRVPTSVATLTTADAV

SEQ ID NO: 33068 - DNA, 1173 bp, Burkholderia fungorum LB400
  CDS (1)..(1173)
atgtctgttccgatcatcgaacccgccgccgatgcgcaaggtgtgcgcttgctgcgtcccagttgggccgaactcgactatggcgccgtcgcggcgaatctggcggtcgcgcgcgaacaggtgggacgcgccacgaaaatctacttcgtctgcaagggcgacggattcggctttggcgccgcgaaggttgcgcggctggcggcgcaagcgggtgtcgatggcttttgcgtcggcagtccggaagagggcgttacgattcgccgtgcgggtatcgaccgcgacatactgctgtttgcttcgaccctgccggaagatgcagcgcaggtcgcggcgttggggctcacggtgacgatccagagtcgggaaagcctgcatgcgttcatcaacgcaggcgtggcggtggatgcgttcctggagatcgatccgggcttcgggcgcttcggctttctgccgtcgcaatggcaagccgcgttcgcggcgctgcgcgatcagtcgaccgtgcggctcaaaggcgtgtacacgcatctgagctcgccggagagcgaagacgtgacgcgccagcaggccggcgtgttcgatgcggcgctggccgacgcgcgcgccgcgggcttcgataacctaacgacgatgctggcaagctcgcgggtcatgctcgcgcatccgcatctggcgtatcaggcagtcgatcccgggcggcttctatacggtgcgctcgacgcggactggatggcccgcgcgccgttgcggcccatgttgcgggccgtgcgtgggcgcatcattcacgttcaggagcacccggccggagccacgctcgggattggctatgcggaaccgatccggctcgaacggggcgtgcgtatcggtgtcgtgccgatcggtttctgggacgggttgaatcatgtgccgccgctgggccgcgtgctggtgcacggacagccggcgcgcattcttgggcgccgctctttccagcataccgtgatcgatatcacggagattgccgcggcccggaccgggagcgtggtcacgttgctcggtcaggacggcgaccagtcgatcacgatcgacgagatggcggaaacgttgcggctgccggtcatggagttgattccccggctggcgagaagtctgccccacgtcgaagtgaaaacggcggatccggcgggcaacaactga

SEQ ID NO: 33069 - protein, 390 aa, Burkholderia fungorum LB400
MSVPIIEPAADAQGVRLLRPSWAELDYGAVAANLAVAREQVGRATKIYFVCKGDGFGFGAAKVARLAAQAGVDGFCVGSPEEGVTIRRAGIDRDILLFASTLPEDAAQVAALGLTVTIQSRESLHAFINAGVAVDAFLEIDPGFGRFGFLPSQWQAAFAALRDQSTVRLKGVYTHLSSPESEDVTRQQAGVFDAALADARAAGFDNLTTMLASSRVMLAHPHLAYQAVDPGRLLYGALDADWMARAPLRPMLRAVRGRIIHVQEHPAGATLGIGYAEPIRLERGVRIGVVPIGFWDGLNHVPPLGRVLVHGQPARILGRRSFQHTVIDITEIAAARTGSVVTLLGQDGDQSITIDEMAETLRLPVMELIPRLARSLPHVEVKTADPAGNN

SEQ ID NO: 33070 - DNA, 1152 bp, Magnetococcus sp. MC-1
  CDS (1)..(1152)
atgcaatggacccatcgccccacatggttggaaatcgacctcgccgccctacgccataacctccgccaagcccgcaccgctaccggaccccaagtcgcccactttcccgtcatcaaagccgacggctacggcatcggcgccatcgccgtcgcccacaccctcgaagaagaggccgacggcttctgcgtggccctggtcgaagaggccgaacaactgcgcaccgccggaattaataaacgcatcatgctcttctcaggactctaccccggtctagaagaacgcgccatccgcgcccgtgttgaacccttcctcagtgacgaaatcaacctaaacgctctgtggcaagccgccaaatgctacggcccaatctccgtgcatatcaaaatagatagcggcatggcccgcctcggttaccaccccgaacacgtgccgagcctattagatcaactcgcccatatgcccgaacttaaattggccggcctggtttctcatatggcctgtgccgatgaccgtcactcccccatcaccaatgcccagttggcgaccttaagccccatacttgaacaccccctggttaaacaaacacaagcccaactctccctagccaactccgcaaccatcctcggccaccccaacgcccactaccaatgggtacgccccggtattatgatctacggagcctcccccttctttccccataccaatgccgccaacgaaggattgcaacccgtggtgcgctgggtcacccatatccaacgcattcacaccctggaaaaaggtaaatcccttggctacggccacacctttaccgccacacgccctacccgtatcgcacaactgcccgtcggctacgccgatggctataaccgcctgtggagtaataaaggttccgtgttgatcgcaggccaacactgccccgtggtggggatcgtctgcatggatcaaatcgccgtggatattagcgatcttcaaggtgaggtcaaacagtgggatgaagcggtactactgggaaaacaacacaatgctgaaatcaccctggaaaactgggcaaccgaacttaaaaccattccatacgaaatcctgacccgcattgggccaagagtgccccgacgctaccgcgatggtagcatcctgtcaggcagctttggctaa

SEQ ID NO: 33071 - protein, 383 aa, Magnetococcus sp. MC-1
MQWTHRPTWLEIDLAALRHNLRQARTATGPQVAHFPVIKADGYGIGAIAVAHTLEEEADGFCVALVEEAEQLRTAGINKRIMLFSGLYPGLEERAIRARVEPFLSDEINLNALWQAAKCYGPISVHIKIDSGMARLGYHPEHVPSLLDQLAHMPELKLAGLVSHMACADDRHSPITNAQLATLSPILEHPLVKQTQAQLSLANSATILGHPNAHYQWVRPGIMIYGASPFFPHTNAANEGLQPVVRWVTHIQRIHTLEKGKSLGYGHTFTATRPTRIAQLPVGYADGYNRLWSNKGSVLIAGQHCPVVGIVCMDQIAVDISDLQGEVKQWDEAVLLGKQHNAEITLENWATELKTIPYEILTRIGPRVPRRYRDGSILSGSFG

SEQ ID NO: 33072 - DNA, 1125 bp, Thermobifida fusca
  CDS (1)..(1125)
atgtcgtcttttgccgaagccaggatcgacctggacgccatcagcggcaacattgcgctcctcgctgaacgagcagcgggcgcccaggtgatgggcgtggtcaaagcagacgggtacgggcacggcatggtccctgccgcgcgggcagcgctcgccggaggggcaacctggctgggcaccgcattcattgccgaggcgctgcagttgcgtgctgccggcatcgacgcgccgatcctcgcctggctggtgccccccggagaacccctcaccgaggcgatcgacgccggcatcgacctcggtatcggatcgatgtgggtgatcaacgaggtcattgacgcggcccggcaggcgcgccgccaggcccgcatccacctcaaagtcgacaccgggctgaaccgcggcggtatcggccccgccgactggtctgccgcagctgcggccctggcgcgcgccgaagccgcagggctgctcaccgtcaccggagtgttctctcacctcgcctgtgccgacgagcccgacaaccccgccaccaccgcccagcttgaagccttccaccaggcgctgtccgtcgtcgacaaggccgggctgcacccccaggtccggcacatcgccaactctgcggcgctcctcacccgacccgatgcccgattcgacctggtgcggcccgggatcgccacctacgggctgtcccccatccccggcctggacgtgccgggcctgcggcccgccatgacactcagcgccaccctggtgggctgcaaacgagtccgccccggcagcggcgtctcctacgggtaccgctacgtgaccgaccgggaaaccaacctcgccctggtacccctcggctacggcgacggggtgccgcgcgccgcaaccaaccgcgcccccgtgttcgtggcaggccgccgccgcaccatcgccggaaccgtgtgcatggaccagttcgtggtggacatcggcgacgacacggtcacccccggcgaccgtgcaatcctgttcggccccggcgaccacggcgaacccaccgcccaagactgggcggacgccttggacacgatctcctacgagatcgtcacccgcatcggccggcgggtgccgcgcgtctacaccggcgctgtgcgctga

SEQ ID NO: 33073 - protein, 374 aa, Thermobifida fusca
MSSFAEARIDLDAISGNIALLAERAAGAQVMGVVKADGYGHGMVPAARAALAGGATWLGTAFIAEALQLRAAGIDAPILAWLVPPGEPLTEAIDAGIDLGIGSMWVINEVIDAARQARRQARIHLKVDTGLNRGGIGPADWSAAAAALARAEAAGLLTVTGVFSHLACADEPDNPATTAQLEAFHQALSVVDKAGLHPQVRHIANSAALLTRPDARFDLVRPGIATYGLSPIPGLDVPGLRPAMTLSATLVGCKRVRPGSGVSYGYRYVTDRETNLALVPLGYGDGVPRAATNRAPVFVAGRRRTIAGTVCMDQFVVDIGDDTVTPGDRAILFGPGDHGEPTAQDWADALDTISYEIVTRIGRRVPRVYTGAVR

SEQ ID NO: 33074 - DNA, 1140 bp, Geobacter metallireducens GS-15
  CDS (1)..(1140)
atggacagtcgccccaccattgccgaaatcgatcttgccgccctgcgtcataacttcgagcaggtgcagcgtgccgttcccgccggatgcgggattcttgccatcgtgaaggccgatgcctacggccacggcttcatggatatctcccgggaactggagtccctgggggtgaccgccttcggcgtggcgtttctggccgagggaatccaactgcgcaagagcggcatcgaccggccggtcctgatcctcggcggggtctatccggggcaggagcgcaagtgcgtcgggttcaacctctccaccgccgtcttctccctggagcaggcgcgggtcctgaacgacaccgccgcccgtctctaccgcaaggcgaagatccacgtgaagatcgataccggcatggggcgtctcggggtcgccgcggccgaggccccggcctttttccgggaactgcgggagatgaaatccctggaactggaggggatcatctctcacttcgcctccgccgacgaactggatgatgatggccgccgcttctcggaccgccaggctgccgtcttcgcccagtcggtggcagaggcccggtccctgggactcgacccccgctacgtccacatcgccaacagtgccgccgctttcggcatggatctccccttctgcaacctggtccggcccggcatcgtcctctacggggcgcttccgtcgggtgacttcgagggaaagatggcgctccggcccatcatgcggctgcagagtaccgtggccatgctcaagtgggtggagcccggcaccagtatcagctacgcccgccgctacacggccccggaccggcgccttatcgccagtgttcccgtggggtacgccgacggctacagccgggccctgaccaaccggggagaggtcctgatccggggcacgcgggcaccggtggttgggaccgtctgcatggactggatcatgatcgatgtgacctccgtccctggcgtggctgtgggggacgaggtgacgctccttggctgcgaccggcagggtcattgcgtgcgggccgaggaactggcctcgtgggccggcaccatcccctacgaaattttctgcggcatcagcaagcgggtgccgcgggtctacctgaacgcgacccggtga

SEQ ID NO: 33075 - protein, 379 aa, Geobacter metallireducens GS-15
MDSRPTIAEIDLAALRHNFEQVQRAVPAGCGILAIVKADAYGHGFMDISRELESLGVTAFGVAFLAEGIQLRKSGIDRPVLILGGVYPGQERKCVGFNLSTAVFSLEQARVLNDTAARLYRKAKIHVKIDTGMGRLGVAAAEAPAFFRELREMKSLELEGIISHFASADELDDDGRRFSDRQAAVFAQSVAEARSLGLDPRYVHIANSAAAFGMDLPFCNLVRPGIVLYGALPSGDFEGKMALRPIMRLQSTVAMLKWVEPGTSISYARRYTAPDRRLIASVPVGYADGYSRALTNRGEVLIRGTRAPVVGTVCMDWIMIDVTSVPGVAVGDEVTLLGCDRQGHCVRAEELASWAGTIPYEIFCGISKRVPRVYLNATR

SEQ ID NO: 33076 - DNA, 1071 bp, Novosphingobium aromaticivorans DSM 12444
  CDS (1)..(1071)
atgactgacatttcccttccgacgacgcccgacctgcccgagtcctcccttcgcctgcggatcgatgccgatgcgcttgcgtctaactggcgcgcactcgacgcgatgtcgggcacggcgaccgccggcgctgcagtaaaggctgatgcctatggactgggcgctgcgcgtgtctcgcgcatccttgtcggcgcgggttgtcgcgacttcttcgtcgcgcattgggcggaagtgccgaacctcctgccgcatgtccccgcagccagcatcgccgtgctgcatggtcccatgaatgcggcggaagccgccttcgctcgggcaactggtgcaaggccagttctgaacagcctgtcgcaggcccgtctctggcaggaaacaggcggcggacggtgccacgtcatggtcgataccggaatgagtcgacttggcctcgccatgtccgagatcgccgatccagcgctggctgacctcgatgtggacctttgcctcagccacctcgcaagtgcggatgaggatgttccgcagaacgagcaacagcgccttcgcttcgaaacggtccgcgccgccattcccgcccgtcgctacagccttgccaacagcgccggcatagcgctcggtgcgggcttccacgcggacgtcactcgcccgggcatcgctctctatggcggcatcgccaggcccgaatttgccggcacgatccgccaggtcgcgcgtcccgaagcagcggtcatccaggtccgccatctccaaccaggcgacaaagtcggctacaatgcgatctttaccgctgatcgcccgatgcgggtcggcgttctcgcgatcggctatgccgacggctatcttcgctgctggaccgggcggggtagcttcctgttcgatggagtcgaagtacccgtcctcggccgggtgtctatggacctcaccatcgtcgaccttggcggagtcccgtcatgcaacgagggggattggctggtcgcatcctacgacttgccgcgcgcagcgcgcgaaagcggcctttcgcagtacgaactgcttacggtgctggggcgtagattttcccgccggaattga

SEQ ID NO: 33077 - protein, 356 aa, Novosphingobium aromaticivorans DSM 12444
MTDISLPTTPDLPESSLRLRIDADALASNWRALDAMSGTATAGAAVKADAYGLGAARVSRILVGAGCRDFFVAHWAEVPNLLPHVPAASIAVLHGPMNAAEAAFARATGARPVLNSLSQARLWQETGGGRCHVMVDTGMSRLGLAMSEIADPALADLDVDLCLSHLASADEDVPQNEQQRLRFETVRAAIPARRYSLANSAGIALGAGFHADVTRPGIALYGGIARPEFAGTIRQVARPEAAVIQVRHLQPGDKVGYNAIFTADRPMRVGVLAIGYADGYLRCWTGRGSFLFDGVEVPVLGRVSMDLTIVDLGGVPSCNEGDWLVASYDLPRAARESGLSQYELLTVLGRRFSRRN

SEQ ID NO: 33078 - DNA, 1176 bp, Clostridium thermocellum ATCC 27405
  CDS (1)..(1176)
atgggaatggactataaatttaacagggcatgggccgaggttaatctggacaacattgcccataatgtaaaggaaatcaggcgaattgttgacaagaaagttgagataatgggagtggttaaggctgacgcatacggacatggagtaatggagattgccagaacacttttggaaaacggtgttacccgtctggcggtgtccatgctggatgaagccatacagcttcgtcaaaacggtattaaggttccgatattgatattaagctataccgaccctgtacgggcggaagagattgttttaaacgacgtcacccagacggttttcagccatgatttggcggaagctctgtcggaggcggctgtaaaacaccacagaaatgtaaagattcatatcaagatagataccggtatgacaagggttggatttatgcccggttacagtgcggttaagaatgtggtgcagataagcaagctgccgggcattattattgaaggattgtttacccattttgcatcggcggacgaggctgacaaatcctacacctatatgcagtttgaaaggtttatgagcatagtcggcgaacttaacagaataggggtgtatattcccgtaaagcacgtatgcaacagtgccgcgttgattgagtttcctgaaatgcacctcaacatggtaaggccgggtatagcattgtacggattgtatccttcggatgaggtggataaaaccaaaatcgacttaagaccggccatgtctttaaaggcaaatgtgatacttgtaaaagatgtggaaaaggacacctttatcagctacggaagaatatttaaaacgagccggaacagcaggatagcaactatacccataggatatgccgacggatatacaaggcttcttaccggcaaaggaaaagtacttctgaacggtcagctggctcctattgtgggaagaatttgcatggatcagtgcatggtagacataacggatattgaaggagacgtaaaagtcggagatgaagccgtgcttatcggaaagcagaaagataacgaaataaaagtcgaggacctggcaaaaagtgttgggacaataaattacgaactggtaagcataataggaaagagaattcccagagtttacctgaaagaagggaagatatacaatgtattaaattatttgatataa

SEQ ID NO: 33079 - protein, 391 aa, Clostridium thermocellum ATCC 27405
MGMDYKFNRAWAEVNLDNIAHNVKEIRRIVDKKVEIMGVVKADAYGHGVMEIARTLLENGVTRLAVSMLDEAIQLRQNGIKVPILILSYTDPVRAEEIVLNDVTQTVFSHDLAEALSEAAVKHHRNVKIHIKIDTGMTRVGFMPGYSAVKNVVQISKLPGIIIEGLFTHFASADEADKSYTYMQFERFMSIVGELNRIGVYIPVKHVCNSAALIEFPEMHLNMVRPGIALYGLYPSDEVDKTKIDLRPAMSLKANVILVKDVEKDTFISYGRIFKTSRNSRIATIPIGYADGYTRLLTGKGKVLLNGQLAPIVGRICMDQCMVDITDIEGDVKVGDEAVLIGKQKDNEIKVEDLAKSVGTINYELVSIIGKRIPRVYLKEGKIYNVLNYLI

SEQ ID NO: 33080 - DNA, 1230 bp, Microbulbifer degradans 2-40
  CDS (1)..(1230)
atgacggtgtgccttttattgtttgcgctaaagcgtcggtggcgttggtttggctttaggctgtatgctaacgcccttgttttatttttaataactccagtagatattgcagcccctatgaccgcgttttccggtaagttaacaattaacctcgatgctatcgccgcgaactggcgacttattcaaagccgccttgccgctggtgcacgcgcgggggcggtagtaaaggccgatgcatacggcttgggggtgcaagaggttgcccctgctctttatcgcgcgggttgccgagatttttttgtggctaaccttgcggaggcattactggttcgctcgctgctggcgggtgatgctcaggttatagttttgtctggctgtgcgccgcgcgaagagagtgagtttgtgcgcaatggcatagtgcctgtaattacctccgcgactatggccgagcgatggctaggggtgaaaggtgcatccaagtgtggcgcagtgctaaaagttaactctggtatggggcgcttggggttagagccaaacgagtttgaatccctgctgatgcaccctaatttcgccaatgctgggttctttatgcttatgagccatctcgcgtgcgcagatcaatttgatcacccattaaatgcagcgcaattacagcggtttgagcgcatgaggcaggcctttttgaaaaaagtgcctgccgccacggccagccttgcgaactcatctggcatatttatttctccttcctttcattacgatgtggcgcggccaggggttgcgctctacggcggcaacccgctgcagaggcggcaaaaccctatgcgaaaagtggtagatttgcggctgccggtattacaggtgcgtcatctcgcatcaggtgaggctgttggttatggcgcgagttttatcacgcagcgccccagcgtgttacttacgcttgctggcggctatgccgatggtctgtttcgttctgcggcggcgggtggcgtggtttacttgggagaaaagcctttgcccattgtgggccgtgtatcgatggattcaattgtggtggatgcaacggatgtacctcaagccgcgatgcctgcagaagggaatatgttggagcttctaggcgataacgtcggcgtggatgaccttgcggcggctgcaggcactatcggttacgaaatacttacctcgttgggtggccgctacaggcgcgaatatatcggaggcgccaatgactga

SEQ ID NO: 33081 - protein, 409 aa, Microbulbifer degradans 2-40
MTVCLLLFALKRRWRWFGFRLYANALVLFLITPVDIAAPMTAFSGKLTINLDAIAANWRLIQSRLAAGARAGAVVKADAYGLGVQEVAPALYRAGCRDFFVANLAEALLVRSLLAGDAQVIVLSGCAPREESEFVRNGIVPVITSATMAERWLGVKGASKCGAVLKVNSGMGRLGLEPNEFESLLMHPNFANAGFFMLMSHLACADQFDHPLNAAQLQRFERMRQAFLKKVPAATASLANSSGIFISPSFHYDVARPGVALYGGNPLQRRQNPMRKVVDLRLPVLQVRHLASGEAVGYGASFITQRPSVLLTLAGGYADGLFRSAAAGGVVYLGEKPLPIVGRVSMDSIVVDATDVPQAAMPAEGNMLELLGDNVGVDDLAAAAGTIGYEILTSLGGRYRREYIGGAND

SEQ ID NO: 33082 - DNA, 1161 bp, Oenococcus oeni PSU-1
  CDS (1)..(1161)
atggtaacagcgattcatagaccaacttgggtcagcgtcgatttagacgcagccgcacataatttacaagagattagagagtggacaaaagcaaaaaaggtatatgcagtcttaaaggcggatggttatggtttgggagccattccgttagcaaaagcttttcaggaaacagcttctgcagatgctctgattgtttctaatttggatgaggcacttgaacttcgtcaggctgatttgactttgccgatttgggtacttggagcttgggattattctgatttaaaactttttattgaccatgatattgtcattactattccaagtcttgcttggctgcagaacttgcctgattttgaggggaccttaaaagtcagtcttgcgatcgatactggaatgacacgaattggttttgataaagctgacgaaatttcagctgccaaaaaaattatcgataaaaatcctcaactggatttattttctgtttatactcattttgctacagcggatgaagctggtgaaaagagcaaagcttattttgaagaacagctccggcgttggcaggaattaaccattaatcaaggattcgacccttcattatttagtatggccaattcggccacttgtatctggcatcacgacgacccaagaatatcttttgcagcaattcgtcctggccaattgatttctggtgttaatgtaagtaacggtgaacttaaaatgccaccgaatttgcatttggaaagaattttttctgtttgttcggagatcgccgatgttcgttttgttaaaaaagatcaatctttgagttatggcgccagcgaaagaatgcctgaagatggttacgttgctacattacctttcggatacaatgatggttggttgagacgaatgcaaaagagttctgtaattattaatggaaagagaatgccgattatcggccgcattacaatggaccagacaatggttaaattggatcgtaaatatccaattggtacgcgggttactttaatcgggaaagatggtggcgaacaaatcactgtcgaggaagttgctaattattcgcatacaatcgttgatgaaattcagacgactctggcacctcggatcaaaaggatttatactggcgacttagccgaagtaatcggtgcaaattatggttag

SEQ ID NO: 33083 - protein, 386 aa, Oenococcus oeni PSU-1
MVTAIHRPTWVSVDLDAAAHNLQEIREWTKAKKVYAVLKADGYGLGAIPLAKAFQETASADALIVSNLDEALELRQADLTLPIWVLGAWDYSDLKLFIDHDIVITIPSLAWLQNLPDFEGTLKVSLAIDTGMTRIGFDKADEISAAKKIIDKNPQLDLFSVYTHFATADEAGEKSKAYFEEQLRRWQELTINQGFDPSLFSMANSATCIWHHDDPRISFAAIRPGQLISGVNVSNGELKMPPNLHLERIFSVCSEIADVRFVKKDQSLSYGASERMPEDGYVATLPFGYNDGWLRRMQKSSVIINGKRMPIIGRITMDQTMVKLDRKYPIGTRVTLIGKDGGEQITVEEVANYSHTIVDEIQTTLAPRIKRIYTGDLAEVIGANYG

SEQ ID NO: 33084 - DNA, 1116 bp, Oenococcus oeni PSU-1
  CDS (1)..(1116)
atggtagaagctattcatcgatcaacgcgtatagaattttctaaatcatcattagcgtataacgttcaatataccaaacaggtctccggtgccaagacgctttggctggctgttaagtccaatgcatatggacacggtctgcttcaggtatctaaaatagccagagaatgtggtgtagatggtttggccgtatctgttcttgacgagggaattgcgattcgccaagccggaattgatgattttattttgatcttgggtccaattgatgtcaagtacgcaccaattgcttccaagtaccattttttaacaactgtctcttcactggattggttaaaatctgccgataagattctcggtaaggaaaaactttctgtaaatttggctgtcgataccggaatgaatcggattggcgttcgttcaaaaaaagatttaaaggatgaaatcgaatttttgcaggaacattccgatcacttctcttatgatggaatttttactcattttgccagttccgacaatcctgacgatcattactttcaaaggcaaaaaaatcgttggtatgagctaattgacggactaataatgccacgctatgttcatgtcatgaattccggagctgctatgtaccattcaaaagaattacctggatgcaattcgattgcccgtgtcggaacagttgtttatggtgttgaaccttccgaaggtgtattggggccgattgataaactaaaaccggtttttgaacttaaatctgccttaacatttgttaaaaaaattcctgccggtgaaggaataagttatggatcgaagtttgtaacaagcagggatacttggatcggtactcttccaattggctatggcgacggctggcttgcggaataccaggattttcagcttttaattgatggccaaaaatgtcgacaggtcggtcaaatagcgatggaccaaatgatggtggctttgccgcatgaatatccgattggaacagaagtaactttaattggaaaaagtggaaagtatgaaaatactctttacgatcttcataaacattccggagttccgccgtggaaaattacagtcgctttttctgatcgattaaaaaggatggtggtcgattaa

SEQ ID NO: 33085 - protein, 371 aa, Oenococcus oeni PSU-1
MVEAIHRSTRIEFSKSSLAYNVQYTKQVSGAKTLWLAVKSNAYGHGLLQVSKIARECGVDGLAVSVLDEGIAIRQAGIDDFILILGPIDVKYAPIASKYHFLTTVSSLDWLKSADKILGKEKLSVNLAVDTGMNRIGVRSKKDLKDEIEFLQEHSDHFSYDGIFTHFASSDNPDDHYFQRQKNRWYELIDGLIMPRYVHVMNSGAAMYHSKELPGCNSIARVGTVVYGVEPSEGVLGPIDKLKPVFELKSALTFVKKIPAGEGISYGSKFVTSRDTWIGTLPIGYGDGWLAEYQDFQLLIDGQKCRQVGQIAMDQMMVALPHEYPIGTEVTLIGKSGKYENTLYDLHKHSGVPPWKITVAFSDRLKRMVVD

SEQ ID NO: 33086 - DNA, 1125 bp, Pediococcus pentosaceus ATCC 25745
  CDS (1)..(1125)
atggttgtagggatacatcgtcccagcaagctagttattaatgctgaggcaattagaaataatgtaaaaaatgagattagtcgattagatggacacagtgaattatttgccgtggttaaggctaatggctatggacatggaattgtagaaacagcccaatttacgaaacaagctggggcaactggtttttgtgttgctatcttagacgaagcgttggctttgcgagatgctgggctaacagaaactatcctagttttaggaattacagatgttaaatatgctaaattagctgctgaaaatgatatctcgttaacggtgggtgatcaagcatggctagatgaagctacgcaaattctaaatcaaaagccgctgaaagttcatttaggtattgatacaggaatgggacggattggttttcaagatggagcttcttttaagaaagcggccgattatcttgaacaaagtcaacagttcaattttgaaggtgtgtttacacattttgcaacagcagatgaaaaggatacgacttatttcaatttacaggtggaacgttttaaccatttcatcagccaattaactcgacgtccacgttatgtgcatgtttctaatactgctaccagcttgtggcatgcagcttgcaatggtaatatgattcgttttggagtcggcatttatgggatgaatccttctggaaaaacactggaaagtccttttgatttacagccagctatgagtctggagtctgaactatctttttctaaactagtgcaaaaaggccgttcaattagttatggagcgacttatacagctgaagaagatgaatggattgggacgatcccgattggttatgcagatggttatgaacgtcgtttacaaggattccatgttttgattgatggtcaattttgcgaaatagtaggacgaatttgtatggatcaaatgatggttcgcttaccaaagtcatatcctgtgggaactaaagtaattttagcgggaaaatcaggcgaaaaatcaattaccatgacagacattgccgaatatgctgggaccattaattatgaaatcacatgtggattcacacaacgtttaccacgaatctatactgaaaatggtgtagtaaattaa

SEQ ID NO: 33087 - protein, 374 aa, Pediococcus pentosaceus ATCC 25745
MVVGIHRPSKLVINAEAIRNNVKNEISRLDGHSELFAVVKANGYGHGIVETAQFTKQAGATGFCVAILDEALALRDAGLTETILVLGITDVKYAKLAAENDISLTVGDQAWLDEATQILNQKPLKVHLGIDTGMGRIGFQDGASFKKAADYLEQSQQFNFEGVFTHFATADEKDTTYFNLQVERFNHFISQLTRRPRYVHVSNTATSLWHAACNGNMIRFGVGIYGMNPSGKTLESPFDLQPAMSLESELSFSKLVQKGRSISYGATYTAEEDEWIGTIPIGYADGYERRLQGFHVLIDGQFCEIVGRICMDQMMVRLPKSYPVGTKVILAGKSGEKSITMTDIAEYAGTINYEITCGFTQRLPRIYTENGVVN

SEQ ID NO: 33088 - DNA, 1188 bp, Trichodesmium erythraeum IMS101
  CDS (1)..(1188)
atgttgagtagagaaaagacttcttttaagactctagcactagaaagtgatgcttatggaggtatttgtcaaagagcatgggtagaaattaatgatcgggcattgagctataatgtccaacaacttaagagtcttttatcagctaaaactcaactaatgggagtagtaaaggcagatgcttatggacatggagcgtctaagatctctaaaactattttagaagctggtgtagataggttggcagtagccacactgccagagggaatagaattaaggttagctggaattaaaccaccaattttaattttaggagcaatagaccgacctgaacaaattcgggcgatcgctcactggcaactagaaccaactatttgtacacctcaacaagctttagttttttcagaaactctttcctaccaaactgaaccaatgctagtacatcttaagttggatacaggaatgtctcgtttgggaacaccttggcaacaggcggtagaatttgtaaaatttgtgcaggggttaccaaatttaaaaattgctagtatttattcccacttagcgacggcggataacttagaccaaacggtgatgaagcagcagcatcaaaggtttgaggaagcaataggtctttgtggtattggtggaaaaagtttttctagtgatatacaacttcatttagctaattcggcggcgacgttaactgaccctgctttacactacgatatggtacgagtaggtttagctatttatggcctgtatccggcacctcatctacaggataaaattaatttaaagcctgttatgcaagtaaaagctagggtgacacaagtcaaaactattgaagctggtactggtgtgagttatggttatcagtttattgctccaaaacagatgcgtttggcagtggtgggtattggttatgctgacggtttacctcgtaacctttctaataggatgaaagtcattgtacgcgatcgactaattcctcaagtaggagctattactatggatcagttgatgttagatgtaagtgctattcctgatctagaaacgggtgaagtggtaactttgttagggcaagttggtaaacatcaaatttctgctgaaaactgggcaaatactctaggaactatttcttgggaaattctttgtggttttaaaaataggttgcctcgggtagcagtttag

SEQ ID NO: 33089 - protein, 395 aa, Trichodesmium erythraeum IMS101
MLSREKTSFKTLALESDAYGGICQRAWVEINDRALSYNVQQLKSLLSAKTQLMGVVKADAYGHGASKISKTILEAGVDRLAVATLPEGIELRLAGIKPPILILGAIDRPEQIRAIAHWQLEPTICTPQQALVFSETLSYQTEPMLVHLKLDTGMSRLGTPWQQAVEFVKFVQGLPNLKIASIYSHLATADNLDQTVMKQQHQRFEEAIGLCGIGGKSFSSDIQLHLANSAATLTDPALHYDMVRVGLAIYGLYPAPHLQDKINLKPVMQVKARVTQVKTIEAGTGVSYGYQFIAPKQMRLAVVGIGYADGLPRNLSNRMKVIVRDRLIPQVGAITMDQLMLDVSAIPDLETGEVVTLLGQVGKHQISAENWANTLGTISWEILCGFKNRLPRVAV

SEQ ID NO: 33090 - DNA, 1230 bp, Moorella thermoacetica ATCC 39073
  CDS (1)..(1230)
atggacctggcaaagctgacggaactggccggaccccgctggatcaccattgaagcgacagccctggcccacaacctcaaagccgttaaagctttactcgctccctcgacccgcctcctggccgttatcaaggccgacgcctacggcgccggcgccgtagaggtggcgcgcatcttcctggacgcaggggcggattacctgggggtaaccaccctggccgaggggctggagttgcgccgggccggcattgcagcccccgttctcctcatgagtcccctcctgccggaagagctaccggcagccatagctgccgggctcaccctaactgtgagcagccgttccggcgccgaggcgattgctgccgcggcggcagcgaccgggcaccgggcccgggtacacctgaaagtagagaccgggttgcagcggacaggcctggaagcggcagcagtagcgcccctggcgcgggagatcctcacctggcccggcgtagaactggagggcgtctacagccatctggccgaggccgcccggccggcggcagcccggcggcagatggcctgttttcagcaggtcctcgccgaactggaggaggagcatatagctatccccttgaggcatatctgcaacagcaccggtctccttacccacccggagatgcatctggacatggtcagaacaggcaccctcctctacggccagttcccctaccaggccccccgccggggactggcattaaaagacccctggcagtttaaagcccgtatcctctttattcacgacgtagccgccggtaccccggtgggttacggcggtgactacgttgtgaaaaaagccacccgcctggccgtcatcccggtgggttatgccgacggttttgccctgacggccgttgcccggccgaaaaacctgaacgacctggcccgctacctggtcaagacattcctcgcctacctgggtcggggcgggggcgaagggaccaccgtgatcataggcggccggacggcacctgtggtaggccgggtggggatgcaactctccatggtcgatgtcggccacctgcctgaggtagaggtgggccaaatagtaactctggatatacgccgcccgacagccagcagccgtctaccccgggtctactgccgggagggacacccctacctggtgcggactaccaccggagaactcctgccggtggacgcaccgcacctttccccgggagttaatagttaa

SEQ ID NO: 33091 - protein, 409 aa, Moorella thermoacetica ATCC 39073
MDLAKLTELAGPRWITIEATALAHNLKAVKALLAPSTRLLAVIKADAYGAGAVEVARIFLDAGADYLGVTTLAEGLELRRAGIAAPVLLMSPLLPEELPAAIAAGLTLTVSSRSGAEAIAAAAAATGHRARVHLKVETGLQRTGLEAAAVAPLAREILTWPGVELEGVYSHLAEAARPAAARRQMACFQQVLAELEEEHIAIPLRHICNSTGLLTHPEMHLDMVRTGTLLYGQFPYQAPRRGLALKDPWQFKARILFIHDVAAGTPVGYGGDYVVKKATRLAVIPVGYADGFALTAVARPKNLNDLARYLVKTFLAYLGRGGGEGTTVIIGGRTAPVVGRVGMQLSMVDVGHLPEVEVGQIVTLDIRRPTASSRLPRVYCREGHPYLVRTTTGELLPVDAPHLSPGVNS

SEQ ID NO: 33092 - DNA, 1122 bp, Moorella thermoacetica ATCC 39073
  CDS (1)..(1122)
ttgtcgcggccggtttgggccgagattgacctggaagcagtggcccgcaatgtccgggccattaaaaagatactggcgccgcaaacagaaattatggccatcgttaaagccaatgcctacggccacggggccgggccggtggccaggacagccctggctaacggcgtcagctggctgggtgtagctaccctgggtgaagccctggacctgcggcgggaaggaattactgccccgcttcttattttgggctataccccgccggaggatgccgggcgggtggtagaggccgatatttcccagacggtcttcagcgttgaccaggcccgggccctgaacgccgccgccgccgctgtaggtaccagggcccgcctgcatttaaagatcgataccggtatgggccggctgggttttctgccccgggaggcggtgactgcggcccgggctatagcggatctgccccatgtcaccctggaaggtattttcacccactttgccgcgtccgatgccgctgataagacctacacccagcggcagctgggcttatttcaacaagtgattgccgaactggagaaacagggcataacctttccctggcgccatgcagccaacagcggggccatcatcgatctccccgggacccactttaacctggtccgcgccgggattatcctttatggccactatccctcgccggaggtccagcggaagaggctggcgttaacgccggtgatgacgctaaaaaccagggtagtcctggtaaaggaggtgccggccgggtcgtatatcagctatggctgcacctaccgcacccccggtccggccaggattgccaccctcccggtgggttatgccgacggctattcccgtctcctttccaaccgggccgaggtcctggtccgcggtcgccgggcaccgatcgtcggccgtatctgtatggaccagtgcatgatagatgttacagctataccggaagtccgggttggtgatgaagtagtcctcttcggtcgccagggaggacagactctgacggtagaagaggtggcggcctggatggggaccattaactacgaaatcctgtgcctgatatccaagcgcgtgccacgtgtatatcttcatagttaa

SEQ ID NO: 33093 - protein, 373 aa, Moorella thermoacetica ATCC 39073
MSRPVWAEIDLEAVARNVRAIKKILAPQTEIMAIVKANAYGHGAGPVARTALANGVSWLGVATLGEALDLRREGITAPLLILGYTPPEDAGRVVEADISQTVFSVDQARALNAAAAAVGTRARLHLKIDTGMGRLGFLPREAVTAARAIADLPHVTLEGIFTHFAASDAADKTYTQRQLGLFQQVIAELEKQGITFPWRHAANSGAIIDLPGTHFNLVRAGIILYGHYPSPEVQRKRLALTPVMTLKTRVVLVKEVPAGSYISYGCTYRTPGPARIATLPVGYADGYSRLLSNRAEVLVRGRRAPIVGRICMDQCMIDVTAIPEVRVGDEVVLFGRQGGQTLTVEEVAAWMGTINYEILCLISKRVPRVYLHS

SEQ ID NO: 33094 - DNA, 1104 bp, Thiobacillus denitrificans ATCC 25259
  CDS (1)..(1104)
atgcgtccgatcaaagcgtcgatctcggcggacgcgatggcccacaaccttcgcgtcgcacggcgtcacgccggcgccgcgcgggtgttcgccgtagtgaaggcgaacgcctacggtcacggtctgtcgcgcgcgttgcgcgccttcggggcggccgacggcttcgcggtgctgacgctcgaggaagcggcgagcctgcggcagatgggtgtcgacaagccgatcctgctgctcgagggcatcttcgacgccggcgagattgcggcttgcgccgaactcgatctctggccggtattgcatcatgcccggcagctcgactggctcgagcaacagcgaccggcgcgcgcgctcgaggtgtttctcaaattcgacagcgggatgcatcgccttggttttccgcttgccgaacacgctgaggtcgtcgcgcgggttcgagccctggcgggcgttgcgcgtgtcacgctgatgacgcactttgcgcaggccgacgacagcgccggtgtcgcctggcagttgcagccgtttcgggaagcgctcgacggccatggcctgccgtggagcagcgcgaattcggcggcgctcatgcgctatccagagacggtcggcgactgggtgcgtccgggcatcatgctgtacggcgcctcgccgtttaccgacgtccccgccagcgggctcggcctcgagcccgcgatgacgctgcgctccgaaatcatcgcggtgcagacgctcgcggccggcgaaggcatcggctacggccagacttttcgtgccgacaagccgatgcgcgccggcgtcgtcgcctgcggctacgccgacggctatccgcgtcatgcgccgaccggcacaccggtcgtcgtcgacggccgacgcacccggacgctcggccgcgtgtcgatggatatgctctgcgtcgacctcagcgaatgtccggccgcgggggtcggaagcgcggtggtgttgtggggcgacggattgccggtcgacgacgtcgccgcggccgccggcacgagcagctacgaattgctgtgcgcgctcgcgccgagagtgccgatcgaggaagtcggcagaaatcaggaagcgggcaggggcttcggcaacgagtga

SEQ ID NO: 33095 - protein, 367 aa, Thiobacillus denitrificans ATCC 25259
MRPIKASISADAMAHNLRVARRHAGAARVFAVVKANAYGHGLSRALRAFGAADGFAVLTLEEAASLRQMGVDKPILLLEGIFDAGEIAACAELDLWPVLHHARQLDWLEQQRPARALEVFLKFDSGMHRLGFPLAEHAEVVARVRALAGVARVTLMTHFAQADDSAGVAWQLQPFREALDGHGLPWSSANSAALMRYPETVGDWVRPGIMLYGASPFTDVPASGLGLEPAMTLRSEIIAVQTLAAGEGIGYGQTFRADKPMRAGVVACGYADGYPRHAPTGTPVVVDGRRTRTLGRVSMDMLCVDLSECPAAGVGSAVVLWGDGLPVDDVAAAAGTSSYELLCALAPRVPIEEVGRNQEAGRGFGNE

SEQ ID NO: 33096 - DNA, 1038 bp, Silicibacter sp. TM1040
  CDS (1)..(1038)
atgagtacggcacgtttaaaaatcaatctggatgcgctggcgatcaactggcgcaatctggatgccaagaccaactgcgagaccgcagcggtggtcaaggccaatggctatggtctggaatccggccgcgtcggcaaggcgctggcacaggcaggcgcgcgcaatttctttgtcgccatcgccgaagaaggcattgcgctcaggcgcgcgcttggacccggcccgggtatttcggtctttgcaggtcatatggagggcgacgcaaaactcctgcgtgacttccagctgacgccgatgctcaactcgctggatcagatgctgcgccatttcgagagcctgccgggccacccctttggcgtccagctcgacagcggcatgaaccggcttggcatggaggccgccgaatggatggccgtgcgcgacatcgccctcgatcaaaaccccgtcctcttgatgtcgcatctggcctgctcggacgagccgggccacggcatgaacgcatatcagctcaagaatttcatcgagatgaccgaggggctcaatatcccccgctcgctcgcggccactggcggccttctgctggggcgcgactaccactttgatctctgccgtcccggcatcgggctttatgggggcgcaccctacgccgatgcgctgcccgtggtcgagcttgaggtgccggtgattcaggtgcgcgacctcgccccgggcgagagcgtcggctacggcaacacctggattgcgcagcgcgacagcaagatcgccaccattgccggcggctatgccgacgggctgcaccgggcgttccagcgacaggggatcatggcttatgcgggcggcaccccctgccccgtggtgggtcggatctcgatggatctcatcaccgtcgatgtcaccgacctggccgaagtgccgccctacctgagcctcatgaatgagacgcagaccgtggatgtgctggcaaacgccgctgataccatcggctatgaggtcctgacctcgctcggcaaccgctatgcgaggacctacagcgcatga

SEQ ID NO: 33097 - protein, 345 aa, Silicibacter sp. TM1040
MSTARLKINLDALAINWRNLDAKTNCETAAVVKANGYGLESGRVGKALAQAGARNFFVAIAEEGIALRRALGPGPGISVFAGHMEGDAKLLRDFQLTPMLNSLDQMLRHFESLPGHPFGVQLDSGMNRLGMEAAEWMAVRDIALDQNPVLLMSHLACSDEPGHGMNAYQLKNFIEMTEGLNIPRSLAATGGLLLGRDYHFDLCRPGIGLYGGAPYADALPVVELEVPVIQVRDLAPGESVGYGNTWIAQRDSKIATIAGGYADGLHRAFQRQGIMAYAGGTPCPVVGRISMDLITVDVTDLAEVPPYLSLMNETQTVDVLANAADTIGYEVLTSLGNRYARTYSA

SEQ ID NO: 33098 - DNA, 1095 bp, Polaromonas sp. JS666
  CDS (1)..(1095)
atgccacgtcccatccttgccaccatccaccgaccggcgctcgcccacaacctcgcgcgcgcccgcagcgccgcgcctgacgcccgggtctgggcggtcgtcaaggccaatgcctacggccatggcattgaacacgtctttgacggcctgcgcagtgccgacggatttgcgctgctggatctggcggaggcgcggcgcctgcgcgcgctcgactggcgcggccccatcctgctgctggaaggctgcttcgaggcgcgcgacctggagttgtgttcgcgcctgagcctgtggcatgtcatccattgcaacgagcagatcgacatgctggccgcgcacaagacccaggttccgcatcgcgtgttcctgaaaatgaactccggcatgaaccgcctgggcttgcggcccgagcgctttcgcgccgcctggacgcgtctgaatgcgctgccgcaggttgacgagatttcgctgatgacgcatttctcggacgccgacggcccgaagggcatcgcggcgcaactccgcgcatttgatgccgtgacgcatgacctgcccggcgagcgctcgttgagcaacagcgcgggtgtgctgcgccatggcgatgaactggcggcccgctccgactgggtgcggcccggcattgtggtctacggcagtgcgcccgacttcccggagcacagcgccgccgactgggggctgcagccgaccatgacgctgtcgtcccgcatcattggcgtgcaggagctggcggccggcgacacggtgggctatggctccagtttcaccgccgatggcccgctgcgcatcggtgtggtcgcctgcggttatgccgacggctacccgcgccactgcagcacgggcacgccggtgctggtaaacggcgtgcgcactcgcatggtcgggcgcgtcagcatggacatgatcacggtcgacctgacgccggtaccggacgccgggatgggggcggaggtgaccttgtggggccggtcttcgggcggtgccgtgctgcccattgacgaagtggcgcaaaccgccggaaccgtggggtatgagctgatgtgcgcggtggcgccgcgcgttccggtgatgactgagtga

SEQ ID NO: 33099 - protein, 364 aa, Polaromonas sp. JS666
MPRPILATIHRPALAHNLARARSAAPDARVWAVVKANAYGHGIEHVFDGLRSADGFALLDLAEARRLRALDWRGPILLLEGCFEARDLELCSRLSLWHVIHCNEQIDMLAAHKTQVPHRVFLKMNSGMNRLGLRPERFRAAWTRLNALPQVDEISLMTHFSDADGPKGIAAQLRAFDAVTHDLPGERSLSNSAGVLRHGDELAARSDWVRPGIVVYGSAPDFPEHSAADWGLQPTMTLSSRIIGVQELAAGDTVGYGSSFTADGPLRIGVVACGYADGYPRHCSTGTPVLVNGVRTRMVGRVSMDMITVDLTPVPDAGMGAEVTLWGRSSGGAVLPIDEVAQTAGTVGYELMCAVAPRVPVMTE

SEQ ID NO: 33100 - DNA, 1083 bp, Thermus thermophilus HB8
  CDS (1)..(1083): transl_table=11
gtgcgcccgggcgggtatcctaaaggggtgcaggcccgggcctgggtggaggtggacctcgccgccctctgggcgaactaccggcttctcgccgggcgggcgggaggggaggtgatccccgtgctcaaggcggacgcctacggccacggggcccttcccctcgcccgcttcctggagggaaagggcgtggggcgcttcgccgtggccaccctggaggaggggaggcgcctccgggaagggggcatcaagggggaggtcctccttctcggaagcctccaccccctggaggcggaggaggccttgaggcttggcctcgtgcccaccctctccaacctggaggcggcggaggccctttcccagagggcccgcgccctgggccttgtgccccgggcccacctcaaggtggatacgggcatgaaccgggtgggctttccctcggaggaggcggtctcggccctgcgggcggtggaggccctgggggtgagggtggagggcgtctacacccacctcgccaccgccggggaggacgcggccttcgtggagacgcagcggcgccgcttccaggaggtgcgccgcgccttgggggaggggtacttctaccacctggagaactccctgggcctcctccgccacggggccacggcgggggtgcgggtggggctcgccctctacggcctcgtccccggctttggcctcaggcccatcctccggatcctcgcccggcccaccctggtgaagcgcctgaaggcgggggaccgggtggggtacgggggggtctatgtggcccggggcggggagtggctcgccaccctgcccgtggggtacgccgacgggcttccctggggggcggtgcggttcgtgaaggggccggacgggcgccttctggaggtggcgggccggatctccatggaccagaccaccgtcctcctccccggccccgtgggcctcgaggccgtgtttgaggtgctctcggccgacttcggccccacgggcctcctcgcctgggccgaggcccggggcaccctcccttatgaggtggccgtccacctttcccggaggcttccccgccgctacctggagtag

SEQ ID NO: 33101 - protein, 360 aa, Thermus thermophilus HB8
MRPGGYPKGVQARAWVEVDLAALWANYRLLAGRAGGEVIPVLKADAYGHGALPLARFLEGKGVGRFAVATLEEGRRLREGGIKGEVLLLGSLHPLEAEEALRLGLVPTLSNLEAAEALSQRARALGLVPRAHLKVDTGMNRVGFPSEEAVSALRAVEALGVRVEGVYTHLATAGEDAAFVETQRRRFQEVRRALGEGYFYHLENSLGLLRHGATAGVRVGLALYGLVPGFGLRPILRILARPTLVKRLKAGDRVGYGGVYVARGGEWLATLPVGYADGLPWGAVRFVKGPDGRLLEVAGRISMDQTTVLLPGPVGLEAVFEVLSADFGPTGLLAWAEARGTLPYEVAVHLSRRLPRRYLE

SEQ ID NO: 33102 - DNA, 1233 bp, Bacillus clausii
  CDS (1)..(1233)
atggatcgaacggcactccctttctttagggatacatgggttgaggttgatttgaatgcaatttcgagcaatgtttcgtcgctagcgcgcttttataaaagccaaggccacaatgtcgccattatggcagttgtgaaagcgaacgcctatggccatggggctatagccgttgctaaggaggcgcttgccgctggagcgacctttcttggtgttgctttattagacgaggcattggaactaagaaaggcaggcattcaggcgccgatccttgtccttggtaaaacacgcccagaaaatgcagagcttgcccggtctgaggggatttcggtaactgtatttgagcaagaatggctagaagaggctacacggtttctggcaaaatcaccgaacgatccactccgtatccatgtcaaaatggacacgggcatgggccgcctaggccaacaaacggttgaaaacacgatggcggttgtctgtgctgcgcaaaaaatcggtgttgttgaagggctgtttacccattttgccactgctgacgagctcgatcatacgtattaccgaaaacagcaagaacggtttgcggcatgtgttgacaaattggaagaagcaaacgtttcgattccgttcatccacactggcaatagtgcagcaagcatgcgctatccaggcgatatgtacaatatggtacgtttcggcatttccatgtatgggctcaccccttcagtagaaataaaacaagcactgccatttaagcttattccagctttatcgctaaaaacaaaaactgttttcacgaagcttattcaaaaaggggacgctgtcagttacggagctacttatcaagcagaagcaccgacatggattgcgacgttgccaattggctatgctgatggctgggcaaggcaaaacagcacgaaaggcgggtatgcactcgtcaatgggcaaaaagcgcgctttgcagggagaatctgtatggaccaatgcatgattgaactttctgagccagtgccaaatggtacaacagttactcttgttggcaaagacggccaagagcaaattgagcttgatgacgtcgcgaagcggcttgatacgattaattatgaagctgcctgtatgctcaatcctcgcttgccccgtatttacgtaaaaaacggcaaatatcaatctgtgcaaatagaatcaagggttatgcataaaatagaagagcaagggaaaaatgaccaacagaatggataa

SEQ ID NO: 33103 - protein, 410 aa, Bacillus clausii
MDRTALPFFRDTWVEVDLNAISSNVSSLARFYKSQGHNVAIMAVVKANAYGHGAIAVAKEALAAGATFLGVALLDEALELRKAGIQAPILVLGKTRPENAELARSEGISVTVFEQEWLEEATRFLAKSPNDPLRIHVKMDTGMGRLGQQTVENTMAVVCAAQKIGVVEGLFTHFATADELDHTYYRKQQERFAACVDKLEEANVSIPFIHTGNSAASMRYPGDMYNMVRFGISMYGLTPSVEIKQALPFKLIPALSLKTKTVFTKLIQKGDAVSYGATYQAEAPTWIATLPIGYADGWARQNSTKGGYALVNGQKARFAGRICMDQCMIELSEPVPNGTTVTLVGKDGQEQIELDDVAKRLDTINYEAACMLNPRLPRIYVKNGKYQSVQIESRVMHKIEEQGKNDQQNG

SEQ ID NO: 33104 - DNA, 1137 bp, Streptomyces lavendulae subsp
  CDS (1)..(1137): transl_table=11
atgaacgagacaccgacgcgcgtgtacgccgagatcgatcttgacgcggtacgggcgaacgtgcgcgcactgcgcgcacgggcgccgcggtccgcgctgatggccgtcgtcaagtcgaacgcctacgggcacggggccgtcccgtgtgcccgcgcggcccaggaggccggggccgcctggctgggcaccgccacccccgaggaggcgctggagctgcgcgccgccgggatccagggccggatcatgtgctggctgtggacccccggcgggccctggcgggaggccatcgagaccgacatcgacgtctccgtcagcgggatgtgggcgctggacgaggtccgcgcggccgcccgcgcggccggccgtaccgcccggatccagctcaaggccgacaccggcctcggccgcaacggctgccagcccgccgactgggccgagctcgtcggcgcggccgtcgccgcgcaggccgagggcaccgtccaggtcaccggcgtttggtcgcacttcgcctgcgccgacgagccgggccacccctccatccggctccagctcgacgccttccgcgacatgctggcctacgcggagaaggagggcgtcgaccccgaggtccggcacatcgccaactcgcccgcgaccctcaccctccccgagacccacttcgacctcgtccgcaccggcctggccgtctacggcgtctcgccgtcccccgagctcggcacccccgcccagctgggcctgcggcccgcgatgaccctcagggcctccctcgcgctggtcaagaccgtccccgccggccacggcgtgagctacggccaccactacgtcaccgagtccgagacgcacctcgcgctcgtgcccgccggctacgccgacggcatcccgcgcaacgcctccggccgcgggcccgtgctcgtcgccgggaagatccggcgggccgccgggcggatcgccatggaccagttcgtcgtggacctcggcgaggacctcgccgaggcgggcgacgaggccgtcatcctcggtgacgccgagcgcggcgagcccaccgccgaggactgggctcaagcggcgcacacgatcgcgtatgagatcgtcacccgtatcggaggtcgggtgccccgggtctacctcggcggctga

SEQ ID NO: 33105 - protein, 378 aa, Streptomyces lavendulae subsp
MNETPTRVYAEIDLDAVRANVRALRARAPRSALMAVVKSNAYGHGAVPCARAAQEAGAAWLGTATPEEALELRAAGIQGRIMCWLWTPGGPWREAIETDIDVSVSGMWALDEVRAAARAAGRTARIQLKADTGLGRNGCQPADWAELVGAAVAAQAEGTVQVTGVWSHFACADEPGHPSIRLQLDAFRDMLAYAEKEGVDPEVRHIANSPATLTLPETHFDLVRTGLAVYGVSPSPELGTPAQLGLRPAMTLRASLALVKTVPAGHGVSYGHHYVTESETHLALVPAGYADGIPRNASGRGPVLVAGKIRRAAGRIAMDQFVVDLGEDLAEAGDEAVILGDAERGEPTAEDWAQAAHTIAYEIVTRIGGRVPRVYLGG

SEQ ID NO: 33106 - DNA, 1152 bp, Clostridium innocuum
  CDS (1)..(1152): transl_table=11
gtggaaaatgtgctgaagagcaatacgccgtcctggctggaaattgatctgaccaggatctcacataacataaaggaagtacagaagctgattccctctacaagcaagattatggcaatcgtcaaagcgaacggctatgggcacggcgatgtggaatgctcccgaatgatggaacagcaggggattgacttttttggagtaagcagtgttgacgaaggcgttcgactgcgtgaaaacggcatccaaagtccgattctggtgctggggtatacgccgcctgttcattttcattatttgaacgaggcttccctgatccaaacgctggtatcaaaggagtatgcagaaaagctgaacgcatatgctaaagagcagaatgttgttgtcaaagcacatgccaaggtgaataccggtatgtccagaatcggtatttcgcacaggatcatgcatatcatatcgaggatatcaaaagcgcttgtacgtctgaagcatctgaatgtctcgggtattttctcccacttcagtgtcagtgactgtctggatgaggaaaattgtgccttcaccaatcaccagattgcgttgtttgaacgtgttctggcggatttgcgtccagaaggattgaccccggtacaacgcatctgcagacagctatggaattttaaattatccgaacctgcattagattatgtacgtccgggtctattatggatgggagttccagcgatgatgcactggcaattcgcacggcaccgcagtttcagccctcatggaatggaaggcaaatgtttccctggtaaaggatattcagcccggtgttacggtcagctacggccgtcatttcaagcggaagtctgtacgagggtggcaacactggctgtcggatatgcggatggttttccgcgcagtgtatccaatcagggagcctgtgtgctgctgcatggcaggcgtgttcccattatcggcaatatctgtatggatcagatgatggtggatatcaccggacttgatggtgtgagtgaaggcgatgtcgctactctgatcgggtgtgacggtgatgaggttctttccgttgatgaactcagcagacttgcacataccataaacaatgaaacactctgctggatttcacagcgggtaccgagaatatacaaatag

SEQ ID NO: 33107 - protein, 383 aa, Clostridium innocuum
MENVLKSNTPSWLEIDLTRISHNIKEVQKLIPSTSKIMAIVKANGYGHGDVECSRMMEQQGIDFFGVSSVDEGVRLRENGIQSPILVLGYTPPVHFHYLNEASLIQTLVSKEYAEKLNAYAKEQNVVVKAHAKVNTGMSRIGISHRIMHIISRISKALVRLKHLNVSGIFSHFSVSDCLDEENCAFTNHQIALFERVLADLRPEGLTPVQRICRQLWNFKLSEPALDYVRPGLLWMGVPAMMHWQFARHRSFSPHGMEGKCFPGKGYSARCYGQLRPSFQAEVCTRVATLAVGYADGFPRSVSNQGACVLLHGRRVPIIGNICMDQMMVDITGLDGVSEGDVATLIGCDGDEVLSVDELSRLAHTINNETLCWISQRVPRIYK

SEQ ID NO: 33108 - DNA, 1074 bp, uncultured bacterium 577
  CDS (1)..(1074): transl_table=11
atgtctcgtcctattcatgctttgattgatctttctgcgcttgagcacaacctttctgttgttcgtcgccattcctcacgttcaagagtaatggcggttataaaagcagatgcatacggacatggattattacgtgcagctgaggcttttaagagtgctgatggctttgcaattttggagttagaggccgcaatacgtttacgagaagccggctatgaacatactatattattaattgaaggtttcttctctaggtcggagttagaactgtttgagcgttatcatcttagtactgtaatacataacagttggcagttagatatgctatctgcttacaagcagcctagaggactagatgtctttctgaaattaaatactggcatgaaccgcttaggctttactccagaacagttccttagggctttagaaatattaaagtctaatcctgttattggtcaaattacattgatgacgcattttgcttgtgctgatgcctataaagataggagtggggttatagagcaactgaaatgttttaattccattacttcagatttagatttcccgtgttcattggccaattctgcggcaatactatcttatcctgaaactcatgctgactgggttcgtcctggaataatgctatatggttcatcaccattctccgatatatctgcaagtgaattagatttacgtccggccatgacattaactagtagaatcatagcagtacaggatctccatacgggagataaagttggatacgggcaaacttattgtgtaaagcgacccatgcgcgtgggcatcgttgctggtggatacgcagatggatacccgcggcatgcgcccactggtacaccaatctcagttgatggaattcgtacccgtattattgggcgagtatctatggatatgttgcatgtagatctgaccaatatcgaaaatggaggtgttggaagcttggttatattttggggaaaaggaatgcccgtagatgaggttgcagagtcagctggaacaattagctatgagttattatgttcactagcccaaagaataaagatagaaacgtaa

SEQ ID NO: 33109 - protein, 357 aa, uncultured bacterium 577
MSRPIHALIDLSALEHNLSVVRRHSSRSRVMAVIKADAYGHGLLRAAEAFKSADGFAILELEAAIRLREAGYEHTILLIEGFFSRSELELFERYHLSTVIHNSWQLDMLSAYKQPRGLDVFLKLNTGMNRLGFTPEQFLRALEILKSNPVIGQITLMTHFACADAYKDRSGVIEQLKCFNSITSDLDFPCSLANSAAILSYPETHADWVRPGIMLYGSSPFSDISASELDLRPAMTLTSRIIAVQDLHTGDKVGYGQTYCVKRPMRVGIVAGGYADGYPRHAPTGTPISVDGIRTRIIGRVSMDMLHVDLTNIENGGVGSLVIFWGKGMPVDEVAESAGTISYELLCSLAQRIKIET

SEQ ID NO: 33110 - DNA, 1359 bp, Bifidobacterium bifidum
  CDS (1)..(1359): transl_table=11
atgactttgaacgcagcatccgaattgcagttttcatccccggctggcgaagccaactaccgggcggcgcgacgccggtaccccgcgcaggcgatcgtcgacctggccacgttgagggacaacatggcccacttggtcgatgtggtgggcggcccgcattccggcacggcggtgatgggcgtggtcaaggcggacgcctacgggcacggtctgctgccggccgcgctggcggcgctcgcgggcggcgcgacctggctgggcaccgcgcaatcgcatgaggcgctgctgctgcgcaaactcggcatcggcccggatcgctgccgcattctgacatgggtgtacaacggcatggatgtgccgttcgacgagctgatcgacaacgacatcgacatctccgtcggctcgctggcgggcatcgacgcgctcgccgacgccgcgcgccggctcggcaaacccgcacgcgtgcatgtcaaggtcgactccggcttcggccgcaacggcttcacgccggccggattcgacgcggcccttgccaagctggtgccgcttgcgcatgagggcgtgctgcacatcgtcggccagtggagccatttggcggttgccgaattgccggatgtgcctgaatttgttgcctccaccgaccggcagattgaattgttcacggaattcacccgttgcatggaagccgcgggcattgcgcccgaaataagccatttggcaaacaccgcggccacgctcaaccgttccgagattcatttcgaaatgacccgtccgggcatcggcctgtacgggtacgagcccgacccggcgatgggcacgccgcgtgaatggcatttgaagcccgccatgacattgcaggcgcagctcggtacggtcaaggatgtcgaggccgggcacggcgtctcatacggtcgcacgtacctgacgcccgacaacaccagcaccgccatcgtgcccctcggctacgccgacggcatccaccgttccgcctccggcttcgacatgcagggcgccaagcatgtcgagaaggccggcggtcccgtgcgtgtgatgaccagcgccggcccgcgcctgctgcacgtgtgcggtcgcgtgtgcatggaccaattcatcgtcgacctgcacgggtcggccgccgagcttggcgtccatgagggcgacaccgtggagttgttcggacccggtcgcggtgagcaatacggcgagccgaccgccgacgactgggcgcgcgccgccgacacgattagctacgaggtgttcacctgtctgcgcaatcgcatcccgaggctctacctgcatgccgccgacgtgctgcctgccgcggacctcgccaagctcgatccggcgagcctgctgtag

SEQ ID NO: 33111 - protein, 452 aa, Bifidobacterium bifidum
MTLNAASELQFSSPAGEANYRAARRRYPAQAIVDLATLRDNMAHLVDVVGGPHSGTAVMGVVKADAYGHGLLPAALAALAGGATWLGTAQSHEALLLRKLGIGPDRCRILTWVYNGMDVPFDELIDNDIDISVGSLAGIDALADAARRLGKPARVHVKVDSGFGRNGFTPAGFDAALAKLVPLAHEGVLHIVGQWSHLAVAELPDVPEFVASTDRQIELFTEFTRCMEAAGIAPEISHLANTAATLNRSEIHFEMTRPGIGLYGYEPDPAMGTPREWHLKPAMTLQAQLGTVKDVEAGHGVSYGRTYLTPDNTSTAIVPLGYADGIHRSASGFDMQGAKHVEKAGGPVRVMTSAGPRLLHVCGRVCMDQFIVDLHGSAAELGVHEGDTVELFGPGRGEQYGEPTADDWARAADTISYEVFTCLRNRIPRLYLHAADVLPAADLAKLDPASLL

SEQ ID NO: 33112 - DNA, 1176 bp, Agrobacterium tumefaciens
  CDS (1)..(1176): transl_table=11
atgacagacgacttcgaagacagctttcccgacaacgaaaccgatgcgttcgagcaagccccgctgcgattgaccgtcgatctcggcgctctcgccgacaattggcgggacatgaagaagcggtccggaagagcccgcacggccgccgtcgtcaaggccgatgcctatggtctcggcatcgaggattgtggtgcgacgctttaccatgccggcgcgcgggacttcttcgtggcgacggtggccgagggcgcgacccttcgctcctatgctccggaagcgcgcatcttcgtattgtcaggcatctggcagggccaggaacggcaggtgttcgacaatgatctggtgccggtgctggcctccgaggagcaactgtccttctggatggcgacggtcgccgagcggggtgaccacccctgcgcgctgcatgtggacaccggcttcaatcgcctcggcctgccgcttgatgacgcgctgtttctggccgacgacgtgacacggccggcgagtttcgacccggttctggtgctgtcgcatctcgcctgcgccgatacaccgtcctcccccatgaacagggcgcagctcgaatcattccgaagggttagcgccgccttcgaaggtatcgaatcaagcctttcggcatccgccggtatctttctcggtcccgactatcatttcgacctcacccgccccggcatcgccctttatggcggcgaggcggtcaacgatgtggccaacccgatgcggcccgtcgccaaggccgaggcccggatcatccagatacgcgaagcaggcgaaggccagacggtgagctatggcagcagcttcctgctcaagcgcgcaagccggcttgccatcgcatccgtcggttatgcggatggctatcagcgttcgctgtccggctcgggcattcccttacgtgaaatgggccatggcggtgcatatggcgtcgtcaacggccacaaggtgcccgtggccgggcgcgtgaccatggacctgactattttcgacgtcacggatgtgccggcaaatgccattcgcgctggcgactatatcgagctttttggccccaacgttccagtcgatgaaaccgcacgggcggccggcacgatcggttatgagatgctgacggggctcggcctgcgttacgaacggcaatatctggtagcggatgactga

SEQ ID NO: 33113 - protein, 391 aa, Agrobacterium tumefaciens
MTDDFEDSFPDNETDAFEQAPLRLTVDLGALADNWRDMKKRSGRARTAAVVKADAYGLGIEDCGATLYHAGARDFFVATVAEGATLRSYAPEARIFVLSGIWQGQERQVFDNDLVPVLASEEQLSFWMATVAERGDHPCALHVDTGFNRLGLPLDDALFLADDVTRPASFDPVLVLSHLACADTPSSPMNRAQLESFRRVSAAFEGIESSLSASAGIFLGPDYHFDLTRPGIALYGGEAVNDVANPMRPVAKAEARIIQIREAGEGQTVSYGSSFLLKRASRLAIASVGYADGYQRSLSGSGIPLREMGHGGAYGVVNGHKVPVAGRVTMDLTIFDVTDVPANAIRAGDYIELFGPNVPVDETARAAGTIGYEMLTGLGLRYERQYLVADD

SEQ ID NO: 33114 - DNA, 1170 bp, Bacillus subtilis
  CDS (1)..(1170)
atgagcacaaaacctttttacagagatacgtgggcggaaattgacttgtccgcgataaaggaaaatgtcagcaatatgaaaaaacatatcggtgaacatgtccacttgatggcagttgtgaaagcaaacgcctacgggcatggtgatgcagaaacagcaaaggctgctcttgacgcaggtgcttcatgcttggccgtggccattttggatgaagcgatttcactgcgcaaaaagggattgaaggcgcctatattggtgcttggcgcggttcccccggagtatgtggcaatcgctgctgagtatgacgtgaccttaacaggttattctgttgaatggcttcaggaggcagcccgccacacgaaaaaaggttctcttcattttcatctgaaggtcgatacggggatgaacagacttggtgtaaaaacagaggaagaagttcagaacgtgatggcaattcttgaccgcaaccctcgtttaaagtgcaaaggggtatttacccattttgcgacagcggatgaaaaagaaagaggctatttcttaatgcagtttgagcgctttaaagagctgattgctccgctgccgttaaagaatctaatggtccactgcgcgaacagcgccgctggactccggctgaaaaaaggcttttttaatgcagtcagattcggcatcggcatgtatggccttcgcccgtctgctgacatgtcggacgagataccgtttcagctgcgtccggcatttaccctgcattcgacactgtcacatgtcaaactgatcagaaaaggcgagagcgtcagctacggagccgagtacacagcggaaaaagacacatggatcgggacggtgcctgtaggctatgcggacggctggctccgaaaattgaaagggaccgacatccttgtgaagggaaaacgcctgaaaattgccggccgaatttgcatggaccaatttatggtggagctggatcaggaatatccgccgggcacaaaagtcacattaataggccggcagggggatgaatatatttccatggatgagattgcaggaaggctcgaaaccattaactatgaggtggcctgtacaataagttcccgtgttccccgtatgtttttggaaaatgggagtataatggaagtaagaaatcctttattgcaggtaaatataagcaattaa

SEQ ID NO: 33115 - protein, 389 aa, Bacillus subtilis
MSTKPFYRDTWAEIDLSAIKENVSNMKKHIGEHVHLMAVVKANAYGHGDAETAKAALDAGASCLAVAILDEAISLRKKGLKAPILVLGAVPPEYVAIAAEYDVTLTGYSVEWLQEAARHTKKGSLHFHLKVDTGMNRLGVKTEEEVQNVMAILDRNPRLKCKGVFTHFATADEKERGYFLMQFERFKELIAPLPLKNLMVHCANSAAGLRLKKGFFNAVRFGIGMYGLRPSADMSDEIPFQLRPAFTLHSTLSHVKLIRKGESVSYGAEYTAEKDTWIGTVPVGYADGWLRKLKGTDILVKGKRLKIAGRICMDQFMVELDQEYPPGTKVTLIGRQGDEYISMDEIAGRLETINYEVACTISSRVPRMFLENGSIMEVRNPLLQVNISN

SEQ ID NO: 33116 - DNA, 1161 bp, Clostridium acetobutylicum
  CDS (1)..(1161): transl_table=11
atgttcagacatataagacctgtatgggctgagatagatttagataatattgcatataatatgcagcaaattagaaggtgttcaaaaagtgatgaaataataggggtagttaaggctgatgcatatggtcatggagctgttgatgtagcaccagtacttttggagaatggtgcaaatcgtcttgcggttgctgtgataagcgaagctgtagaactgagaaagtcaggaattcaatgtccgataatgattttaggttatacacccttaagtttggtggatagtattataaaatacagtatagaacaaactgttttttcatatgattatgcagaaaagctatctgaggcagcaaggcaaaagaatataacgcttagaatccatatagcattagatacagggatggggagaataggatttttgccaacagaggaaagtgtatgggaagtttataaaataagtaaactttcaaacataataatagaaggaatattttcacacttttcaacatctgatgagacaaataaagaatatacgtatgcacaattaaagaagtttgaatggttttataatgaattaagaaagaaaaatattaaaataaatataagacatataggcaacagtgctgccataatggaattgccagaaactcattttgaggctacaagacctggcattatactatatggatactatccatcaaatgaggttgacaagaataagttaaacttaaaacccattatgacacttaaaaccaatgtggttcatataaaaaaaatgatgcctggtgaatatgttagctatggcagaaagtttaaatgtgaaagagagagtattatagctacacttcctgttggatatgcagatggatataccaggatgctttcaggcaaggcaaaagtaataattaatggtaactatgcgcctgttatcgggaggatttgtatggatcaatgtatgatagatattactgatcttccaagcgttcaagttggagacgaagttgtaattatgggtgaaagtgatgataaaaaatttacagcagacgatatggctgaaatcataggaacaataaattacgaagttatttgtatgataagcaagcgtgtaccacgcgtttatataaagaatggggaagttgtaaaaataaggaattacgtgtag

SEQ ID NO: 33117 - protein, 386 aa, Clostridium acetobutylicum
MFRHIRPVWAEIDLDNIAYNMQQIRRCSKSDEIIGVVKADAYGHGAVDVAPVLLENGANRLAVAVISEAVELRKSGIQCPIMILGYTPLSLVDSIIKYSIEQTVFSYDYAEKLSEAARQKNITLRIHIALDTGMGRIGFLPTEESVWEVYKISKLSNIIIEGIFSHFSTSDETNKEYTYAQLKKFEWFYNELRKKNIKINIRHIGNSAAIMELPETHFEATRPGIILYGYYPSNEVDKNKLNLKPIMTLKTNVVHIKKMMPGEYVSYGRKFKCERESIIATLPVGYADGYTRMLSGKAKVIINGNYAPVIGRICMDQCMIDITDLPSVQVGDEVVIMGESDDKKFTADDMAEIIGTINYEVICMISKRVPRVYIKNGEVVKIRNYV

SEQ ID NO: 33118 - DNA, 1080 bp, Escherichia coli O6
  CDS (1)..(1080): transl_table=11
atgcaagcggcaactgttttgattaaccgccgcgctctgcgacacaacctgcaacgtctgcgtgaactggcccccgccagtaaactggtggcggtggtgaaagcgaacgcctacggtcacggtctgattgagaccgcgcgaacgctccccgatgctgacgcctttggcgttgcccgtctcgaagaagccctacggctgcgggcggggggtatcacgcgacctattttgttactggaaggtttttttgaagcagacgatttgccgacgatctccgctgaacatctgcataccgcagtccacaatgaagagcagcttgtcgccctcgaaaacgctgaacttaaagagcctgtcaccgtctggatgaagctcgataccggaatgcaccgtttgggcgtattgccggaacaggccgaggcgttttatcagcgtctgagccagtgtaaaaatgtccgccagccggtgaacattgttagtcacttcgcccgtgccgatgaaccgcaaagcggcgcgactgaaaagcagctcgatatcttcaacaccttttgtgaaggtaaaccggggcaacgctcaattgcggcatcaggcggcattttgttatggccgcagtcgcattttgactgggcgcgtccggggatcattctttacggtgtctcgccgctggaagatggcacgacaggggctgattttggctgtcagccagtcatgtctttaacctccagcctgattgccgtgcgtgagcataaagccggagagcctgtcggttatggtggaacctgggtaagcgaacgtgatactcgtcttggcgtagtcgcgatgggctatggcgatggttatccgcgcgccgcgccgtccggtacgccagtgctggtgaacggtcgcgaagtgccgattgtcgggcgagtcgcgatggatatgatctgcgtagacttaggtccacaggcgcaggacaaagccggggacccggtcattttatggggcgaaggtttgcccgtagaacgtatcgctgaaatgacgaaagtaagcgcttacgaacttattacgcgcctgacttcaagagtcgcgatgaaatacgtggattaa

SEQ ID NO: 33119 - protein, 359 aa, Escherichia coli O6
MQAATVLINRRALRHNLQRLRELAPASKLVAVVKANAYGHGLIETARTLPDADAFGVARLEEALRLRAGGITRPILLLEGFFEADDLPTISAEHLHTAVHNEEQLVALENAELKEPVTVWMKLDTGMHRLGVLPEQAEAFYQRLSQCKNVRQPVNIVSHFARADEPQSGATEKQLDIFNTFCEGKPGQRSIAASGGILLWPQSHFDWARPGIILYGVSPLEDGTTGADFGCQPVMSLTSSLIAVREHKAGEPVGYGGTWVSERDTRLGVVAMGYGDGYPRAAPSGTPVLVNGREVPIVGRVAMDMICVDLGPQAQDKAGDPVILWGEGLPVERIAEMTKVSAYELITRLTSRVAMKYVD

SEQ ID NO: 33120 - DNA, 1131 bp, Oceanobacillus iheyensis
  CDS (1)..(1131)
atgaaagtaacgagttatcgcgatgcatgggtggaagtttccttagatgcactaacttataatgtacgtcaatttaagaatcatttacaggaaaagtcaaggttgatggcagttgtaaaagcagatggttatggtcacggggccgttccgatagcgcggagatccttagaagcaggggcggaatatcttggagtagcttttatagatgaggcacttcagattcgggaagctggaatattagctccaatcttattacttggttttacaccaagctacgctgtaagagaagctgttagacatgacctcacactcaccgtatattcgacggaaacactggaagcgataaaggatgcagctcgatctttagataaaaaggcaaaaatacatataaaagtggatagtggtatgagtcggatcgggttaagatcctctgaggaggtcatctctctaatgacatcactacaaacggaagaaattgaagtagaagggattttcactcattttgcggatgctgataatgatgagagtgatgcgtatacatataaacaatttgaaacatttcaagggattatggaagcgttagaaaatgaaggttattcgataccaatcaagcattgctgtaatagtgcagcaacgatagcatttcctgacatgcatatggatatggttcgtgttggcattagtttatacgggttataccctggacaacatttaaaggaaatattgtccttacagcaagtaatgagctttaaagcaaagcctgtgctcataaaagatgttccccctcatcaaccaattagctatggattaacgtatgaaacaaaggaaacgtccaagatcgcaacacttcctataggctatgcggatggtttttcccgtttgttatcaaatgtaggtcatgtgactgttcatggaacagcgtgtcccattgtagggagaatttgtatggatcagtctatgatagatgtgtctgaagttcaaacggatgtaactaaagacgatatcgtaaccatttttggtgatgaaaatgcggggtatataccgctcgacgttgttgcagagcaaatgcaaacgatccattatgaaacagtgtgtcttattggaaaaagagtaccaagacattacgtgtag

SEQ ID NO: 33121 - protein, 376 aa, Oceanobacillus iheyensis
MKVTSYRDAWVEVSLDALTYNVRQFKNHLQEKSRLMAVVKADGYGHGAVPIARRSLEAGAEYLGVAFIDEALQIREAGILAPILLLGFTPSYAVREAVRHDLTLTVYSTETLEAIKDAARSLDKKAKIHIKVDSGMSRIGLRSSEEVISLMTSLQTEEIEVEGIFTHFADADNDESDAYTYKQFETFQGIMEALENEGYSIPIKHCCNSAATIAFPDMHMDMVRVGISLYGLYPGQHLKEILSLQQVMSFKAKPVLIKDVPPHQPISYGLTYETKETSKIATLPIGYADGFSRLLSNVGHVTVHGTACPIVGRICMDQSMIDVSEVQTDVTKDDIVTIFGDENAGYIPLDVVAEQMQTIHYETVCLIGKRVPRHYV

SEQ ID NO: 33122 - DNA, 1077 bp, Pseudomonas aeruginosa
  CDS (1)..(1077): transl_table=11
atgcgtcccctcgttgccaccgtcgacctttccgccattcgccacaactatgccctggccaagcgctgcgcgccgcagcgccaggcgttcgcggtggtcaaggcgaacgcctatggccacggtgcgcgcgaagtggttaccgcgttgcacgacgatgccgatggcttcgccgtggcctgcctggaggaggccgcggaagtccgcgccttgcacgccagcgcgcgcatcctgttgctggaaggctgcttcgaggcgagcgaatacgccctcgccgggcaattgcgcctggacctggtgatccagggcgcggaacagggcgaggcgttcctcgccgccggcctggatattccactcaacgtctggctcaagctcgactccggcatgcaccgcctgggcttcgatcctgccgcgctgcgcgcctggcatgcgcgcctgcgcagccatcccggtgtgcgcgagctgaacctgatcagccatttcgcctgcgccgacgaacgcaaccatccgctcaccgaacagcagctggagagtttcctcggcctgctcgacctggacttcgaccagcgcagcctggccaattcggcggcggtgctgactatcccggccgcccacatggactggctgcggccgggaatcatgctctacgggtcgaccccgctggccgacctcagtgctgccgaactgggcctgaagccggccatgagcctgggcgcgcagttgatttcactgcgcgaggtggccgtgggtgagagcgtcggctacggcgccacctggatcgccgagcggccggcgcggatcggcacggtcagttgcggctacgccgacggctatccgcgtaccgcgccagccgggactccggtactggtcgggggacgccgcgcgatcctggccgggcgggtctcgatggacatgctggcggtcgacctctccgacctgccggaggctcgcgttggcgacccggtggagttgtggggcgccgggttgtcggtggacgaggtcgcccgtgcctgcggcacccttggctacgagcttctgagcaaggtcacggctcgggttccgcgacgctacagccactga

SEQ ID NO: 33123 - protein, 358 aa, Pseudomonas aeruginosa
MRPLVATVDLSAIRHNYALAKRCAPQRQAFAVVKANAYGHGAREVVTALHDDADGFAVACLEEAAEVRALHASARILLLEGCFEASEYALAGQLRLDLVIQGAEQGEAFLAAGLDIPLNVWLKLDSGMHRLGFDPAALRAWHARLRSHPGVRELNLISHFACADERNHPLTEQQLESFLGLLDLDFDQRSLANSAAVLTIPAAHMDWLRPGIMLYGSTPLADLSAAELGLKPAMSLGAQLISLREVAVGESVGYGATWIAERPARIGTVSCGYADGYPRTAPAGTPVLVGGRRAILAGRVSMDMLAVDLSDLPEARVGDPVELWGAGLSVDEVARACGTLGYELLSKVTARVPRRYSH

SEQ ID NO: 33124 - DNA, 1194 bp, Rhizobium loti
  CDS (1)..(1194)
atgatgttgtccatagtgcggtcagtcgacgtcgtattggaaatcgatctagcggctattcgggcgaatttccagaagatctcgacacttgttggggataaggtgaaggtagctgcagtcgtcaaaagtgatgcgtacggacttggtcttgtagacattgccaggacgctcatagatgccggctgcgacctactgtttgttgccaatttggatgaggccctgcttctaagatcttcctttagtcgagttgcaattgcggtctttcgtgatgagtttgataggtttggcacatggtaccggtcgcatggcctgatacctgtggtgaacaactgcaaggaattgcatgcagttggcacagccggagagccgcaatcatactttctcaatgtggaaactggattctctcgctttgggctcagcgttggcgatatccagcgcgagtatctgctacgcaccttcgaaaggtatcgcccttcgatcgtgctcagccacctcgcatgcggcgaatgcatttcggacccaatgaatcaattgcagagggaccgttttcggacagtctatgatcttcttaaacccacgcgcggcagtctctctgcctccgccggtgtatggctcggaaagtcctaccactttgacatggtgcgtgtaggatcggcgctgtacgggatccataacgctggcgtgcaaacaaatcccctgaagcccgtggtcaaactcagagcaagaatacttgacgtgcggagcgttccggcgggggaagccgttggatatggtgcaacgtttcgtacggaccgagccagccgagtagcaatcgtcgggatcgggtacaagcacgggcttccatggtcctgcgcgaacaagatattcgttcggttggcggaatattcagcgccttcaataggaagaatctccatggaatatatgataattgatataacggacgttccggcgagacgttgcagcccgggcacctttgcggaattgctaagtgaagacttcaccgtcaatgacctcggagcggccgctggggttagtccacaggaggcactgacgcggcttggtgccgggtgcacacggaagtatctgaatttattccctccatctgcagcgttcacagcaaaccgcccgacggaggcgatgagtaacccatcgagagcaaagagccgaccgatggacaagcaagcgctcatctag

SEQ ID NO: 33125 - protein, 397 aa, Rhizobium loti
MMLSIVRSVDVVLEIDLAAIRANFQKISTLVGDKVKVAAVVKSDAYGLGLVDIARTLIDAGCDLLFVANLDEALLLRSSFSRVAIAVFRDEFDRFGTWYRSHGLIPVVNNCKELHAVGTAGEPQSYFLNVETGFSRFGLSVGDIQREYLLRTFERYRPSIVLSHLACGECISDPMNQLQRDRFRTVYDLLKPTRGSLSASAGVWLGKSYHFDMVRVGSALYGIHNAGVQTNPLKPVVKLRARILDVRSVPAGEAVGYGATFRTDRASRVAIVGIGYKHGLPWSCANKIFVRLAEYSAPSIGRISMEYMIIDITDVPARRCSPGTFAELLSEDFTVNDLGAAAGVSPQEALTRLGAGCTRKYLNLFPPSAAFTANRPTEAMSNPSRAKSRPMDKQALI

SEQ ID NO: 33126 - DNA, 1080 bp, Salmonella typhimurium
  CDS (1)..(1080)
atgcaagcggcaacagtcgtcattaaccgccgcgctctgcgacacaacctgcaacgtctgcgtgaactggcgcctgccagtaagctggttgcggtggtgaaagcgaacgcttatggacacggtcttctggagaccgcgcgaacgctccctgatgctgacgcttttggcgtggcgcgtcttgaagaggctctacgtctgcgagcgggtgggatcacgcagcctatcctgctgctggagggttttttcgacgccgccgatctgccgaccatttccgcgcaatgtctgcataccgccgtacataatcaggagcagcttgccgccctggaggcggtggagctggcggagccggtaacggtctggatgaaactggataccggtatgcatcgtctcggcgtgcgtcccgaagaggcggaggcgttctaccagcgtctgacgcactgtaaaaatgtacgccagccggtgaatatcgtcagccattttgcccgtgcggatgagccggaatgcggcgctaccgaacatcagctcgacatttttaatgccttctgtcagggtaaacccggtcagcgctctattgccgcgtctggcggtattctgctgtggccgcagtctcactttgactgggcgcgtccgggaatcattttgtatggcgtatcgccgctggaacacaaaccctgggggccggattttggttttcagccggtgatgtccttaacttccagtttgatcgcggtgcgtgaccacaaagcgggcgaaccggtgggctacggcgggacatgggtgagtgagcgcgacacgcgcctgggcgtggtggcgatgggttatggcgatggctacccacgagcggcgccttccggtacgccagtactggtcaatggtcgtgaagtcccgattgtcgggcgggtggcgatggatatgatttgcgtggatttggggccaaacgcgcaggataacgcgggcgatccggtggttttatggggtgaaggtctgccggttgaacgtatcgctgaaatgacaaaagtaagtgcttacgaacttatcacgcgcctgacctcaagggtggcaatgaagtatattgattaa

SEQ ID NO: 33127 - protein, 359 aa, Salmonella typhimurium
MQAATVVINRRALRHNLQRLRELAPASKLVAVVKANAYGHGLLETARTLPDADAFGVARLEEALRLRAGGITQPILLLEGFFDAADLPTISAQCLHTAVHNQEQLAALEAVELAEPVTVWMKLDTGMHRLGVRPEEAEAFYQRLTHCKNVRQPVNIVSHFARADEPECGATEHQLDIFNAFCQGKPGQRSIAASGGILLWPQSHFDWARPGIILYGVSPLEHKPWGPDFGFQPVMSLTSSLIAVRDHKAGEPVGYGGTWVSERDTRLGVVAMGYGDGYPRAAPSGTPVLVNGREVPIVGRVAMDMICVDLGPNAQDNAGDPVVLWGEGLPVERIAEMTKVSAYELITRLTSRVAMKYID

SEQ ID NO: 33128 - DNA, 1128 bp, Schizosaccharomyces pombe
  CDS (1)..(1128)
atgagaggtgcaaagtccgtcattgatttgcatgccattgcacacaattataatgttgccaagcaaatgatgcttcaaaaaaatccaagcggtcatgttttagcaattgtaaaagcaaacgcttatggacacggagctgtacaagttgcacgtttccttctcaaacattgctcttcaattgatggctttggtgtttcttcaattgaagaggctttagaattaaggcacggtggaatctataacaaaattgttctcctggaaggattctttactgaggaggatgaattaaaacttattgatgattacaatttttctattatcattcattctgaagaccaggtgaatagttttattaaataccctttcaacagaccagtagagatttggttgaaacttgactctggaatgaaccgtctaggttttacacctagtcagtttatgaagttctataatttactaagcaataacaaaaacgttagtaatatcggaaaaatcactcattttgcatttgcagatatgctagaaaatccggaacacactttgaagcaatgggatatatttgaaaagtctgttgcgcatttaccaggtccacttagtgctggcggatctgcgattattttgggctggctaaacactgtgtgcacagactggttgcgtgctggtatcatgttatatggtatttctccatttctttctaaaaataaagactcaaaaactccagagtctgttaatataaagcctgccatgaaactggtatctaccataataagtgtgaaacatgttgacaagggccagcccattggttatggagggagatatgttgctactagagatatgaaactaggtgttgtagcaatgggttacggagacggatttccccgtcaagttaaagatggatgtccagttttagtgaatggcgtgaaggctccaattgttggtagggtttccatggacatgcttactgttgatctttcagacattcctgatgtcaagccaggggatgaagtaatattttggggaactccagaattgacagtggcagacattgctaaatattgtagtgatactagcccttatgagcttgtaacaaaactcactaggagagttcctttacagtacacatactaa

SEQ ID NO: 33129 - protein, 375 aa, Schizosaccharomyces pombe [sequence omitted]

SEQ ID NO: 33130 - DNA, 1149 bp, Staphylococcus aureus
  CDS (1)..(1149): transl_table=11
atgtcggataaatattatagatctgcgtatatgaatgtagatttaaacgctgttgcatcaaatttcaaagtattcagtacattgcatccaaataaaacagtgatggctgtcgttaaagccaatgcctatggactaggtagtgttaaagtagcacgtcatttaatggaaaatggcgccacattttttgctgtagcaacgttagatgaagcgatagaacttagaatgcatgggattactgctaaaattttagtcttaggtgtgttaccagctaaagatattgataaagcgatacaacaccgagttgccttaacggttccgtctaaacagtggttgaaagaagcaattaaaaacatttctggtgagcaagagaaaaagttatggttgcacattaaattagatacaggaatgggacgtttaggtattaaagatactaaaacgtatcaagaagtgattgaaatcattcaacaatatgagcaacttgtatttgaaggcgtgtttacacactttgcctgtgctgacgaaccaggagatatgacaactgaacaatatcaacgttttaaagatatggtcaatgaagcaattaaacctgaatatatacattgtcagaactcagcaggctctctattaatggattgccaattctgtaatgcaataagaccaggaatttccctttatggatattatccatcagagtatgtacagcaaaaagttaaagtacaccttaaaccaagtgtgcaattaattgctaatgtagttcaaacaaagacgctacaagcgggtgagtctgtaagttatggtgcaacttatacagctactgacccaactacaatagcattgttacctattggatatgcagatggctatttacgcataatgcaaggtagctttgtaaatgtaaatggtcatcaatgcgaagttattggtcgcgtatgtatggatcagacaattgttaaagtgccagatcaagttaaagctggagattcggtgattttaatagataatcatagagaaagtccacagtcggtagaggtggtagctgaaaagcaacatactattaattatgaagtgctttgtaacttgtcgagacgtttgccgcgaatctatcatgatggtgatcaacgttttgtaacaaatgaattgttaaaataa

SEQ ID NO: 33131 - protein, 382 aa, Staphylococcus aureus
MSDKYYRSAYMNVDLNAVASNFKVFSTLHPNKTVMAVVKANAYGLGSVKVARHLMENGATFFAVATLDEAIELRMHGITAKILVLGVLPAKDIDKAIQHRVALTVPSKQWLKEAIKNISGEQEKKLWLHIKLDTGMGRLGIKDTKTYQEVIEIIQQYEQLVFEGVFTHFACADEPGDMTTEQYQRFKDMVNEAIKPEYIHCQNSAGSLLMDCQFCNAIRPGISLYGYYPSEYVQQKVKVHLKPSVQLIANVVQTKTLQAGESVSYGATYTATDPTTIALLPIGYADGYLRIMQGSFVNVNGHQCEVIGRVCMDQTIVKVPDQVKAGDSVILIDNHRESPQSVEVVAEKQHTINYEVLCNLSRRLPRIYHDGDQRFVTNELLK

SEQ ID NO: 33132 - DNA, 1167 bp, Thermoanaerobacter tengcongensis
  CDS (1)..(1167): transl_table=11
gtgaaatttgacggggtaagacccacccgcgtagaagtatatctagatgcaataacacataacttcagagaaataaagaagatagttggaaaaaatgtgaaaataatggcggtgataaaaggggatgcatatggtcatggagcttcatatgtagccaaatttttagaaaaagaaggggtagactatttcggagtagcaactacagaagaagctttagagttgagggaaaagggaataaaaactcctattctaatttttggttatactcctcctacacagttaagacaaatagttaaacatgaccttactcaaacggtgtacgatataaaatatgcgaaagagttagagaaagaaagtctaaaacaaaacaaaagagcaaaagtccatataaaaattgatacaggtttgggacgaatcggatatattgattttgatttagcgcagaaagagattctagaaatggcaaacatgagaggattaatattggaagggatatacagtcattttgctgccgcatccgaagatgatagggattattgcaaagagcagttcgacaaattcatgaatctaattagtagtttggagaaaaaaaggttaaaaattcctttaaaacatatagccaatgcggcagctattttaaatctcaattattctcatttagatatggtaaggccgggtataattttgttcggtgcatatccttcaaagagagtagaacgaaaggtagaattgagagaaacactgaggtttactacgcgggtggtccatttaaaagatgtaccagcgggattttttataggctacggcaaaagttttgtgacaaaaagaaaaagtgtaatagctactatccccgtggggtatgcggatggacttgataggagattatctaataactataaattgctattaaagggaaagtatgttccaatagtaggcagagtatgtatggaccagtgcatgatagatgttactgatgtagaaggtgtggaaataggagatgaggtggttattatagggacacaaaacaatgagacagtttctgtagaatctatggctgataaaattgaaactattcctcaagaagttttttctagaattagcagaagggtgcctagagtgtatttttatgatggaataaagattggagaagtaaattacttaaagtga

SEQ ID NO: 33133 - protein, 388 aa, Thermoanaerobacter tengcongensis
MKFDGVRPTRVEVYLDAITHNFREIKKIVGKNVKIMAVIKGDAYGHGASYVAKFLEKEGVDYFGVATTEEALELREKGIKTPILIFGYTPPTQLRQIVKHDLTQTVYDIKYAKELEKESLKQNKRAKVHIKIDTGLGRIGYIDFDLAQKEILEMANMRGLILEGIYSHFAAASEDDRDYCKEQFDKFMNLISSLEKKRLKIPLKHIANAAAILNLNYSHLDMVRPGIILFGAYPSKRVERKVELRETLRFTTRVVHLKDVPAGFFIGYGKSFVTKRKSVIATIPVGYADGLDRRLSNNYKLLLKGKYVPIVGRVCMDQCMIDVTDVEGVEIGDEVVIIGTQNNETVSVESMADKIETIPQEVFSRISRRVPRVYFYDGIKIGEVNYLK

SEQ ID NO: 33134 - DNA, 1086 bp, Vibrio cholerae
  CDS (1)..(1086)
atgaaggcggccaccgcctacatcaatttagaggcgttgcagcacaacttgcagcgcgttaagcagcaagcgccagagagtaaaatcatggcggtggtgaaagccaatggttatggacacgggctgcgccatatcgcacgtcacgcccttggggcggatgcctttggcgtggcgcgcattgaagaggctttacagctgcgcgccagtggcgtagtgaaacccattttgttgcttgagggattttattctcccggtgatttgccagtattggttaccaacaacatccaaaccgtcgtacattgtgaagagcagttacaagcgctggagcaagctcagctagagactccggtcatggtatggctgaaagtcgacagcgggatgcatcggctaggggttcgccctgaacaatatcaagatttcgtggctcgtttgcaccagtgtgagaatgtggctaaaccactgcgttacatgagccatttcggctgtgccgatgagttagataaatcgacgacggtagagcaaacagaactgtttttatccctgacgcaaggctgtcagggtgagcgttcgctggccgcttctgccggattattagcttggccgcaaagccagcttgaatgggtaaggccgggaattattatgtacggcgtttctccctttgtggaaaagagcgcggttcagttaggttaccagccagtgatgaccttaaagtcgcacttgatcgctgtccgcgaagtgaaagcgggggagagtgtcggttatggcggtacttggaccagccagcgagataccaaaattggtgtgattgcgattggttatggtgatggctatccacgcactgcgccgaatgggacgccagtggttgtcaatgggcgtcgggtgccgattgctgggcgcgtatctatggatatgttgacggtagatttagggccggatgcttgcgatcgcgtcggtgatgaagccatgctgtggggtaatgagctgcccgtagaagaagtggccgcacatattggtacgatagggtatgagttagtgacgaaactcacctcgcgagtggaaatgtcttattatggagcaggcgtttag

SEQ ID NO: 33135 - protein, 361 aa, Vibrio cholerae
MKAATAYINLEALQHNLQRVKQQAPESKIMAVVKANGYGHGLRHIARHALGADAFGVARIEEALQLRASGVVKPILLLEGFYSPGDLPVLVTNNIQTVVHCEEQLQALEQAQLETPVMVWLKVDSGMHRLGVRPEQYQDFVARLHQCENVAKPLRYMSHFGCADELDKSTTVEQTELFLSLTQGCQGERSLAASAGLLAWPQSQLEWVRPGIIMYGVSPFVEKSAVQLGYQPVMTLKSHLIAVREVKAGESVGYGGTWTSQRDTKIGVIAIGYGDGYPRTAPNGTPVVVNGRRVPIAGRVSMDMLTVDLGPDACDRVGDEAMLWGNELPVEEVAAHIGTIGYELVTKLTSRVEMSYYGAGV

SEQ ID NO: 33136 - DNA, 1080 bp, Yersinia pestis
  CDS (1)..(1080): transl_table=11
atgaaagcggcaacagcagtcatcgaccgccatgctctgcgacataacttacaacaaattcggcgtctggcaccgcaaagccggttggtggctgttgtgaaagcaaatgcttatggccacgggttattagccgcagcacacacattacaggatgctgattgttatggcgtggcccgtattagcgaggcgctgatgttgcgagcgggtggaatagttaaacctattttgctgctggaagggttctttgatgcagaagacctgccggtattggtggctaaccacattgaaaccgccgttcacagcctggaacagctcgtggcattggaagcggctacgctttctgcgccgattaatgtctggatgaaattggatacagggatgcaccgcctgggggttcgcccagatcaggccgaagcgttttatcagcgtttgagcgcatgccgtaacgtcatccagccggtcaatatcatgagtcactttagccgtgccgatgaacctgaagtggcggccacgcaacagcaactggcgtgttttgatgcgtttgctgcaggtaaacctgggaaacaatctatcgctgcttcgggcggtattctgcggtggccacaagcgcaccgtgattgggtgcgcccagggattgtgctgtatggggtttcgccgtttgatgcgccctatggccgtgatttcggtttattgcccgccatgaccctgaaatccagtctgatcgcggtgcgtgaacataaagccggtgaatcggtcgggtatggcggcacctgggtcagtgagcgcgatacgcgtttaggtgtgatcgcgataggctatggtgatggctacccacgtagcgccccgtcagggacaccggtatggcttaatggccgtgaagtgagcatcgttggccgggtatcgatggacatgatctccattgatcttggcccggaaagtacagataaggtgggcgatgaagccctgatgtggggagccgaattaccggttgaacgcgtggctgcctgcaccggtatcagcgcgtatgaattgatcactaatctgacctcccgcgtagcgatggaatatctaggggaataa

SEQ ID NO: 33137 - protein, 359 aa, Yersinia pestis
MKAATAVIDRHALRHNLQQIRRLAPQSRLVAVVKANAYGHGLLAAAHTLQDADCYGVARISEALMLRAGGIVKPILLLEGFFDAEDLPVLVANHIETAVHSLEQLVALEAATLSAPINVWMKLDTGMHRLGVRPDQAEAFYQRLSACRNVIQPVNIMSHFSRADEPEVAATQQQLACFDAFAAGKPGKQSIAASGGILRWPQAHRDWVRPGIVLYGVSPFDAPYGRDFGLLPAMTLKSSLIAVREHKAGESVGYGGTWVSERDTRLGVIAIGYGDGYPRSAPSGTPVWLNGREVSIVGRVSMDMISIDLGPESTDKVGDEALMWGAELPVERVAACTGISAYELITNLTSRVAMEYLGE

SEQ ID NO: 33138 - DNA, 1167 bp, Agrobacterium tumefaciens
  CDS (1)..(1167): transl_table=11
atggacatgcagatcagccgccagcaggccgccggtggtgcaagcggccatctaaccatcgatctgggcgcattgcgggataattacctgactcttgccggtatggcccccgcatcgcaaacggccgccgtcgtgaaggccgatgcctatggtctcggcgcggatgtcgtctcacagaccctgttcgaggcgggttgccgcaatttcttcgtcgcccatatcgatgaggcgctggcactcaggctccggctttcggcaaaggcgcggattttcgtcctcaatggtctgcagcccggcaacgaaacctcctgcgccgccatggccatcaccccggttctgaactcgctggaacagatcgcgcaatggtcagctcatgccagagagctcggcaagacgctcaccgccgccgtccagatcgataccggcatgtgccgccttgggctctcccccgaagagcttgaaatcctctccgccaagcagcagttgctcgatggaattgagatcgccttcgtcatgagccatctcgcctgtgccgacgagccggatcatgtttccaatgccgcgcagctcgccgtgatgcgcaaggccgccaccgcctttcccgagacgccggtctgtttttccaattcgggcggtatttttctcggcaacgactatcataacgctctactgcgccccggcatcgcgctttatggcggtgcgccttccgctgccggccccaacccgatgaagccggtcgttcgtctcgatgtcgccgtcattcagacccgcaccgttcccgccggctcgctggttggttacggcggctcttttacggcgagcgttccgacgcggcttgcgacaatcgctgccggctatgccgatggcctgccgcgttcgctcagcaatcgcggcgcggcgtggtacaatggcgtgcgtctgccgattgccgggcgcgtttcgatggacagcatcattctcgacatatccgccctgcccgagggaacattgacgcagggcagcctcgtgcagatgatcgggcctgatcagacactggaagacatcgccgaggatgcgggcacgattgcctatgaaatcctgaccggcctcggccgccgttaccgccgcagctacattcaaccgggcatgagcccggcaaccgcttcaacatcagtcaatcacaagtga

SEQ ID NO: 33139 - protein, 388 aa, Agrobacterium tumefaciens
MDMQISRQQAAGGASGHLTIDLGALRDNYLTLAGMAPASQTAAVVKADAYGLGADVVSQTLFEAGCRNFFVAHIDEALALRLRLSAKARIFVLNGLQPGNETSCAAMAITPVLNSLEQIAQWSAHARELGKTLTAAVQIDTGMCRLGLSPEELEILSAKQQLLDGIEIAFVMSHLACADEPDHVSNAAQLAVMRKAATAFPETPVCFSNSGGIFLGNDYHNALLRPGIALYGGAPSAAGPNPMKPVVRLDVAVIQTRTVPAGSLVGYGGSFTASVPTRLATIAAGYADGLPRSLSNRGAAWYNGVRLPIAGRVSMDSIILDISALPEGTLTQGSLVQMIGPDQTLEDIAEDAGTIAYEILTGLGRRYRRSYIQPGMSPATASTSVNHK

SEQ ID NO: 33140 - DNA, 1185 bp, Bacillus subtilis
  CDS (1)..(1185): transl_table=11
atgataaagctttgccgagaagtttggatcgaagtcaatcttgatgccgttaaaaagaatttgcgagcgatccgccgtcatattccacataagagcaaaattatggctgttgtaaaagcgaacggttatggccacgggtctatagaagtggcacgccatgcactggaacacggggcgagtgagctcgctgttgccagtgtggaggaaggaatcgttttacgtaaagctgggattacagcacctatccttgtgcttggttttacatcccttagttgtgtaaagaagtcagcagcttggaatataacattatcagcatttcaggttgattggatgaaagaagcaaacgagatattggaaaaagaagcgagtgctaaccggctggccattcatattaacgtggataccggcatgggacgattaggtgtacgcacaaaggaagaacttttagaggtagtgaaagccttaaaggcaagtaaattcctcagatggacagggattttcacacatttttcgacagctgatgaaccggacacaacactcacaaagctgcagcatgaaaaattcatcagttttctcagctttttaaaaaaacaggggattgagctgcccaccgtgcatatgtgcaacacggctgcagctatcgcatttccggaatttagcgctgatatgatccgtttaggtatcggcttatatggtttatatccttcagcctatattaaacaactaaatctcgttaagcttgaacctgcgttaagtttaaaggcacgcatcgcttatgtgaaaaccatgcggacagaaccccgaaccgttagctatggtgctacatacatcgcagaacctaatgaagtaattgctacactcccgattggctatgctgacggctattctcgtgccctttccaatcgcgggtttgttcttcatcgcggaaaacgagtgccagtggcgggaagagtaacaatggatatgatcatggtcagtttaggagaaaacggtgaaggtaaacaaggagatgaagtcgtgatttacggtaagcaaaaaggagccgagatttccgttgatgaagtggctgaaatgctcaatacgattaactatgaagtcgtgtctacattaagccgccgcatccctcgtttttatataagagatggcgagatttttaaagtatcaactccagtattatacgtgtag

SEQ ID NO: 33141 - protein, 394 aa, Bacillus subtilis [sequence omitted]

SEQ ID NO: 33142 - DNA, 1188 bp, Clostridium acetobutylicum
  CDS (1)..(1188): transl_table=11
atggagaaaaaaacagtatataatatcacaaattctattgctataagtgaagaggaagctgtaaattgtaatatacctgaggttaacaaggctgaaattaatttaagtcagcttaagcgtaattttgatattattcaaggatttttaaaacctaatacaaaattcatggcggtcttaaagggagatgcctatggacatggaatacgtccaattgcaaaagaattgataaatttaaaatgtgatgtctttggggttgttagattgattgaggcttttaccctgagaaaggctggtattaaaactcccattatgctgcttgcaccaatttctccatcgcaagcagcttgggttattagatataatataattccaatggtagatagtgaagagattgtagaagcattagatcaaagtgcttcacaaaatgatactatagttaaattgcatgtaaagataaatacaggtttaaataggtatggagtaaatccagaaaatgcagtaaagtttattagagaaattcatgaaaagtatctgcatgttcaagtggatggagtatatactcactttcaggaccccgattacaaccctgattttactcataagcagattgagtgctttaataatattatatttcaacttcaaaaacaaaaattaagacctagaataattcatgcagctaattccactggcataataagatatccagaagctcattatgatatggttcggtgtggaacccttttatttggcttggagcacgaacaggggcagagaaatatgccaaaaggtataaaaacactaatggagttaaaagggcggattatgaaggttagaacaataagagcaggtgaggctggaggttatggaagtacttttgtagcaaaaaaggattcaaaagttgctatcattgcttttggatatggtgatggtatcagtagaggttggaaggaggtattagtagcaggtaagagggttccggtagtgaattattttatggatggtttaatggtagatatttcaaacatagatgaaacagtaaaggagctagatgaagctgttattgtaggaaatcaaggcgatgaaagcataacttggttagaggcttgtaaaagtcttggaagctatgtagatgagcaaatacaatgcattactgaaagagttcctaaaaaatatttttatgagaaatag

SEQ ID NO: 33143 - protein, 395 aa, Clostridium acetobutylicum
MEKKTVYNITNSIAISEEEAVNCNIPEVNKAEINLSQLKRNFDIIQGFLKPNTKFMAVLKGDAYGHGIRPIAKELINLKCDVFGVVRLIEAFTLRKAGIKTPIMLLAPISPSQAAWVIRYNIIPMVDSEEIVEALDQSASQNDTIVKLHVKINTGLNRYGVNPENAVKFIREIHEKYLHVQVDGVYTHFQDPDYNPDFTHKQIECFNNIIFQLQKQKLRPRIIHAANSTGIIRYPEAHYDMVRCGTLLFGLEHEQGQRNMPKGIKTLMELKGRIMKVRTIRAGEAGGYGSTFVAKKDSKVAIIAFGYGDGISRGWKEVLVAGKRVPVVNYFMDGLMVDISNIDETVKELDEAVIVGNQGDESITWLEACKSLGSYVDEQIQCITERVPKKYFYEK

SEQ ID NO: 33144 - DNA, 1071 bp, Escherichia coli
  CDS (1)..(1071): transl_table=11
atgacccgtccgatacaggccagcctcgatctgcaggcattaaaacagaatctgtccattgtccgccaggccgcgacgcacgcgcgcgtctggtcggtggtaaaagcgaacgcttacgggcatggtattgagcgtatctggagcgcgatcggggccaccgatggctttgcattgcttaacctggaagaggcaataacgttacgtgagcgcggctggaaaggaccgatcctgatgctggaaggatttttccatgctcaggatctggagatttatgaccagcaccgcctgaccacctgcgtacacagcaactggcagctcaaagcactgcaaaatgcgcggctaaaagcaccgttggatatttatcttaaagtgaacagtgggatgaatcggttgggcttccagcccgatcgcgtgcttaccgtctggcagcagttgcgggcaatggcgaatgttggcgaaatgaccctgatgtcgcattttgccgaagcggaacatcctgatggaatttccggcgcgatggcgcgtattgagcaggcggcggaggggctggagtgtcggcgttcgttgtccaattcggcggcgactctgtggcacccggaagcgcattttgactgggttcggcctggcattattttgtatggcgcttcgccgtccggtcagtggcgtgatatcgccaataccggattacgtccggtgatgacgctaagcagtgagattattggtgtccagacgctaaaagcgggcgagcgtgtgggctacggcggtcgctatactgcgcgcgatgaacagcgaatcggcattgtcgccgcagggtacgccgacggttatccgcgccacgcgcctaccggtacccctgttttagtggacggcgtgcgcaccatgacggtggggaccgtctcgatggatatgctagcggtcgatttaacgccttgcccgcaggcgggtattggtacgccggttgagctgtggggcaaggagatcaaaattgatgatgtcgccgccgctgccggaacggtgggctatgagttgatgtgcgcgctggcgctacgcgtcccggttgtgacggtgtaa

SEQ ID NO: 33145 - protein, 356 aa, Escherichia coli [sequence omitted]

SEQ ID NO: 33146 - DNA, 1071 bp, Klebsiella aerogenes
  CDS (1)..(1071): transl_table=11
atgacccgtccggtagtggccagcatcgacctgctggccttgcggcagaatttacagatagtgcgtcgcgcggcccccgggtcgcgcctgtgggcggtggacaaggacaacgcctacggacacggtgtggcgcgcgtatggagtgcgttaagcgcggcggatggtttcgccttgctcaacctggaagaggcgatcctgctgcgcgagcagggctggaaaggcccgatcctgctgctggagggcttcttccatgccgatgagctggcggtgctggatcaatatcgtttacccaccagcgtccacagcaactggcagattaaggccctgcaacaggcgaagctgcgcgcgccgctggatatctatctcaaggtgaacagcggcatgaaccggctgggctttatgcctgagcgggtccacaccgtctggcagcagctgcgggcgataagcaacgtcggcgagatgacgctgatgtcgcacttcgcggaggcggagaacccgcagggaattgtcgagccgatgcgccgtatcgaacaggcggcggaggggctggattgcccgcgctcgctggccaactcggcggcgaccctctggcatccggaagcgcattttgactgggttcgtccaggcatcgtgctgtatggcgcgtcgccttccgggcagtggcaggacatcgccaacaccgggctgaagccggtcatgacgctgcgcagcgagatcatcggcgtgcagaacctgcgtcccggcgaggcgattggctatggcggcctgtaccgcaccacccaggagcagcggatcggcatcgtcgcctgcggctatgccgacggctatccgcgggtggcgccgagcggcacgccggtgctggtggatggcgtacgcaccactaccgtgggacgcgtatcgatggatatgctggcggtcgatttaacgccttgtccgcaggccgggatcggcgcgccggtcgagctgtggggcaaagagattaaaatcgacgacgtggcggccagcagcggcaccgtcggctatgagttgatgtgcgccctggcgccgcgggtgccagttgtgaccctgtaa

SEQ ID NO: 33147 - protein, 356 aa, Klebsiella aerogenes
MTRPVVASIDLLALRQNLQIVRRAAPGSRLWAVDKDNAYGHGVARVWSALSAADGFALLNLEEAILLREQGWKGPILLLEGFFHADELAVLDQYRLPTSVHSNWQIKALQQAKLRAPLDIYLKVNSGMNRLGFMPERVHTVWQQLRAISNVGEMTLMSHFAEAENPQGIVEPMRRIEQAAEGLDCPRSLANSAATLWHPEAHFDWVRPGIVLYGASPSGQWQDIANTGLKPVMTLRSEIIGVQNLRPGEAIGYGGLYRTTQEQRIGIVACGYADGYPRVAPSGTPVLVDGVRTTTVGRVSMDMLAVDLTPCPQAGIGAPVELWGKEIKIDDVAASSGTVGYELMCALAPRVPVVTL

SEQ ID NO: 33148 - DNA, 1179 bp, Oceanobacillus iheyensis
  CDS (1)..(1179)
atgattcaaggaagttatcgtgacacatggacagaagtatcattagatgccatccatcacaatgtaacggcgtttaaaaaccatattgatcatcatacaaagttaatggcggttgtaaaagcggatggatacggacacggtgctgtagaggttgcacaggaggctttaacagcaggcgccgattatctagctgttgctatcttagacgaagctattcaattacgagatgctggaattgatgcaccgttgcttgtacttggatacacacatcccgatggattaaaaacagccattgaacagcaaattacactcacagttttcacaaaagaagatgcagaacaagtgaaaatagctgctgagcttctgcaaaagacagctcgcatacacctaaaaatcgaatctggtatgaatcggatcggcatcgctacgaaagaagaagcagttgaaatagctaaagcacttcattcttcttttgttatgttagaaggtgcatttacacactttgccgatgcggataatacagatcccacttatacagagatgcaatttcaccgttttaatcagattatttctcatttaagaacgcattgccatatccctattgtacattgctgtaatactgctgcgacaatagcttacccggatatgcatttggatatggttcgtgttggtatcggcatctatggattatacccagaaacacatttgaaagaattgattgatttaaaacaagcaatgagtctaaaaacaaaacctgtttatataaaaacagttgatcaggacaccgcaattagttatggtcttacattcacgacagagcgaaagagcaccattgcaacaatgccaattggttatgcagatggcttttctcgactactgtctaatcgaggagatgtgattgtacatgccggccgcgctcctattgttggacgaatttgtatggatcaatcgatgatcgatgttacggacgtggagaatgttggactagatgatgtaattaccatttttggtgagcctaccgaaggatatatcgcgatggaagaagtagctaatctgatggggacgatacattatgaaacagcatgcctaattggaaagcgtgttccacggatatatatgaggcaaagtgaagcagttaattataaaggactagtagagaaagaacctgttacgtcttag

SEQ ID NO: 33149 - protein, 392 aa, Oceanobacillus iheyensis
MIQGSYRDTWTEVSLDAIHHNVTAFKNHIDHHTKLMAVVKADGYGHGAVEVAQEALTAGADYLAVAILDEAIQLRDAGIDAPLLVLGYTHPDGLKTAIEQQITLTVFTKEDAEQVKIAAELLQKTARIHLKIESGMNRIGIATKEEAVEIAKALHSSFVMLEGAFTHFADADNTDPTYTEMQFHRFNQIISHLRTHCHIPIVHCCNTAATIAYPDMHLDMVRVGIGIYGLYPETHLKELIDLKQAMSLKTKPVYIKTVDQDTAISYGLTFTTERKSTIATMPIGYADGFSRLLSNRGDVIVHAGRAPIVGRICMDQSMIDVTDVENVGLDDVITIFGEPTEGYIAMEEVANLMGTIHYETACLIGKRVPRIYMRQSEAVNYKGLVEKEPVTS

SEQ ID NO: 33150 - DNA, 1074 bp, Pseudomonas aeruginosa
  CDS (1)..(1074): transl_table=11
atgcgccccgcccgtgccctgatcgacctgcaagcccttcgtcacaactatcggctggcccgcgaggccaccggcgcccgtgcgctcgcggtgatcaaggcggacgcatacggccacggcgcggtgcgctgtgccgaagcgctggcggccgaggccgatggcttcgccgtggcctgcatcgaggagggcctggagctgcgcgaggccggtatccgccagccgatcctgctgctggagggcttcttcgaggcgtccgagctggagctgatcgtcgcccacgacttctggtgcgtggtgcattgcgcctggcaattggaggcgatcgaacgcgccagcctggcccgcccgctgaacgtctggctgaagatggattcgggcatgcaccgcgtcggcttcttccccgaggacttcagcgccgcccacgagcgcctgcgggccagcggcaaggtggcgaagatcgtgatgatgagtcacttctcccgcgccgacgaactggattgcccgcgcaccgaggaacagctcgccgccttcgcggccgcgagccagggcctggaaggcgagatcagcctgcgcaattcgccagccgtgctcggctggccgaaggtgcccagcgattgggtacgtccgggcatcctgctctacggagccacgccgttcgagcgcgcacatccgctggccgaccgcttgcgcccggtgatgaccctagaatcgaaggtgatcagcgtccgcgacctgccggccggcgaaccggtcggctacggcgcgcgctacagcaccgagcgtagccagcgcatcggcgtggtcgccatgggctacgccgatggctatccgcgccacgccgccgacggcacccttgtgttcatcgacggcaagccggggcgcctggttggccgggtatcgatggacatgctcaccgtcgaccttaccgaccatccccaggccgggctgggcagccgggtcgaactatggggcccgaacgtgccggtcggcgccctggcggcgcagttcggcagcattccctaccagctgctgtgcaacctgaaaagggtgccgcgcgtctattccggggcttga

SEQ ID NO: 33151 - protein, 357 aa, Pseudomonas aeruginosa
MRPARALIDLQALRHNYRLAREATGARALAVIKADAYGHGAVRCAEALAAEADGFAVACIEEGLELREAGIRQPILLLEGFFEASELELIVAHDFWCVVHCAWQLEAIERASLARPLNVWLKMDSGMHRVGFFPEDFSAAHERLRASGKVAKIVMMSHFSRADELDCPRTEEQLAAFAAASQGLEGEISLRNSPAVLGWPKVPSDWVRPGILLYGATPFERAHPLADRLRPVMTLESKVISVRDLPAGEPVGYGARYSTERSQRIGVVAMGYADGYPRHAADGTLVFIDGKPGRLVGRVSMDMLTVDLTDHPQAGLGSRVELWGPNVPVGALAAQFGSIPYQLLCNLKRVPRVYSGA

SEQ ID NO: 33152 - DNA, 1146 bp, Rhizobium loti
  CDS (1)..(1146)
atgaacgacgccgtcaatccgactgctgcgaaaaccgtcaccggttggccggtcagcgaggccgcggccggcgcgatcctgaccatcgatctcggcgcgatccgtgaaaactaccggcggctgaaggcgctgctgggcggcgtgcactgcgccggcgttgtcaaggccaatggctacggccttggcgcggccaaggtggcggcggcactgacccgggaaggctgtgacatcttcttcgtcgcgctgctggccgaaggcatcgcgctgcgcaaggcggtcgggaccggaccggacatctacgtgctgaacgggctgccgcctggctccgagccggaagcggtggcggctggcctttgcgcggtcatcaatagtggcgcgcagttgaaagcctggcgcgcggcggtgcacgatgccggtcgccggctgccggcggccatccaggtcgacagcggcatgtcgcggctcggcatggcgccggccgaagtcgaggcgctggccggggatagcagcgcgttcgacggcatcgacatcaaatatgtcatgagccatctggcctgcgccgacgagccgcgccatccggccaacgaacagcagaggctggccttcgaacggctgcgcgccatgctgccccgggcgcccgcctcgctcgccaattcctccggcatctttctcgggccgtcctaccatcacgatctcgctcggcccggagccgcgctctacggcatcaacccgacgccgggcgagcccaacccgatgttgcccgtggtgtggctgcaggccaaggtggcgcagacgcgccgcatcgaaaagggcgccggcatcggctatggtcacagctatcacgcggacggtccgctgagcctggcgacgatttcgttcggctatgcggatggctggctgcgccgctccgcttcggcggcctggttcgaaggcgtgcgcctgcctttcctcgggcgtgtgtcgatggattcgattattctcgacatctccgctttgccgcccggcaggctgcgcgagggcgatctggtcgagctgctcggtccctcgcagagcgtcgacgacgccgccggccatgccggcaccatcggctatgaaatcctggccagtctcggcccgcgctttcaccgccactatgtcggcggctga

SEQ ID NO: 33153 - protein, 381 aa, Rhizobium loti
MNDAVNPTAAKTVTGWPVSEAAAGAILTIDLGAIRENYRRLKALLGGVHCAGVVKANGYGLGAAKVAAALTREGCDIFFVALLAEGIALRKAVGTGPDIYVLNGLPPGSEPEAVAAGLCAVINSGAQLKAWRAAVHDAGRRLPAAIQVDSGMSRLGMAPAEVEALAGDSSAFDGIDIKYVMSHLACADEPRHPANEQQRLAFERLRAMLPRAPASLANSSGIFLGPSYHHDLARPGAALYGINPTPGEPNPMLPVVWLQAKVAQTRRIEKGAGIGYGHSYHADGPLSLATISFGYADGWLRRSASAAWFEGVRLPFLGRVSMDSIILDISALPPGRLREGDLVELLGPSQSVDDAAGHAGTIGYEILASLGPRFHRHYVGG

SEQ ID NO: 33154 - DNA, 1119 bp, Rhizobium leguminosarum
  CDS (1)..(1119)
atggtttcccgcacacgcaccgctacgatcgcgcagggagccacgggctatctgatgatcgatcttgccgccctcggccgtaactatcgcaagctcgtatcgatgctggcaccggtccgcgccggcgccgtcgtcaaggccgatgcctatggtctcggcgccgagcgggtcgcgagaacgctttacagtgaaggttgcaggcatttcttcgtcgcccaatttgtcgaggccgtgaggctcagaccggcccttgcgcacgacgcccagattttcgtgctgaacggcttgcagccgggcaacgagatcgcctgcgccgagatgggcattgtcccggttctcaattcgctggcgcagtggcggcagtggtcggcggctgcgcgcattctgaagcgctgcctgccagccgtcctccaattcgacaccgggatgtcgcggctcggttttccccgggaagagcgaagagagctggcggcggctcttcgcgatggcagcaatgtcgaaatcctgttcatcatgagccatctggcttcggccgatgacatgggcagcgagcagaacggcgaacagtttgccgagatgtcccgcatcgccgacgaatttcccggcttcgacatttccttcgccaattccggcggcgttttcctgggcgaggcctattacggcgtactcgcccgccccggcatcgcgctttatggcggcgctccgaacgccggcgagaagaacccgatggagccggtcgtcagcctcaatgtcgccgttgtgcagacgcgcaccgtaccggcgggtgcgaaggtcggctatggcggcgcgcatgtcacgcaacgggaaacgcgtctcgccaccattgccgccggctatgctgatggcctgccgcgatgcctcagcgaccgcggcgccgtctatttcaagggcgtccgcctgccgatcgtcggccgcgtgtcgatggacagcacgaccgtcgacatcacagcactgcccgaaggggcgctgaccttcggcagtctcgtcgaagtgctcggccgccatcagacgcttgaggacatcgcgcgcgatgccggcaccatttcttacgaaatcctaactggcctgggcgatcgttacgacaggcaatatcgctaa

SEQ ID NO: 33155 - protein, 372 aa, Rhizobium leguminosarum
MVSRTRTATIAQGATGYLMIDLAALGRNYRKLVSMLAPVRAGAVVKADAYGLGAERVARTLYSEGCRHFFVAQFVEAVRLRPALAHDAQIFVLNGLQPGNEIACAEMGIVPVLNSLAQWRQWSAAARILKRCLPAVLQFDTGMSRLGFPREERRELAAALRDGSNVEILFIMSHLASADDMGSEQNGEQFAEMSRIADEFPGFDISFANSGGVFLGEAYYGVLARPGIALYGGAPNAGEKNPMEPVVSLNVAVVQTRTVPAGAKVGYGGAHVTQRETRLATIAAGYADGLPRCLSDRGAVYFKGVRLPIVGRVSMDSTTVDITALPEGALTFGSLVEVLGRHQTLEDIARDAGTISYEILTGLGDRYDRQYR

SEQ ID NO: 33156 - DNA, 1071 bp, Salmonella typhimurium
  CDS (1)..(1071): transl_table=11
atgacccgccctatacaggccagccttgatttacaggtaatgaaacaaaatttggctattgtgcgccgggcggccccagaggcgcgcgtctggtcggtagtgaaagccaacgcctacggccacggtattgaacgcgtctggagcgcgctgggcgccacagatggtttcgctatgctcaaccttgaagaggcgattaccctgcgtgagcgcgggtggaaagggccgatattgatgctggaggggtttttccatgcgcaagacctggaggcgtatgacacttatcggctgaccacctgcatccacagtaactggcagttgaaagcgctgcaaaatgcgcggcttaacgcgccgctggatatctatgtcaaagtcaacagcggcatgaaccgactcggttttcagcctgagcgggcgcagaccgtctggcagcaattgcgggcaatgcgcaatgtcggtgaaatgaccctgatgtcacattttgctcaggccgatcatccggaaggtatcggggaggcgatgaggcgtattgcgctggcgacggaaggtcttcagtgtgcatactcgttatcaaattcggcagcgacgctgtggcatccccaggcgcattatgactgggtcaggccgggcattattttgtacggcgcgtcgccgtcaggacagtggcgggatattgccgataccggactaaaacctgtgatgacgctgagtagcgaaattattggcgtgcagacgctgagcgcgggtgaaagggtaggctatggcggagggtattctgtgactcaggaacaacgcattggcatcgtcgcggcgggttatgccgatggctatccacgccatgcgccgaccgggacgcctgtgctggtggacggtatccgtaccagaacagtaggcaccgtttcaatggatatgctggcggtggatttgacgccgtgtccgcaggcgggaatcggcacgccggttgaattatggggcaaagaaattaaggtcgatgatgtcgcttctgcggcaggcacgctgggctatgagctactgtgcgccgtagcgccgcgtgtgccgtttgtgacaacgtaa

SEQ ID NO: 33157 - protein, 356 aa, Salmonella typhimurium
MTRPIQASLDLQVMKQNLAIVRRAAPEARVWSVVKANAYGHGIERVWSALGATDGFAMLNLEEAITLRERGWKGPILMLEGFFHAQDLEAYDTYRLTTCIHSNWQLKALQNARLNAPLDIYVKVNSGMNRLGFQPERAQTVWQQLRAMRNVGEMTLMSHFAQADHPEGIGEAMRRIALATEGLQCAYSLSNSAATLWHPQAHYDWVRPGIILYGASPSGQWRDIADTGLKPVMTLSSEIIGVQTLSAGERVGYGGGYSVTQEQRIGIVAAGYADGYPRHAPTGTPVLVDGIRTRTVGTVSMDMLAVDLTPCPQAGIGTPVELWGKEIKVDDVASAAGTLGYELLCAVAPRVPFVTT

SEQ ID NO: 33158 - DNA, 1113 bp, Schizosaccharomyces pombe
  CDS (1)..(1113)
atgaggggggctagagctgttatcgatttgcgcgctattggttacaattacaatctcattagagaattactagacgaaaaaaatccagacgctcacatcttatgcattttaaaggcaaatgcttatggacatggagccgttgaagttgctcaattccttgctaaatattgttcagctgagggttttggcgtcgcatccattgaagaagctctggagttacggcttagcggaatacaaaatagaattcttttgttggaaggcttttttacagatgaagacgaactaagcctgattgataaatataatttttctataactattcactgtgaagaacagttaaaaagttttatgaattatccatttaaaaaaccggttgaagttcacttaaaacttgattctggaatgaatcgacttggatttactcctgcagaatatgctgataaatatcggttactaaaaaatcacaaaaatgttagtggtattgtcaaagccactcactttgcattcgcggatatccctgaaaagtccgaatacacattaaaacaatggagaatttttgaaaaagctgccggctgcttacctgatccacttagtgctggaggtggagtaattgtagtgggttggttaaatacaattcatatggattggttacgcactggctctatgctatacggacttgatccatatgatctcgacgctaaggctcctgaattacctaaaccgttgattccggctatgaagttaatgtctactattgtttgtgtaaagcacgttgaaaaagatcaacctattggttatggtggtgcatatgtgacaactcgtgattcgcttataggcgttgttgctataggctatggtgatggatttcctcaagttagaaatggatgtcccgtaataataaatggaaagagagtaccaacagtaggaaaagtttgtatggatatgctggctattgacgttacagacgtcccggatgttaaaaggggtgatgatgttgttttgtgggggaatccagaactgacaatagaagaagtatcaactttttctaacgaaaacccgtttgaaatcattacaggacttaccagacgtgtaccattacagtatacgttctaa

SEQ ID NO: 33159 - protein, 370 aa, Schizosaccharomyces pombe
MRGARAVIDLRAIGYNYNLIRELLDEKNPDAHILCILKANAYGHGAVEVAQFLAKYCSAEGFGVASIEEALELRLSGIQNRILLLEGFFTDEDELSLIDKYNFSITIHCEEQLKSFMNYPFKKPVEVHLKLDSGMNRLGFTPAEYADKYRLLKNHKNVSGIVKATHFAFADIPEKSEYTLKQWRIFEKAAGCLPDPLSAGGGVIVVGWLNTIHMDWLRTGSMLYGLDPYDLDAKAPELPKPLIPAMKLMSTIVCVKHVEKDQPIGYGGAYVTTRDSLIGVVAIGYGDGFPQVRNGCPVIINGKRVPTVGKVCMDMLAIDVTDVPDVKRGDDVVLWGNPELTIEEVSTFSNENPFEIITGLTRRVPLQYTF

SEQ ID NO: 33160 - DNA, 1086 bp, Staphylococcus aureus
  CDS (1)..(1086)
atgacagcaacatggtctgtaaataagaaaatatttttacaaaatgcaatcacagtcaaaaacaatcagccattaatggcagttgttaaaaataatgcatatcactatgacctagaatttgctgtaactcagtttatccatgcaggtatagatacatttagcacaacatcactacgagaagcaattcaaattagacaacttgctccagatgcaacaatctttttaatgaatgcagtttacgagtttgatttagtccgtgaacatcaaatacacatgactttgccgtcgttgacatattactataaccataaaaatgatttagctggtattcatgttcacttagaatttgaaaatttattacatcggtctggatttaaagatttaaacgaaattaaagaagtattgaaagatcaccatcataatcaaaatgcaaaaatgattattagtggtttatggacccattttggatatgctgatgaattcgatgtgtcagattataatgttgaacgttcacaatggatggaaattgttgaagcacttttatctgaaggttatcagttcgacctaatccatgctcaaaatagtgcgagtttttatcgggaaggacaaatattactaccccaccatacacatgcgcgtgtaggtattgcgttatacggttcaagaccatatagttcactgaatcaacatgatatagttcagtcattaactttaaaagcacatgttattcaagtgcgcgaagtacaagctggtgattattgcggttatagctttgcctttgaagtgactaaaaacaatacaaaattagctgtagttgatatcggttatggcgatggaattttaagaactcgtgctaaacatgaagcacttatcaatggtaaacgctacccgatacgtgcattaatgatgagccatatgtttgttgaagtagatggcaatgtacatgcacaagatgaagttattctttataataatgatatccgcatcgatgaatatacctttaaaggtgttggtgcaaattctgaacaattaagtgctatgaatcatgattctttaaaaaaggagtacatttcaaatgactgttaa

SEQ ID NO: 33161 - protein, 361 aa, Staphylococcus aureus
MTATWSVNKKIFLQNAITVKNNQPLMAVVKNNAYHYDLEFAVTQFIHAGIDTFSTTSLREAIQIRQLAPDATIFLMNAVYEFDLVREHQIHMTLPSLTYYYNHKNDLAGIHVHLEFENLLHRSGFKDLNEIKEVLKDHHHNQNAKMIISGLWTHFGYADEFDVSDYNVERSQWMEIVEALLSEGYQFDLIHAQNSASFYREGQILLPHHTHARVGIALYGSRPYSSLNQHDIVQSLTLKAHVIQVREVQAGDYCGYSFAFEVTKNNTKLAVVDIGYGDGILRTRAKHEALINGKRYPIRALMMSHMFVEVDGNVHAQDEVILYNNDIRIDEYTFKGVGANSEQLSAMNHDSLKKEYISNDC

SEQ ID NO: 33162 - DNA, 1167 bp, Thermoanaerobacter tengcongensis
  CDS (1)..(1167): transl_table=11
atgtttgatgagataaggcccacaagggtagaggtaaatttggacagtatagtccataattttagggaaataaagagggtggttggagatagggttaaagtgatgggggttgtaaaggccaatgcgtatggccatggggcgtatcacgttgcgaaagcattagtagaaaatggtgttgattatcttgctgttgctacagtagaagaggcattggaattgagaagctacgggattactgcccctgtcctaattttgggttacacccctttaagccaggcaggagaggctgtggagaaagatgtgacttttaccgcctttgatttaaagtatgtaaaggagttaggggaaatagccagtaggaaaggaaaaaaagcaaaaattcatgtaaaaattgatacagggatgggacggatagggtatactgattttgatttagcagaaagagaaattgaagagatgtcaaagcttgaagggattgaattggaaggcatatttagtcattttgctacttccgacgaaaaagataaggactatgcgagggaacagtttgaaagatttgcggatatgctaaagcgtttagaaaaaagaggagtaaatatcactttgaagcatattgctaacagcggagctataactgatttaaattatgcatatcttgacatggtaaggcccggaataactctttacggcagttacccttctaatgatgttaataaaattttagacttaagacctgccatgaactttaagaccaaaatagtctacataaaagaagtgccggaaaatacttctataagctatggaagaacttttataactaaaaggcctagcaaaatagctactctaccgataggatatgcggatggactcaacagacttctttcaaataaccatgaagtgctggttagaggtaaatatgtgccgatagtaggtagagtatgcatggaccagaccatgatagatgtgacagaagtagagggagtagaggtaggagacgaggtggtcatatttggagagcaggaaggaaagaggataacggcagatgatatagctaaaaaacttcgcactattcctcacgaagtatattgtggaatatctagaagggtacctagaatatatatttacagaggagaagttttcgatgtaaaaaattatttaaaaatttaa

SEQ ID NO: 33163 - protein, 388 aa, Thermoanaerobacter tengcongensis [sequence omitted]

SEQ ID NO: 33164 - DNA, 1179 bp, Vibrio cholerae
  CDS (1)..(1179)
atgccttctttctctctctctgctgcgccattacacatcgacaccgctttaccggatgccgctcaaattcagcaaagtaattcttggctggagattagcttaggccaattccaaagcaacattgaacaattcaaatcacacatgaacgccaacaccaaaatttgcgccatcatgaaagccgacgcttacggtaacggtattcgtggtttaatgccgaccattatcgcgcaaggcattccttgtgtgggggtggcaagtaatgcagaggcgcgtgcggtgcgtgaaagtggctttaaaggtgaactgatccgtgtgcgctctgccagcctaagtgaaatgtcctcggcactcgatctcaatatcgaagagctgattggtacccaccaacaagccctcgatctggcggagcttgccaaacaaagtggtaaaacgctcaaagttcacatcgcgctgaatgacggcggcatgggccgtaacggcattgatatgaccacggaagccggcaagaaagaagccgtctctattgcgactcaaccttcgttgagtgtcgttggcattatgacccacttcccgaattacaatgcggacgaagtgcgcgcaaaactggctcaattcaaagagagctcaacttggctaatgcaacaagccaatttgaaacgtgaagagatcacactgcatgttgcgaactcttacaccgcgctcaatgtgccagaagcacaactggacatggttcgtccaggtggcgtgttgtttggtgatttgccaaccaaccctgaatacccatcgattgtttctttcaaaacacgtgtgtcttcgctgcaccatttgccaaaggactcaactgtgggttatgacagtacttttactaccagccgtgacagtgtgctggcgaacctgcctgtgggttattctgatggttacccgcgcaaaatgggcaataaagccgaagtgctgatcaatggacaacgcgccaaagtcgtgggagtgacatcgatgaacaccactgtggttgatgtgaccgagattaagggcgtgctccccggtcaagaagtggttctgtttggtcagcaacagaagcaaagcatcgcggtcagtgagatggaaaacaacgctgagctgattttccctgagttgtatacgctgtggggaaccagtaacccacgtttctacgtgaaataa

SEQ ID NO: 33165 - protein, 392 aa, Vibrio cholerae
MPSFSLSAAPLHIDTALPDAAQIQQSNSWLEISLGQFQSNIEQFKSHMNANTKICAIMKADAYGNGIRGLMPTIIAQGIPCVGVASNAEARAVRESGFKGELIRVRSASLSEMSSALDLNIEELIGTHQQALDLAELAKQSGKTLKVHIALNDGGMGRNGIDMTTEAGKKEAVSIATQPSLSVVGIMTHFPNYNADEVRAKLAQFKESSTWLMQQANLKREEITLHVANSYTALNVPEAQLDMVRPGGVLFGDLPTNPEYPSIVSFKTRVSSLHHLPKDSTVGYDSTFTTSRDSVLANLPVGYSDGYPRKMGNKAEVLINGQRAKVVGVTSMNTTVVDVTEIKGVLPGQEVVLFGQQQKQSIAVSEMENNAELIFPELYTLWGTSNPRFYVK

SEQ ID NO: 33166 - DNA, 1227 bp, Vibrio vulnificus
  CDS (1)..(1227): transl_table=11
atgaactttaaaaagacccttctatccattgccatcgctagcgccagtctcactccggctttctcttacagcgcacctctcttactcgacaacacggttcaccaaaccagccaaatcgctggggccaatgcttggctcgaaatcagcctcggccaattcaaaagcaacattgaacaatttaaatcgcacattgccccacaaaccaaaatttgtgcggtgatgaaagccgacgcttatggcaacggaattcgtggtttgatgccaaccattcttgaacaacaaattccctgcgtggctatcgccagtaatgcggaggctaaactcgtccgagaaagtgggtttgaaggcgagttaattcgcgtgcgctccgctagcacaagtgaaattgaacaggcactctctcttgatatcgaagagttaattggcagtgagcaacaagctcgtgagttagcaagcttggcagaaaagtacagcaaaaccattaaagttcaccttgctcttaatgacggtggcatgggccgtaatggtattgatatgagtaccgaacgtggaccaaaagaagcagtcgccattgcaacgcacccttcggttgccgtggtcggtatcatgacccatttcccgaattacaatgcagaggatgtacgaacaaagctaaaaagctttaaccaacatgcacagtggttaatggaaagtgcagggctaaaacgtgaagagatcaccctacatgtggccaattcctacaccgcgttgaatgtccctgaagcgcagttggatatggttcgcccaggtggtgtgctctatggtgatctcccgaccaaccctgagtacccttctattgtggcgttcaaaacccgcgttgcttcacttcattcgcttccggcaggcagcaccgtgggttacgacagcacgtttaccacagcaaatgacgcagtgatggcaaacctcacggtcggctattccgatggctacccacgaaaaatgggcaacaaagcgcaagtgctgatcaacggccaacgcgccaatgtggtgggcgttgcttcaatgaatactacgatggtggatgtgtccaatatcaaaggcgtgttacccggcgatgaggtgacgctctttggtgctcaaaaaaaccagcacatctctgtcggtgaaatggaagaaaacgccgaggtaattttcccagagctttacaccatttggggcaccagcaacccgcgcttctatgtgaagtga

SEQ ID NO: 33167 - protein, 408 aa, Vibrio vulnificus
MNFKKTLLSIAIASASLTPAFSYSAPLLLDNTVHQTSQIAGANAWLEISLGQFKSNIEQFKSHIAPQTKICAVMKADAYGNGIRGLMPTILEQQIPCVAIASNAEAKLVRESGFEGELIRVRSASTSEIEQALSLDIEELIGSEQQARELASLAEKYSKTIKVHLALNDGGMGRNGIDMSTERGPKEAVAIATHPSVAVVGIMTHFPNYNAEDVRTKLKSFNQHAQWLMESAGLKREEITLHVANSYTALNVPEAQLDMVRPGGVLYGDLPTNPEYPSIVAFKTRVASLHSLPAGSTVGYDSTFTTANDAVMANLTVGYSDGYPRKMGNKAQVLINGQRANVVGVASMNTTMVDVSNIKGVLPGDEVTLFGAQKNQHISVGEMEENAEVIFPELYTIWGTSNPRFYVK

SEQ ID NO: 33168 - DNA, 1161 bp, Anabaena sp
  CDS (1)..(1161)
atggcttctcatcaacaatgtgatacctatgcttggttttcacaacgcgcttgggtagaaattgacctagaggcgttgtcgcacaatgtccagcaacttaagcagtttttatcaccgcgtactcagttaatggcagtagttaaagcagatgcttatggtcatggtgctgtgacggtggcacagacagcattacaagcgggggctagttgtttgggtgtcgccactgttccagagggtattcaattgcgagaggccggtattcaagcgcccattttgattttaggggctacccatacaccagaacaaattcaggcgatcgctcaatggcaactccaagcaactattggtagtcccaaacaagctttaatattttccaataccttggaaaccatccagcatgattctcctatacctgtacatattaagttagatacgggtatgtctagactgggtactaactggcaacaagcaggggagtttgtacagttagtagagcgtttaccccatttggatattgctagtgtttactcccacctagcgaccgcagatagcccagatccagggattatggaagaacagcatagaagatttgaggaggcgatcgctcaaatcaaaactttgggtattaaaattcctagcctgcatttagcaaactcggctgcaaccctggcagatccgagattacactatgatatggtacgggtaggtttagccgtgtatggactctatccagcccctcatttacagaataaaatcagcctaaaaccagtcatccaagtccaagcgcgaattacccacgtcaaaacaattgctgccggtactggcgtaagctacggacaccaatttatagcccctcatgaaatgcgccttgccgttgtgagtattggttacgctgatggcgtaccgcgtaatctatccaacaaaatgcaggttttaattcgtggtcaacgagtgccacaaatcggtgctatcacgatggatcagttgatgatagatgctagtgctttaccagacctacaagaaggggaaattgtcaccttacttgggaaacaaggaaaggaaaaaatcacagccgatgattgggcagaagcgttaaacactatttcctgggaagttctttgtggatttaaacatcgcctacctcgtgtaggcgtgatgtga

SEQ ID NO: 33169 - protein, 386 aa, Anabaena sp
MASHQQCDTYAWFSQRAWVEIDLEALSHNVQQLKQFLSPRTQLMAVVKADAYGHGAVTVAQTALQAGASCLGVATVPEGIQLREAGIQAPILILGATHTPEQIQAIAQWQLQATIGSPKQALIFSNTLETIQHDSPIPVHIKLDTGMSRLGTNWQQAGEFVQLVERLPHLDIASVYSHLATADSPDPGIMEEQHRRFEEAIAQIKTLGIKIPSLHLANSAATLADPRLHYDMVRVGLAVYGLYPAPHLQNKISLKPVIQVQARITHVKTIAAGTGVSYGHQFIAPHEMRLAVVSIGYADGVPRNLSNKMQVLIRGQRVPQIGAITMDQLMIDASALPDLQEGEIVTLLGKQGKEKITADDWAEALNTISWEVLCGFKHRLPRVGVM

SEQ ID NO: 33170 - DNA, 1017 bp, Aquifex aeolicus
  CDS (1)..(1017): transl_table=11
atgcccagagctattctggagataaacagtgaaaggataagacacaacgtcaagaagttatcggagttttccgggaaaaaggttatagcggttataaaggcggacgcctacggtataggttctatacaaatggcaaaaatactagagcctattgaagaagtggacgctttcgcggtagcctgcgttgaagagggggttgaactcaggaaaatgggaataaaaaaggaaatactcatactgggaggagtactgaaggatgaagtccctttagtagaggagtacttccttacccccgttgtttcggatattgagcacctgagagctataggaaacagggatataaagtttcacgtaaagtacgacacgggaatgggaagacttgggtttttgaacgaagttatacacgacccgagggtggaagggataatgagtcacctctcgagcccggcggacgaagaattttccaaactccagataaagaagtttgaggagatagttaagaagtacacaaaagttgagaaaatccacatggagagttcagcaggtgttgtgtacagagtgccttttaccactcacataagggtagggcttgcaatgtacggcgaaaaacccctgaagaattaccccgttgatataaaacccgcactcactcttaaagctaagttaatatccgtaaaggaacttcctgaaaattatccggtatcttacagcaggacgtacgtaactaagaaaaaaacgaaaacaggtgtagttgccttcgggtacgcggacggactcatgaaaacactgtccaacaggagttatttgctttataagggagaaaagctaccaattttcgggaacattaccatggacatgacaatagtggacctgaaaaatacggacgcaaaggtaggggattgggtttacgtggtaaacgaagaaagaacctttacggaacttgcaagagaagcgggaacgataccctatgagctcatgtgcaacttatcaaaaaggattaaaagagtcgtagtgtag

SEQ ID NO: 33171 - protein, 338 aa, Aquifex aeolicus
MPRAILEINSERIRHNVKKLSEFSGKKVIAVIKADAYGIGSIQMAKILEPIEEVDAFAVACVEEGVELRKMGIKKEILILGGVLKDEVPLVEEYFLTPVVSDIEHLRAIGNRDIKFHVKYDTGMGRLGFLNEVIHDPRVEGIMSHLSSPADEEFSKLQIKKFEEIVKKYTKVEKIHMESSAGVVYRVPFTTHIRVGLAMYGEKPLKNYPVDIKPALTLKAKLISVKELPENYPVSYSRTYVTKKKTKTGVVAFGYADGLMKTLSNRSYLLYKGEKLPIFGNITMDMTIVDLKNTDAKVGDWVYVVNEERTFTELAREAGTIPYELMCNLSKRIKRVVV

SEQ ID NO: 33172 - DNA, 1026 bp, Aquifex pyrophilus
  CDS (1)..(1026): transl_table=11
atgagaagggcggttcttgagatactggaggagagaataatacacaatgtaaaggagatacacaggttcagcgggaagaggataatagctgtcgttaaggcaaacgcatacgggataggggtgagggaggtatcaaggatacttgaagggcttgaggaggttgatgcctttgcggttgcctgcacccaggaaggtgttgaactgagggaatgcggaattaagaagaagattctcatacttggaggcatacttgaggaggatgtaaagctccttgaggagtatgatttaacgcccgttatttcggaccccgaacaccttaaggttctaaaagacagaaatataaagtttcacgtaaagtacgatacggggatgggaaggctcggatttacaaacgaaattataaaggacccaagagttgagggagtcatgtcccacttctcaagccctgcggacagaaatttttccaaactacagataaagcgttttgaggaaattcttaagaattacgaaaaggttaaatacatacaccttgagagttccgcaggtctcatttacagggttccttttacaacccatgtgagagtaggacttgcgatttatggagaaaaacctctgaaggattacccccttgaggttaaaccggcactgagactgagggcaaggctcatatccgtaaaggagcttcccgaaaattaccctgtatcctacggaagaacctatataacgaaaaggaaaacgaagctcggcgttgtcgcctttggatatgcggatggacttatgaaaacactatcaaacaggagcttcctgatttttgaaggaagaaaagttcccataataggaaacataaccatggacatgaccatggtggacctgagcggaacggaagcaagaacgggagactgggtttacatcgtaaacgaggagagaagctttacaccccttgcgagggatgcgggaacaattccctacgagataatgtgcaatctctcaaggagggttgagagactcgtaattaagaaaaggtaa

SEQ ID NO: 33173 - protein, 341 aa, Aquifex pyrophilus
MRRAVLEILEERIIHNVKEIHRFSGKRIIAVVKANAYGIGVREVSRILEGLEEVDAFAVACTQEGVELRECGIKKKILILGGILEEDVKLLEEYDLTPVISDPEHLKVLKDRNIKFHVKYDTGMGRLGFTNEIIKDPRVEGVMSHFSSPADRNFSKLQIKRFEEILKNYEKVKYIHLESSAGLIYRVPFTTHVRVGLAIYGEKPLKDYPLEVKPALRLRARLISVKELPENYPVSYGRTYITKRKTKLGVVAFGYADGLMKTLSNRSFLIFEGRKVPIIGNITMDMTMVDLSGTEARTGDWVYIVNEERSFTPLARDAGTIPYEIMCNLSRRVERLVIKKR

SEQ ID NO: 33174 - DNA, 1167 bp, Bacillus halodurans
  CDS (1)..(1167)
atggaacatttttatcgagacacttgggtagaagttgacttagatgcgattgaacaaaatgtgacgaacgctcttcgtctttataaagacagggaaatgaatttgatggctgtcgtaaaagcaaacggttatggtcatggtgctgtagaagtcagtcaagctgctttacgcgcaggggcgtcttatttgtctgttgcttttttagatgaagccctcgctttgcgaaaagcaggaatcgatgcccccattctggtcatgggtctagtgggcgctgagcatgttcagctagccatcaaacatcgtattacgttaaccgtttatcaattggactggctggaacaagcgatctctcgcttgcacactagagacaagctagccattcatttaaagctagatactggaatgggacgaattggattacggcgaaaagaggatattcgctcatgtatggattttatcgcatcccacgaatgctttgaattagaaggagtttttacccattttgccacagctgatgagaaggatttaacgtattttaagaagcaatgtcaacgatttaatcagtggcttgagtacattcgtgaatggcagttgcccattcggtacgttcattgcggcaatagtgcagcaggccttaggtttcctgagaaaaattttaatatgttccgctttggcatcgccatgtacgggctcaccccatcccctgaaataacagatgagcttccattcccattaaagcaggctttttcattaaaatcacgactctccaacgtgaaaaaactaccgaaaggagaaggcattagctatggagctacgtatgtgacagagggtgctgaatggattggtactctgccgatcgggtacgcagatggttggattcgccatcattccaatgctggagggcatgttttgatcgatggaaagcgggctccttttgttggtcggatttgtatggatcaatgtatgattcgtttaccgaaaaaacattcaattggtgatacagtaacgttaatcggggaaagtgatgggaagcaaattacgatggacgaagtagcaaaacggctgaacaccattaactatgaaattccttgcgtgatttcgtggcgggtaccgcgtatatattttcgagatggacaaataatatctgttaaaaataaccttttgtga

SEQ ID NO: 33175 - protein, 388 aa, Bacillus halodurans
MEHFYRDTWVEVDLDAIEQNVTNALRLYKDREMNLMAVVKANGYGHGAVEVSQAALRAGASYLSVAFLDEALALRKAGIDAPILVMGLVGAEHVQLAIKHRITLTVYQLDWLEQAISRLHTRDKLAIHLKLDTGMGRIGLRRKEDIRSCMDFIASHECFELEGVFTHFATADEKDLTYFKKQCQRFNQWLEYIREWQLPIRYVHCGNSAAGLRFPEKNFNMFRFGIAMYGLTPSPEITDELPFPLKQAFSLKSRLSNVKKLPKGEGISYGATYVTEGAEWIGTLPIGYADGWIRHHSNAGGHVLIDGKRAPFVGRICMDQCMIRLPKKHSIGDTVTLIGESDGKQITMDEVAKRLNTINYEIPCVISWRVPRIYFRDGQIISVKNNLL

SEQ ID NO: 33176 - DNA, 1152 bp, Bacillus psychrosaccharolyticus
  CDS (1)..(1152): transl_table=11
gtgactttgcaaaatttttatagagatacttgggcagaaatcaatttagatgctattttcgagaatgcagcaaatatgaaaaaacacctgcctcctgagattactctctttgcagttgtaaaggcaaatgcatatggtcatggcgatgttgaggtagctgagactgctattcaggctggtgcgggttatttagcagtagcctttttagatgaagcactcgcattacgaaaaaaaggaataacggcaccgattttggtcttaggagcatcacgccctgaagatgctcaaattgctgctagagaatcaataaccttaactgtttttcaagcaggctggcttgaagcagctcagtcttttcttgagggaactgttcttactatacatttaaagtgtgatagtgggatggggagaattggtatacgaaaacaagaagagatgaatgaaatcgaacgttttcttcagaaaacgaagtgttttgtactagagggaatctttactcacttcgctactgcggatcaactagatacagagtattttagtaaacagcttgctcgatttgaggaaatgctgacgtggctcaaggaaaaaccaaaatatgtccacgcggcaaatagtgccgcattattgagattcccgaatgcagtcttcaattcagttcgcatgggcatttctttatatggcttgtcaccctccatggaaatgaaagaagttttaccttttgcgctgcgtccagctttttcgttaaagactaaacttgtgcatgtcaagaatatctcgaaaggccaaagcgtcagttatggagcaacctatacagcagaagaagatacctggattggaacattgcctattggatatgcggatggctggattcgaatgctccaaggtcaggaagtgctgcttgaaggtggaaggtctccgttagttgggcggatatgtatggaccaatgtatggttaaattatcgcgagagtttccagtaggtactgaggtaacgttaatagggaagaacggcactgagtgcatcactgtcgatgatattgctgagaaactaaatacaataaactatgaagtaacttgtatgatttcatcccgagttccccggatgtacctgaaggacggacggataactggagttgttaatcaactaatataa

SEQ ID NO: 33177 - protein, 383 aa, Bacillus psychrosaccharolyticus [sequence omitted]

SEQ ID NO: 33178 - DNA, 1119 bp, Borrelia burgdorferi
  CDS (1)..(1119): transl_table=11
atgtataataataaaacaatgggtagtaacaaaacaataataataaatttaaataatttagaacataacttaaatttaattaaaaataaaattggcgaaaaagaaatagtggccaccttaaaaggtgacgcatatggtcacggacttataaacatctttaaatttttaaaatcaaaaaacataaattattttggactttctaatattgaagatgctaaaacacttaaaaaaattgataaaaatataaaaatattaatgtacattaaggtggataaaaaagaaattaaaaatttgattaaatttgagttagtaccatttgtttctgattttgaatatctatttttaatagaaaaagaatgcgcattgcaaaaaaataaaataaaagtccacttaaaaattgatatcggaatgaatagatatggaataaaaatagatgatgcccttgaaatagctacatatattcaaaattcaaaatttctagaactagaagggatctgctcacatctcccatcaatagaaaactttaaaaccacacaaaagcaaatagagcaattcttattttttttagaaacactaaaacaaaaaaatattcatcccaaatttgtccatatttctaattcagggcacattattaactacaaactaaatccacaatttaatatggtaagaccaggtcttattctttacggttactgtcaatcgctaaaaaacaaaaaacctgctttaaattttaagcctgtattaagtttattttcaaaagtaatatttatcaaaaatgtcaaaaagggtgaaaaaatttcatattcgggtatatttcaagccaaagaagatatgaaaataggaattattccaatcggatattttgatggaatacctcaaaatataagtaatgatttttattttttaataaacaataaaaaatgtaaaataagaggaaaagtttgcatgaatctgacaatagtagaaattcccaaagacctaaaagttaaaacaggttcaaaagtagaaattgtatcagaaaaattaagtatagatgaaatgagtaaattttctaaaagaagtcattatgaattactatgtaatataggaaaatacgaaaagagaaaatacttagattaa

SEQ ID NO: 33179 - protein, 372 aa, Borrelia burgdorferi
MYNNKTMGSNKTIIINLNNLEHNLNLIKNKIGEKEIVATLKGDAYGHGLINIFKFLKSKNINYFGLSNIEDAKTLKKIDKNIKILMYIKVDKKEIKNLIKFELVPFVSDFEYLFLIEKECALQKNKIKVHLKIDIGMNRYGIKIDDALEIATYIQNSKFLELEGICSHLPSIENFKTTQKQIEQFLFFLETLKQKNIHPKFVHISNSGHIINYKLNPQFNMVRPGLILYGYCQSLKNKKPALNFKPVLSLFSKVIFIKNVKKGEKISYSGIFQAKEDMKIGIIPIGYFDGIPQNISNDFYFLINNKKCKIRGKVCMNLTIVEIPKDLKVKTGSKVEIVSEKLSIDEMSKFSKRSHYELLCNIGKYEKRKYLD

SEQ ID NO: 33180 - DNA, 1191 bp, Brucella suis
  CDS (1)..(1191)
atgtctttacctttttctcaggatgagcgcgatctcgcggctggcggcatattgaccattgatctcgcagccctgcgccacaattattcagccatcgcaacccgcattgccccaacccgtacggccgctgtggtaaaggcagacgcctatggcctgggcgcaagccgggtcgcaccggctttctacgaggccggttgccgcgatttcttcgttgcacatcttggcgaagcagtggcgctgaagccctttttgaaacctgacgcaacactttatgtcctgaacggccttcagcccggaacggaagcagcctgtgcccgcgaaggcatcctgcctgttctcaattcgctggaacaggttgaaaactgggcagcactcgccacccggctgggcaaaaaactgcccgccctgctccagttcgataccggcatgtctcgtcttggcctgtcagccaaggaatttgaccgccttcttgagaacgtcacgctcctgagcaggatcgacatcaaattcgccatcagccatctggcaaacggcgacgagccgggaaatgcggcaaatgcccgtcagcttgccaagatgacggccttgctcgctcgcctgccgaaactgccggctgccttggccaattccggcggcaccttcctcggcaagacctattatttcgatctcgcccgccccggcatcgcgctatatggcatcgatccggagaggcagcatgacttttcggataaggtggcgcacgagaataagaaacccaagcattcgatccttcccgtcctcaccctttcggcgcgtgtcattcaggtgcgcgacgtcgacaagggagcgacagttggctatggcggcacctatgtcgccaacggcccgatgcggattgcgacgattgcggtcggctatgctgacggcttgttccgttccttgagtaacaagggcgcagcctttttcggcgatacgcgcctgcccatcatcgggcgcgtatcgatggattcgatcacgctcgacgtcacctcattgccggagggaacgctgaaactcggcagccttgtggaattgatcggcccgcatcagcgcctcgaagacgtggcgcgggactgcgacactatcccctatgaaattctgactgcgcttggcaaccgttatgcgcgcgtttacgtttacgtgaatggcggtggcaccagcacaacagcataa

SEQ ID NO: 33181 - protein, 396 aa, Brucella suis
MSLPFSQDERDLAAGGILTIDLAALRHNYSAIATRIAPTRTAAVVKADAYGLGASRVAPAFYEAGCRDFFVAHLGEAVALKPFLKPDATLYVLNGLQPGTEAACAREGILPVLNSLEQVENWAALATRLGKKLPALLQFDTGMSRLGLSAKEFDRLLENVTLLSRIDIKFAISHLANGDEPGNAANARQLAKMTALLARLPKLPAALANSGGTFLGKTYYFDLARPGIALYGIDPERQHDFSDKVAHENKKPKHSILPVLTLSARVIQVRDVDKGATVGYGGTYVANGPMRIATIAVGYADGLFRSLSNKGAAFFGDTRLPIIGRVSMDSITLDVTSLPEGTLKLGSLVELIGPHQRLEDVARDCDTIPYEILTALGNRYARVYVYVNGGGTSTTA

SEQ ID NO: 33182 - DNA, 1095 bp, Caulobacter crescentus
  CDS (1)..(1095): transl_table=11
gtgaccgacgcccaagacacccgcatcaccatcgatctcgacgccctggcgcataactacgcggccttgcgcgcgcgcgccggtgacgccgaggtggctccggcggtcaaggccgacgcctatggcctcggcgccgcgcccgtggccgatcgcctgtgggcggaaggcgcgcgcagcttctatgtcgcgcgattggctgagggcgtggccctgcgccggtcgctcggtgaccgcgaggccacgatctatgtgctggacggcgcgacgccgggttcgggcgaggcgctggaaggcgcgcagttggtccccgtgctcaacagcctgccgcaggtcgaggcctggaacgtgcaggcgcgatcgggacggctgcgggcggccctgcacatcgacaccggcatgaaccggcttggcctgcgccccgaggagctgaaggtgctggtcgggtccttcgaccggctcaagcgcttggatgtggagctggtcgtcagtcacctggcctgcgccgacacccccgagcatcccctgaacgccacgcagctggcgcgtttccaggaggccgccgccctgttgccgggcgttcggcgaagcctggccaattccggcggcctgtttctcggtgaggcctatcggttcgaccagacccgccccggcgtcagcctctacggcggtggccccgaaggccgtccccaccccgagatccgggcggtcgccaccgttgaggcgccgatcctgcaggtccgtgtcgtgccgcgcggcgaaagcatcggctacggcgccggatggaccgccagcgacaacacccgcgtcgccattgtcgcggcgggctacgccgacggcgtgccgcgcgccgcctttccgcgcggcgaggtgtggttcgacggcgcgcggcggccgatgctgggccgcgtgtcgatggacctgatcgcggtggatgtcaccgactgcgacgcggcccgtccgggtgctatggtcgagctgttcggggccaaccttcccgtggacgacgccgcagacgccgccgggacctcggcctatgagcgcctgacccgactgacgctgcgcggggttcgccgatacgtcggaggggcacgctag

SEQ ID NO: 33183 - protein, 364 aa, Caulobacter crescentus
MTDAQDTRITIDLDALAHNYAALRARAGDAEVAPAVKADAYGLGAAPVADRLWAEGARSFYVARLAEGVALRRSLGDREATIYVLDGATPGSGEALEGAQLVPVLNSLPQVEAWNVQARSGRLRAALHIDTGMNRLGLRPEELKVLVGSFDRLKRLDVELVVSHLACADTPEHPLNATQLARFQEAAALLPGVRRSLANSGGLFLGEAYRFDQTRPGVSLYGGGPEGRPHPEIRAVATVEAPILQVRVVPRGESIGYGAGWTASDNTRVAIVAAGYADGVPRAAFPRGEVWFDGARRPMLGRVSMDLIAVDVTDCDAARPGAMVELFGANLPVDDAADAAGTSAYERLTRLTLRGVRRYVGGAR

SEQ ID NO: 33184 - DNA, 1161 bp, Clostridium perfringens
  CDS (1)..(1161)
atggatatatgtgttagacctgtatgggctgaaatagatttagatataatagcaaataatatgaaagaaataagaaacctagttggtgaaaaggaaataatagccgttgttaaggctaatgcttatggtcatggagctttagacatagcttccactcttttagaaaatggtgcttctagattggcagtagctataatcacagaagctgatgaacttagggatgctggaataactgcacctattatgattttaggatatactcctataaatttcgctgaaaatttaatcaataatgaaattgaacaaacagtttatgatgtggagtatgctaaggaattatctgactttgccttaaagcttggcaaaaaagctaaaatacacattgcaatagatacaggaatgggcagaataggtttccttccaaatgaagagggattaaataaagttttagaaatatgctctttacctggagttgaggtaataggcttgtttactcacttctcaacatcagatgaaaaagataaaacttatacttatgaacaattttcaaaattaactgcttttaataaagctttagaagacaatggaatacacattcctttaaaacatgcttctaatagtggggctattatggatttaccagaaacttatttagacggagttagatgtggaattatttcttatggatactatccatctgaagaagtaaaaaaagaaaacttaaaacttaaaccagcacttacattaaaaactaatgtagcctttgttaaagagttagatgaagatatgtatgtaagctacggaagaacttataaaactgaaaagaaaagtaaaattgccactcttccaataggatatgctgatggatattcaagacttcttagtggaaaagctaaagttataataaagggtcaatttgctaatgttataggaagagtttgtatggatcaatgtatgattgatgtaactcatatagaagatgttaaaattggtgatgaagtaattcttttaggggaagaaaatggattaaaatttgatgctaatgatatggctgaaattatgggaacaataaactacgaaatactttgtatgattagccacagagttcctagaatatataaaaagaataatgaaatagttaaggtaagaaactatatttaa

SEQ ID NO: 33185 - protein, 386 aa, Clostridium perfringens
MDICVRPVWAEIDLDIIANNMKEIRNLVGEKEIIAVVKANAYGHGALDIASTLLENGASRLAVAIITEADELRDAGITAPIMILGYTPINFAENLINNEIEQTVYDVEYAKELSDFALKLGKKAKIHIAIDTGMGRIGFLPNEEGLNKVLEICSLPGVEVIGLFTHFSTSDEKDKTYTYEQFSKLTAFNKALEDNGIHIPLKHASNSGAIMDLPETYLDGVRCGIISYGYYPSEEVKKENLKLKPALTLKTNVAFVKELDEDMYVSYGRTYKTEKKSKIATLPIGYADGYSRLLSGKAKVIIKGQFANVIGRVCMDQCMIDVTHIEDVKIGDEVILLGEENGLKFDANDMAEIMGTINYEILCMISHRVPRIYKKNNEIVKVRNYI

SEQ ID NO: 33186 - DNA, 1086 bp, Corynebacterium glutamicum
  CDS (1)..(1086): transl_table=11
atgaacttgctgaccaccaaaattgacctggatgccatcgcccataacacgagggtgcttaaacaaatggcgggtccggcgaagctgatggcggtggtgaaggcgaatgcatataaccatggcgtagagaaggtcgctccggttattgctgctcatggtgcggatgcgtttggtgtggcaactcttgcggaggctatgcagttgcgtgatatcggcatcagccaagaggttttgtgttggatttggacaccggagcaggatttccgcgccgccattgatcgcaatattgatttggctgttatttctcccgcgcatgccaaagccttgatcgaaactgatgcggagcatattcgggtgtccatcaagattgattctgggttgcatcgttcgggtgtggatgagcaggagtgggagggcgtgttcagcgcgttggctgctgccccgcacattgaggtcacgggcatgttcacgcacttggcgtgcgcggatgagccagagaatccggaaactgatcgccaaattattgcttttcgacgcgcccttgcgctcgcccgcaagcacgggcttgagtgcccggtcaaccacgtatgcaactcacctgcattcttgactcgatctgatttacacatggagatggtccgaccgggtttggccttttatgggttggaacccgtggcgggactggagcatggtttgaagccggcgatgacgtgggaggcgaaggtgagcgtcgtaaagcaaattgaagctggacaaggcacttcctatggcctgacctggcgcgctgaggatcgcggctttgtggctgtggtgcctgcgggctatgccgatggcatgccgcggcatgcccaggggaaattctccgtcacgattgatggcctggactatccgcaggttgggcgcgtatgcatggatcagttcgttatttctttgggcgacaatccacacggcgtggaagctggggcgaaggccgtgatattcggtgagaatgggcatgacgcaactgattttgcggagcgtttagacaccattaactatgaggtagtgtgccgaccaaccggccgaactgtccgcgcatatgtttaa

SEQ ID NO: 33187 - protein, 361 aa, Corynebacterium glutamicum
MNLLTTKIDLDAIAHNTRVLKQMAGPAKLMAVVKANAYNHGVEKVAPVIAAHGADAFGVATLAEAMQLRDIGISQEVLCWIWTPEQDFRAAIDRNIDLAVISPAHAKALIETDAEHIRVSIKIDSGLHRSGVDEQEWEGVFSALAAAPHIEVTGMFTHLACADEPENPETDRQIIAFRRALALARKHGLECPVNHVCNSPAFLTRSDLHMEMVRPGLAFYGLEPVAGLEHGLKPAMTWEAKVSVVKQIEAGQGTSYGLTWRAEDRGFVAVVPAGYADGMPRHAQGKFSVTIDGLDYPQVGRVCMDQFVISLGDNPHGVEAGAKAVIFGENGHDATDFAERLDTINYEVVCRPTGRTVRAYV

SEQ ID NO: 33188 - DNA, 1065 bp, Fusobacterium nucleatum
  CDS (1)..(1065): transl_table=11
atgagaacttggatagaaattgataaagaaaatttaaagtacaatgtattaaaattaaaggaaattgctaataataaagaaattttaggagttgtaaaagctaacgcttatggtttagggtcaatagaaattgctaaaattttaaaagaagtcgaagttaaactttttggtgttgcaaatcttgaagaagctatagagctacaagaagcaggaattaaagataagattttaattcttggggctagctttgaagatgaattagttgaagcaacaaaaagaggagttcatgttgcaattagttctatgggacaactacaatttttagtatctaaaaacttaaatcctaatattcatttaaaatttgatactgggatgacaagattaggctttgaggttgatgatgctgaaaaagttatagaatattgtaaaaataataatcttaatcttgtaggtattttttctcatttatctgattcagatggaaatacaatagaaactaaaaattttacattagaacaaatagaaaaatttaaaaaaattgtcaattctttaaatttagaatatatccatatttcaaatagtgctggaattactaattttcataatgatatccttggtaatcttgttagattaggtataggtatgtattctttcacaggaaacaaaaaaactccgtacttaaaaaatattttcacaataaaatcaaaaattctatttataaaaaaagttaagaaagattcttttgtatcctatggaagacactatactttaccagctgattcaacttatgcggttcttccaataggttatgctgatggacttaaaaaatatctttctaagggtggctatgttttaattaataaccacagatgtgaaattattggaaatatctgtatggatatgactatgattagagttcctaaagaaattgaaaattcaattaaaataggagatgaagttacagttatcaatgctgatattttagataacttaaatatccctgaactttgtgtgtgggaatttatgactggaattggaagaagagttaaaagaattatagtttaa

SEQ ID NO: 33189 - protein, 354 aa, Fusobacterium nucleatum
MRTWIEIDKENLKYNVLKLKEIANNKEILGVVKANAYGLGSIEIAKILKEVEVKLFGVANLEEAIELQEAGIKDKILILGASFEDELVEATKRGVHVAISSMGQLQFLVSKNLNPNIHLKFDTGMTRLGFEVDDAEKVIEYCKNNNLNLVGIFSHLSDSDGNTIETKNFTLEQIEKFKKIVNSLNLEYIHISNSAGITNFHNDILGNLVRLGIGMYSFTGNKKTPYLKNIFTIKSKILFIKKVKKDSFVSYGRHYTLPADSTYAVLPIGYADGLKKYLSKGGYVLINNHRCEIIGNICMDMTMIRVPKEIENSIKIGDEVTVINADILDNLNIPELCVWEFMTGIGRRVKRIIV

SEQ ID NO: 33190 - DNA, 1083 bp, Haemophilus influenzae
  CDS (1)..(1083): transl_table=11
atgaacgtaaaaccggcgacagcgaaaattagttcgcacgccttaaaacagaatttagaaataattaaacaaaaagcaccaaatagcaaaattattgctgtggttaaagcaaacgcctatggtcacggcgttgtattcgttgcttcaaccttagaacaaaatgttgattgctttggcgtggcgcgtttagaagaggctttagcattacgctccaacggcattactaaaccgattttattgcttgaaggttttttcaatgaacaagatttgcctattctagccgttaataatattgaaaccgtggtacacaatcacgaacagcttgatgctttaaaacgtgcgaatttaccaagtccaattaaggtttggttaaaaatagatacgggaatgcatcgcttgggcgttgctcttgatgaagtggattatttttatcaagaactgaaaaaactccctcaaattcaaccgcacttaggctttgtcagccatttcagccgagccgatgaactagaatcagattacacccaacttcaaatcaatcgttttttatccgtcacaaaagataaacaaggtgaacgtactattgcagcgtcaggcggcattcttttctggccaaaatcccacttagaatgtatccgcccaggcattattatgtacggcatttctccaactgatactatcggtaaagagtttggcttaacgccagtgatgaatttaacctcgtcattaattgccgttcgccatcataaacaaggcgatcctgtaggttacggcggtatttggacaagtccacgagataccaaaattggagtggtcgcaatgggttatggcgatggttatccgcgcgatgtgccagaaggtacacctgtttatttaaatggccgtcttgtaccaattgttggacgtgtgtcaatggatatgcttactgttgatttaggcgcagatagccaagatttggtaggcgatgaagtaattttatggggcaaggaattacctattgaaaccgtagctaaattcacaggcattttaagctacgagctaattacaaaattaacacctcgtgttataactgaatacgttgattaa

SEQ ID NO: 33191 - protein, 360 aa, Haemophilus influenzae
MNVKPATAKISSHALKQNLEIIKQKAPNSKIIAVVKANAYGHGVVFVASTLEQNVDCFGVARLEEALALRSNGITKPILLLEGFFNEQDLPILAVNNIETVVHNHEQLDALKRANLPSPIKVWLKIDTGMHRLGVALDEVDYFYQELKKLPQIQPHLGFVSHFSRADELESDYTQLQINRFLSVTKDKQGERTIAASGGILFWPKSHLECIRPGIIMYGISPTDTIGKEFGLTPVMNLTSSLIAVRHHKQGDPVGYGGIWTSPRDTKIGVVAMGYGDGYPRDVPEGTPVYLNGRLVPIVGRVSMDMLTVDLGADSQDLVGDEVILWGKELPIETVAKFTGILSYELITKLTPRVITEYVD

SEQ ID NO: 33192 - DNA, 1134 bp, Helicobacter pylori J99
  CDS (1)..(1134): transl_table=11
atgttaaaaagggcgagttttgtagaagtgaatacccattctttaaggcataattttaatgcagtcaaaaatattgtccctaaagacgcttgtgtcatggcggttgtcaaggcaaacgcttatggggcaggggcgattaaagcgagcgaaatttttttacaagaaggggctaattatttaggggtagcgaccttagatgaagccttagaattgcgctctcatttttctcaaacccccattttgatcttaggttatagccctaatactaacgcttccatgctgattgataacgatttgagcgctatggtttttagccttgaacaagcggaagttttttctcaaatggctttaaagtctcaaaaacgcttaaaagtgcatctcaaaattgataccggcatgcaccgcttgggtttagagcctacttttaaaagcatagaaaccattaaaaaaatccgcgctttaaaaggcttggaagtggaagggatattcacgcatttaagcaacgctgattctaacattaaaacccatgctaaaaaccagatgaaagtctttaacgcttttttagagcagcttttggatcaaaaaatagaatttcaataccgccatgcctataattctgccggcatcctttctttgtgtaacgggaatgaaaatcgtttgttaaacctttatcgcccaggcatcatgctctatggtttttacccttctaatgaaatgaaagagtcgtctcaaacgatattaaaaaatgttatcagtttaaaagcgcgaatcgttcaaatcaaacgagtcaaaaaaggcgaatttattggctacggcgagcatttttacaccaatgaagagactttagtgggcgttttagctctagggtatgcggatgggttggtgcgcgctttgggcaatcgcattcaagtagcgatcaataaccaattagccccccttattggcaaggtgtgcatggatcaatgctttgtcaaactcaatgatattgaagccaaagagggcgatgaggtcattttgtttggggataaaagcactaaagctaatgacgcaagcgaaatcgccacgcttttaaacaccattccttatgaaaccatcagcactttgtccaaacgcttggagcgcgtttatgtgtga

SEQ ID NO: 33193 - protein, 377 aa, Helicobacter pylori J99
MLKRASFVEVNTHSLRHNFNAVKNIVPKDACVMAVVKANAYGAGAIKASEIFLQEGANYLGVATLDEALELRSHFSQTPILILGYSPNTNASMLIDNDLSAMVFSLEQAEVFSQMALKSQKRLKVHLKIDTGMHRLGLEPTFKSIETIKKIRALKGLEVEGIFTHLSNADSNIKTHAKNQMKVFNAFLEQLLDQKIEFQYRHAYNSAGILSLCNGNENRLLNLYRPGIMLYGFYPSNEMKESSQTILKNVISLKARIVQIKRVKKGEFIGYGEHFYTNEETLVGVLALGYADGLVRALGNRIQVAINNQLAPLIGKVCMDQCFVKLNDIEAKEGDEVILFGDKSTKANDASEIATLLNTIPYETISTLSKRLERVYV

SEQ ID NO: 33194 - DNA, 1134 bp, Helicobacter pylori
  CDS (1)..(1134): transl_table=11
atgttaaaaagggcgagttttgtagaagtggataccgcttctttaaggcataattttagcgcagtcaaaagcattgtccctaaagacgcttgtgtcatggcggttgtcaaggcgaacgcttatggggcaggagcgattaaagcgagcgaaattttcttacaagaaggggctaattatttaggggtagcgaccttagatgaagctttagagttgcgttctcatttttctaaaacccccattttgatcttaggctatagccctaatgctaacgcttccatgctggttgataacgatttgagcgctatgatttttagccttgaacaagcggaagttttttctcaaatggctttaaaatctcaaaaacgcttaaaagtgcacatcaaaattgataccggcatgcaccgcttgggtttagagcctaattttaaaagcatagaaaccattaaaaaaatccgcgctttaaaaggtttggaaatagaggggatatttacgcatttaagcaacgctgatgctaagattaaaacccatgctaaaaaccaaatgaaagcctttaacgcttttttagagcagcttttggatcaaaaaatagagttccaataccgccatgcttataattctgccggtatcctttctttgtgtaacgggaatgaaaatcgtttgttaaacctttatcgcccaggcatcatgctctatggtttttacccctctaatggaatgaaagaatcatgcccaaccatcttaaaaaatgttatcagtttgaaagcgcaaatcgttcaaatcagaagcgttaaaaaaggcgaatttattggctatggcgagcatttttataccaatgaagagactttagtgggtgttttagctctagggtatgcagacgggttaatgcgcgctttaggcaatcgcattcaagtagcgatcaataaccaattagcccccctgattggcaaggtgtgcatggatcaatgttttgtcaaactcaataatattcaagccaaagagggcgatgaggtcattttgtttggggataaaagcgctaaggctaatgacgcgagcgaaatcgytgcgcttttaaacaccattgcttatgaaaccataagcaccctatccaaacgcttggagcgcgtytatatttaa

SEQ ID NO: 33195 - protein, 377 aa, Helicobacter pylori
  misc_feature (354)..(354): Xaa can be any naturally occuring amino acid
MLKRASFVEVDTASLRHNFSAVKSIVPKDACVMAVVKANAYGAGAIKASEIFLQEGANYLGVATLDEALELRSHFSKTPILILGYSPNANASMLVDNDLSAMIFSLEQAEVFSQMALKSQKRLKVHIKIDTGMHRLGLEPNFKSIETIKKIRALKGLEIEGIFTHLSNADAKIKTHAKNQMKAFNAFLEQLLDQKIEFQYRHAYNSAGILSLCNGNENRLLNLYRPGIMLYGFYPSNGMKESCPTILKNVISLKAQIVQIRSVKKGEFIGYGEHFYTNEETLVGVLALGYADGLMRALGNRIQVAINNQLAPLIGKVCMDQCFVKLNNIQAKEGDEVILFGDKSAKANDASEIXALLNTIAYETISTLSKRLERVYI

SEQ ID NO: 33196 - DNA, 1104 bp, Lactococcus lactis
  CDS (1)..(1104): transl_table=11
atgaaaacttctccacatcgcaatacgtcagccattgttgacttaaaggcgattagaaataatattgaaaaatttaaaaaacatattcaccctaatgcggaaatttggccagcagtgaaagcagatgcttatggtcatggctcggttgaggtttctaaagcggtgagcgatttggtaggcggtttttgtgtatcaaaccttgatgaggcaattgaattacggaatcatttggtaactaaaccgattttagttttatcaggaattgttccagaagatgttgatattgcagctgctcttaatatcagtcttactgccccaagtttagaatggttaaaattggttgttcaagaagaagcagaactttcagatttaaaaattcatattggtgtagattctggtatgggtcggattgggattcgggatgttgaagaagcaaatcagatgattgaacttgctgataaatatgcgattaattttgaagggattttcactcactttgcgaccgccgatatggctgatgatacaaaatttaaagatcaacaggcaagatttaacaaaattatggccggattatcacgtaaaccaaaatttgttcactcaactaatacggccgccgctttatggcataaggaacaggttcaagctattgaacgcttaggtatttcaatgtacggcttgaatccaagtggtaaaactttggaacttccttttgaaatcgaacctgctctctctttagtttctgaattgactcatattaaaaaaatagccgcaggcgaaacagttggttacggtgcaacttatgaaacaagtgaagaaacatggattggaaccgttccaattggttatgctgatggttggactcgtcaaatgcaaggcttcaaagtactggtaaatggagaattttgtgagattgttggtcgagtttgtatggatcaaatgatgataaaacttgataaatcttatcctctaggaacaaaagttaccctgattggtcgtgataagactaatgaaatcacgacgacagatgttgctgattggcgtggaacgataaattatgaagtgctttgtttactttctgatagaatcaaacgaatttataaataa

SEQ ID NO: 33197 - protein, 367 aa, Lactococcus lactis
MKTSPHRNTSAIVDLKAIRNNIEKFKKHIHPNAEIWPAVKADAYGHGSVEVSKAVSDLVGGFCVSNLDEAIELRNHLVTKPILVLSGIVPEDVDIAAALNISLTAPSLEWLKLVVQEEAELSDLKIHIGVDSGMGRIGIRDVEEANQMIELADKYAINFEGIFTHFATADMADDTKFKDQQARFNKIMAGLSRKPKFVHSTNTAAALWHKEQVQAIERLGISMYGLNPSGKTLELPFEIEPALSLVSELTHIKKIAAGETVGYGATYETSEETWIGTVPIGYADGWTRQMQGFKVLVNGEFCEIVGRVCMDQMMIKLDKSYPLGTKVTLIGRDKTNEITTTDVADWRGTINYEVLCLLSDRIKRIYK

SEQ ID NO: 33198 - DNA, 1104 bp, Lactococcus lactis
  CDS (1)..(1104): transl_table=11
atgaaaacttcaccacatcgtaatacttcagctattgttgatttaaaagcgattagaaataatattgaaaaatttaaaaagcatattaaccctaatgcagagatttggccagcagtgaaagcagatgcttatggtcatggctcgattgaggtttctaaagcggtgagcgatttggtaggtggtttttgtgtatcaaacctagatgaggcaattgaattacgaaatcatctggtgactaaaccgattttagttttatccggaattgttccagaagatgttgatattgcagctgcccttaatattagtcttactgccccgagtttagaatggttgaaattggttgttcaagaagaagcagaactttcagatttaaaaattcatattggtgtagattctggtatgggtcggattggtattcgtgatgttgaagaagctaatcagatgattgaacttgctgataaatatgcgattaattttgaaggaattttcactcattttgcgactgcggatatggctgatgaaacaaaatttaaaaatcaacaggcaagatttaacaaaattatggccggattatcacgtcaaccaaaatttatacactcaactaatacggccgctgctttatggcataaggaacaagttcaagctattgaacgtttagggatttcaatgtatggcttgaatccaagtggtaaaactttggaacttccttttgaaattgaacccgctctctctttagtttctgaattgactcatataaaaaaaatagctgcaggtgaaacggttggttatggtgcaacttatgagacgagtgaagaaacttggattggaactgttccaattggttacgctgacgggtggacccgtcaaatgcaaggtttcaaagtgcttgttgatggaaagttttgtgagattgttggtcgagtttgtatggatcaaatgatgataaaacttgataagtcttaccctttgggaacgaaggtcactttgattggtcgagataaggctaatgaaatcacgacaacagacgttgctgattggcgtggaacgattaattatgaagtgctttgcttactttctgatagaatcaaaagaatctataaataa

SEQ ID NO: 33199 - protein, 367 aa, Lactococcus lactis
MKTSPHRNTSAIVDLKAIRNNIEKFKKHINPNAEIWPAVKADAYGHGSIEVSKAVSDLVGGFCVSNLDEAIELRNHLVTKPILVLSGIVPEDVDIAAALNISLTAPSLEWLKLVVQEEAELSDLKIHIGVDSGMGRIGIRDVEEANQMIELADKYAINFEGIFTHFATADMADETKFKNQQARFNKIMAGLSRQPKFIHSTNTAAALWHKEQVQAIERLGISMYGLNPSGKTLELPFEIEPALSLVSELTHIKKIAAGETVGYGATYETSEETWIGTVPIGYADGWTRQMQGFKVLVDGKFCEIVGRVCMDQMMIKLDKSYPLGTKVTLIGRDKANEITTTDVADWRGTINYEVLCLLSDRIKRIYK

SEQ ID NO: 33200 - DNA, 1128 bp, Lactobacillus plantarum
  CDS (1)..(1128): transl_table=11
atggttgtaattggggagcaccgccacacacaagtcacagtcgacttgcaggcaattaagacaaatattagtaatgaaatggcgcaaaaggatgagttgaccgagttatgggcagtcgttaaagcgaatggttatggacatggaattatccaagttgctcaggccgccaaagaagccggggcgaccggcttttgtgttgcaatcctggatgaggccttagcgttgcgggccgctggctttgcggaacccatcctagtacttggaattacggaaccggaatacgccccactggtagctgaaaaggatatttcactagctgttggaacgcaagattggctgactacggccgcagcaattttagcggctaatcaagtgacgacaccacttcacgttcatcttgcattagatacgggtatgggacgaatcgggtttcagacgcccgaagaattggcaacggcggttacgactttgcgtcaaccgcagtcaccatttgactttgaagggatttttacgcattttgcaacggctgaccaggcagatgatacgtattttactcatcaattaaataattggaaacacttgattgcagtggtggatgagctaccacgctatgtccacgtgtccaattcggccaccagtctctggcatcaagcttgcaatggcaacatggtgcgctttggggttgcactctatggtctaaatccttctggtcgcgaactcagcgcaccataccccttgcaacccgcgttgtcgctaacggcacgcttgacgtttgttaaacgcttggctcggggcaaatcggtcagctatggtgccacgtatacggccgcacaggatgaatggattggcacggtgccgattgggtatgcggacggctatgaacgccgattacaaggcttccatgtacttgttgatggtgagttttgcgaaatcgtcggacgggtctgcatggaccagctgatggttcgtctgccacatgaagtaccggttggagctaaggtaactttggttggcacggacggtgctcgtaccatttcgttgcaagatattgctgactattgtgggacaattcattatgagattgcttgtgggttagcaccacgagtgccgagagtttatatagattaa

SEQ ID NO: 33201 - protein, 375 aa, Lactobacillus plantarum
MVVIGEHRHTQVTVDLQAIKTNISNEMAQKDELTELWAVVKANGYGHGIIQVAQAAKEAGATGFCVAILDEALALRAAGFAEPILVLGITEPEYAPLVAEKDISLAVGTQDWLTTAAAILAANQVTTPLHVHLALDTGMGRIGFQTPEELATAVTTLRQPQSPFDFEGIFTHFATADQADDTYFTHQLNNWKHLIAVVDELPRYVHVSNSATSLWHQACNGNMVRFGVALYGLNPSGRELSAPYPLQPALSLTARLTFVKRLARGKSVSYGATYTAAQDEWIGTVPIGYADGYERRLQGFHVLVDGEFCEIVGRVCMDQLMVRLPHEVPVGAKVTLVGTDGARTISLQDIADYCGTIHYEIACGLAPRVPRVYID

SEQ ID NO: 33202 - DNA, 1128 bp, Lactobacillus reuteri
  CDS (1)..(1128): transl_table=11
atggttgaaggatggcatcgcgcaagtcggctagtagtcgatgcggcggcaattcggcaaaatgtaaaaaaggaaattgaacgtttagatccgcaaagcgagttatttgcagtagttaaagcaaatggatacggacatggactgattccggtggcccggtatactgaacaagcgggcgccaccggtttttgcgtggcaattttagacgaggcattgaccctgcgagaggcgggttttgctgaaccaatcttagtcttaggaatcactaacgtaaagtgggcggctttagctgctgaaaagaacgtttctttaaccgtgggagacgtggagtggttgactaaggcggctccccagttaacggcagaacatccgttaaaggttcatttggcgttagacactggaatgggacggattggttttcaagagtcagatggccttaatcaggcggcggagttgctcaccaatgatccgcgttttgtttttgaaggtgtatttacacactttgcaaccgcggatgaaaaggatcccacttatttcaatcttcaagtggaccgttttcataaattagtggacactttgccagaaaagcctcgctacgttcacgtttctaatacagcaactagtctatggcacgcagcttgcaacggtaacctaatccggtttggggtcggaatttatgggatgaatccgtccggaaccgttttggaaccaccgtatgatttgcagccagccatgacgttagagtcccagctttcattttctaagctgttgaaaaaggggcgttcggtaagctatggagcaacttacactgttgaacaagacgaatggattgggacagttccaattggctatgccgatgggtatccccgctgtttacaagggttccacgtgttagttgacgggcatttttgtgaaatcgtgggccgagtttgcatggaccagttaatgattcgccttccgcatgaatatccggcgggaacctcggtaatcttagcggggaaatcgcaagggaaaagtattagcatgacggacattgctgattatgctggaacaattaattatgaaatcacatgtggctttacggagcggattccgcgggtctataagaataatgatatagtaaaataa

SEQ ID NO: 33203 - protein, 375 aa, Lactobacillus reuteri
MVEGWHRASRLVVDAAAIRQNVKKEIERLDPQSELFAVVKANGYGHGLIPVARYTEQAGATGFCVAILDEALTLREAGFAEPILVLGITNVKWAALAAEKNVSLTVGDVEWLTKAAPQLTAEHPLKVHLALDTGMGRIGFQESDGLNQAAELLTNDPRFVFEGVFTHFATADEKDPTYFNLQVDRFHKLVDTLPEKPRYVHVSNTATSLWHAACNGNLIRFGVGIYGMNPSGTVLEPPYDLQPAMTLESQLSFSKLLKKGRSVSYGATYTVEQDEWIGTVPIGYADGYPRCLQGFHVLVDGHFCEIVGRVCMDQLMIRLPHEYPAGTSVILAGKSQGKSISMTDIADYAGTINYEITCGFTERIPRVYKNNDIVK

SEQ ID NO: 33204 - DNA, 1107 bp, Listeria innocua
  CDS (1)..(1107): transl_table=11
gtggtaacaggctggcaccgtccgacatggattgaaattgaccgcgcagcaattcgcgaaaatataaaaaatgaacaaaataaactaccagataaggtggcactttgggccgtagtaaaagcaaatgcatacggtcacggaattattgaaacagcaaaaatagcgaaagaagccggagcaaaaggtttttgtgtcgctattttagatgaagctcttgcattaagagaagctgggtttcgaaatgaatttattctcgtcttaggggcaactagaaaagaagacgccaaccttgctgctaaaaataatatctcagttactgtttttagagaagattggttggacgatttaactttagaggcgccactccggattcatttaaaagtagatagtggcatgggacgccttggtattcgtagtagagaagaagcacagcgaatcgaaacaacaatagcgatagatcatcaaatgattttagaaggtatttatacgcattttgcgacagccgatcaattagaaacaagttattttgaacaacaattagcaaaattccaagcaattttaagtagtttaacaacacgcccaacattcgttcatacagcaaattcagcagcttcattgctacaaccgcaaattgatttcgatgctattcgctttgggatttcgatgtatggtttaacaccttccacggaaattaaaaatagtttgccctttgaacttaaacctgcacttgcactttatacggaaatggttcatgtgaaagaactagcgccaggtgacagtgttagctacggcgcaacttatacagcaaccgaaaaagaatgggttgcgacattaccaattggttatgcagatggccttattcgccattatagtggctttcatgttttagtagaaggcgagcgggcaccaattatcggaaggatttgtatggatcaaaccatcataaaacttcctcgtgaatttcaaactggtacaaaagtaacgataatcggttcagatcatggaaataaggtaacagcagatgatgcagcagaatatttaggcacaattaattatgaagttacttgtttgttaacggagcgcataccaaggaaatacatcaattag

SEQ ID NO: 33205 - protein, 368 aa, Listeria innocua
MVTGWHRPTWIEIDRAAIRENIKNEQNKLPDKVALWAVVKANAYGHGIIETAKIAKEAGAKGFCVAILDEALALREAGFRNEFILVLGATRKEDANLAAKNNISVTVFREDWLDDLTLEAPLRIHLKVDSGMGRLGIRSREEAQRIETTIAIDHQMILEGIYTHFATADQLETSYFEQQLAKFQAILSSLTTRPTFVHTANSAASLLQPQIDFDAIRFGISMYGLTPSTEIKNSLPFELKPALALYTEMVHVKELAPGDSVSYGATYTATEKEWVATLPIGYADGLIRHYSGFHVLVEGERAPIIGRICMDQTIIKLPREFQTGTKVTIIGSDHGNKVTADDAAEYLGTINYEVTCLLTERIPRKYIN

SEQ ID NO: 33206 - DNA, 1107 bp, Listeria monocytogenes
  CDS (1)..(1107): transl_table=11
atggtgacaggctggcatcgtcctacatggattgaaatagaccgcgcagcaattcgcgaaaatataaaaaatgaacaaaataaactcccggaaagtgtcgacttatgggcagtagtcaaagctaatgcatatggtcacggaattatcgaagttgctaggacggcgaaagaagctggagcaaaaggtttctgcgtagccattttagatgaggctctggctcttagagaagctggatttcaagatgactttattcttgtgcttggtgcaaccagaaaagaagatgctaatctggcagccaaaaaccacatttcacttactgtttttagagaagattggctagagaatctaacgctagaagcaacacttcgaattcatttaaaagtagatagcggtatggggcgtctcggtattcgtacgactgaagaagcacggcgaattgaagcaaccagtactaatgatcaccaattacaactggaaggtatctacacgcattttgcaacagccgaccagcttgaaactagttatttcgaacaacaactagctaagttccaaacaattttaacgagtttaaaaaatcgtccaacgtatgttcatacagccaattcggctgcttccttattacagccacaaatcgggtttgatgcgattcgctttggtatatcgatgtatggattgaccccttccacagaaatcaaaactagcttaccatttgaacttaagccagcacttgcgctctataccgaaatggttcatgtgaaagaactcgcaccaggggatagtgtcagctacggagcaacctacacagcaacagaacgagaatgggttgcaacgttaccaattggctatgcagacggattgattcgtcattacagcggttttcatgttttagtaggcggggaacttgccccaattatagggcgcgtttgtatggatcaaaccatcataaaactaccacgtgaatttcaaactggttcaaaagtaacgataattggcaaagatcatggtaacacgataacagcagatgatgccgctcaatatttagatacaattaattatgaggtaacttgtttgttaaatgagcgcatacctagaaaatacatccattag

SEQ ID NO: 33207 - protein, 368 aa, Listeria monocytogenes
MVTGWHRPTWIEIDRAAIRENIKNEQNKLPESVDLWAVVKANAYGHGIIEVARTAKEAGAKGFCVAILDEALALREAGFQDDFILVLGATRKEDANLAAKNHISLTVFREDWLENLTLEATLRIHLKVDSGMGRLGIRTTEEARRIEATSTNDHQLQLEGIYTHFATADQLETSYFEQQLAKFQTILTSLKNRPTYVHTANSAASLLQPQIGFDAIRFGISMYGLTPSTEIKTSLPFELKPALALYTEMVHVKELAPGDSVSYGATYTATEREWVATLPIGYADGLIRHYSGFHVLVGGELAPIIGRVCMDQTIIKLPREFQTGSKVTIIGKDHGNTITADDAAQYLDTINYEVTCLLNERIPRKYIH

SEQ ID NO: 33208 - DNA, 1193 bp, Mycobacterium avium
  CDS (10)..(1176)
atggccgccatggccgttacgccgatatccctgaccccgggcgtcctcgccgaggcgctggtcgacctgggcgccatcgagcacaacgtgcggctgctgtgcgagcaggcccgcggcgcgcaggtgatggccgtggtcaaggccgacggctacggccacggggccgtgcagacggcgcgtgccgcgctggccgccggggccgccgagctgggcgtggccaccgtcgacgaggcgctggcgctgcgcgccgcggggatcagcgcgccggtgctggcctggctgcatccgcccggcatcgacttccggcccgcgctgctggccggcgtgcagatcggcctgtcctcgcagcgccagctcgacgagctgctgaccgcggtgcgcgacaccggccggaccgccacggtcaccgtcaaggtcgacaccgggctgaaccgcaacggcgtgccgccggcgcagtacccgtcgatgctgaccgcgctgcgccgcgccgtcgccgagcaggccatcgtgccgcgcggcctgatgtctcacatggtgtacgccgaccaacccgccaacccggtgaatgacgttcaggcgcaacggttcaccgacatgctggcccaggcgcgcgagcagggggtgcgcttcgaggtggcccacctgtcgaattcgtcggccaccatgtcgcgtcccgacctggccttcgacatggtgcgccccggtatcgcggtgtacggcctcagccctgtccccgagctgggcgacatgggcctggtgcccgcgatgacggtgaaatgtactgtggcactggtgaagtcgatacgtgcgggggaaagcgtgtcatacggacacacctggacggcgcagcgcgacaccaacctggcgctgctgccggtgggctacgccgacggcatcttccggtcgctgggcgggcggctgcaggtgtcgatcaacggccggcggcggccgggcgtcggccggatctgcatggaccagttcgtcgtcgacctgggcccgggccgccccgacgtggccgagggcgacgaggcgatcctgttcgggccgggcagcaacggtgaacccaccgcccaggattgggccgatctgctcggcactatccactacgaagtggtgaccagcccccgcgggcggatcaccaggacctaccgcgaggcgcacaccgttgagtcctgaccgaacccgcaagcgcc

SEQ ID NO: 33209 - protein, 388 aa, Mycobacterium avium
MAVTPISLTPGVLAEALVDLGAIEHNVRLLCEQARGAQVMAVVKADGYGHGAVQTARAALAAGAAELGVATVDEALALRAAGISAPVLAWLHPPGIDFRPALLAGVQIGLSSQRQLDELLTAVRDTGRTATVTVKVDTGLNRNGVPPAQYPSMLTALRRAVAEQAIVPRGLMSHMVYADQPANPVNDVQAQRFTDMLAQAREQGVRFEVAHLSNSSATMSRPDLAFDMVRPGIAVYGLSPVPELGDMGLVPAMTVKCTVALVKSIRAGESVSYGHTWTAQRDTNLALLPVGYADGIFRSLGGRLQVSINGRRRPGVGRICMDQFVVDLGPGRPDVAEGDEAILFGPGSNGEPTAQDWADLLGTIHYEVVTSPRGRITRTYREAHTVES

SEQ ID NO: 33210 - DNA, 1167 bp, Mycobacterium leprae
  CDS (1)..(1167): transl_table=11
ttggctgttacaccgatatccttgaggccaggtgtcttggccgaagctgttgtggatctgggagctattgactacaacgtgcgcgtgttgcgtgagcacgctggcatggcgcaactgatggttgtcctcaaagccgacgcctacggtcacggtgccacccaggttgccctcgccgcattggcagccggtgcggccgagctgggtgtggccaccgtcgacgaagcgctcgcattgcgcgcggacggtatcagtgcaccggtgctggcctggctgcatccacccggaatcgacttcgggcccgcgctgctggccgacgtgcagatagcggtgtcctcggtgcgtcagcttgacgagctgctggatgcggtgcgtcggaccggtcgtacggcgacggtgaccgtcaaagccgacaccgggctgaaccgcaacggggtcgtcaccgatcaatacccggcgatgctgaccgcgttgcagcgggctgtcgtagaagacgccgtaaggctgcgcgggttgatgtcgcacttggtttacgctgaccagcccgataatcccagcaatgacgttcagggcaagcggtttgctgctctgctcgctcaggcgcacgaacagggattgcggttcgaggtggcgcatctgtcgaattcatcagctacgatgtctcgtcctgacctggcttacgacctggtcaggcccggcatcgcggtgtacggtcttagtcctgtgccttcccgcggtgatatgggactaatacccgcaatgacggtgaaatgcgctgttgcgatggtgaagtctattcgtgctggtgaaggtgtttcgtacggacacgactggattgcgcagcatgacaccaatttggcgctgttgccggttggatatgcggacggtgtgttccggtcgctgggcggccggctggatgtgctgatcaatggcaagcgccggcctggcgtcggacggatctgtatggaccagtttgtcgtcgacttgggtccggggccaatcgatgtagccgaaggcgacgaagccatcttgttcggtcccggcgccagaggcgaacccactgcgcaagattgggctgatctgcttggaactatccactatgaagtggtcaccagtctacgcgggcggatcaccagaacgtaccgcgaggcccaaaccgttgacagatga

SEQ ID NO: 33211 - protein, 388 aa, Mycobacterium leprae
MAVTPISLRPGVLAEAVVDLGAIDYNVRVLREHAGMAQLMVVLKADAYGHGATQVALAALAAGAAELGVATVDEALALRADGISAPVLAWLHPPGIDFGPALLADVQIAVSSVRQLDELLDAVRRTGRTATVTVKADTGLNRNGVVTDQYPAMLTALQRAVVEDAVRLRGLMSHLVYADQPDNPSNDVQGKRFAALLAQAHEQGLRFEVAHLSNSSATMSRPDLAYDLVRPGIAVYGLSPVPSRGDMGLIPAMTVKCAVAMVKSIRAGEGVSYGHDWIAQHDTNLALLPVGYADGVFRSLGGRLDVLINGKRRPGVGRICMDQFVVDLGPGPIDVAEGDEAILFGPGARGEPTAQDWADLLGTIHYEVVTSLRGRITRTYREAQTVDR

SEQ ID NO: 33212 - DNA, 1170 bp, Mycobacterium smegmatis
  CDS (1)..(1170): transl_table=11
atgcagaccaccgagcccatgacaccgcctgcgccactggcgtcggcacagacggtgatcgatctgggcgccatcgaccacaacgtgcgcgtgctgcgcgaactcgccggttccgcggacgtgatggcggtggtcaaggccgacgcctacggacacggggcgctcccggtggcccgcaccgcgctggccgccggggccgccgccctcggtgtcgcgaccatccccgaggcgcttgcgctgcgtgagggtggcatcacggcgccggtcctggcgtggctgcatccgcccggcaccgacttcgccccggcgatcgccgccgacgtcgaggtcgccgtgtcgtcgcgccgccaactcgaacaggtgacggcggccgcggccgaggtgggccgcaccgcgacggtgaccgtcaaggtcgacaccgggctcagccgcaacggcgtcggcgcggccgactatcccgaggtgctcgatgtcctgcgccgcgcgcaggccgacggggcgatccgggtgcgcggtctgatgagccacctggtgcacggcgacgacccggagaacccgttcaacggtctgcagggccaacggctggcggacatgcgtgtttacgcgcgcgagcacggcgtcgactacgaggtggcgcacctgtgcaactcgcctgcggccatgaccaggcccgacctggcgttcgagatggtgcgtcccggcatctcgctgtacgggctcagtcccatccctgagcgcggcgacatgggcctgcggcccgcgatgaccttgaaatgcccggtggcgcttgtccgttcggtgcacgccggggacggggtgtcgtacgggcaccggtgggtggccgaccgtgacaccaccctggggctgctgccgatcggctacgccgacggcgtgtaccgcgcactgagcgggcgtatcgacgtgctgatcaagggcaggcgcaggcgcgccgtcggccggatctgcatggaccagttcgtggtcgacctcggcccggacgcggacgacgtggccgtaggtgacgacgccatcctgttcggcccgggcgccaacggcgaaccgaccgcgcaggactgggccgaactgctcgacaccattcactacgaggtcgtcacgagcccgcgcggacgcgtcacgcgcacgtatcttccggcaggacaacaagattga

SEQ ID NO: 33213 - protein, 389 aa, Mycobacterium smegmatis
MQTTEPMTPPAPLASAQTVIDLGAIDHNVRVLRELAGSADVMAVVKADAYGHGALPVARTALAAGAAALGVATIPEALALREGGITAPVLAWLHPPGTDFAPAIAADVEVAVSSRRQLEQVTAAAAEVGRTATVTVKVDTGLSRNGVGAADYPEVLDVLRRAQADGAIRVRGLMSHLVHGDDPENPFNGLQGQRLADMRVYAREHGVDYEVAHLCNSPAAMTRPDLAFEMVRPGISLYGLSPIPERGDMGLRPAMTLKCPVALVRSVHAGDGVSYGHRWVADRDTTLGLLPIGYADGVYRALSGRIDVLIKGRRRRAVGRICMDQFVVDLGPDADDVAVGDDAILFGPGANGEPTAQDWAELLDTIHYEVVTSPRGRVTRTYLPAGQQD

SEQ ID NO: 33214 - DNA, 1059 bp, Neisseria meningitidis
  CDS (1)..(1059): transl_table=11
atgcgccctttgaacgtgcagatcaggttgggcaaccttaggcacaattatcggattttgaaggaaatgcacggaggcaaactgttggcggtagtgaaggccgacgcatacggacacggtgcggtcagatgtgctttcgcgctggcagacttggcagacggctttgccgtggcgacaatcgacgagggaatcaggctacgggagagtggcattacccatccgattgtccttttggaaggcgtatttgaagcatcagagtacgaagcggtcgaacaatactcgctctggccggcagtcggaaaccaatggcaacttgaggctttgctttcccgccattggaaaaaacctgtcaaggtctggttgaaaatggattcgggaatgcaccgtaccggatttttccctcatgattacgcttcggtatatgcggcattgaagcagtcggaatatgtggacagtattgtcaaattctcgcatttctcctgtgcggacgaacccgaaagcggtatgacggaaatacagatggaagcattcgatttgggtacggaagggctggaaggcgaagaaagccttgccaactccgccgctattttgaatgttcccgaagcacgcagggactgggggcgagccggcttggcgttgtacggcatttccccgttcggaggcagcgatgacaggctgaaacccgtgatgaggctttccacccgtattttcggcgaacgcgttttacagccgcactcccctatcggttatggcgcaacattttataccagtaaatctacgcgcgtcggcctgattgcctgcggttatgcggacggttatccgcgccgcgccccaagcaattcccccgtcgccgtcgacggtaaattgacccgggtcatcggcagggtctctatggatatgatgaccatcgagctggacgcttcgcaagaaggtttgggacacgaggtcgaactgtggggcgatacggttaatatcaataccgttgccgaagcggccggaaccatcccttacgaattgatgtgcaatatcaaacgtgcaaaattcacttatatcgagtaa

SEQ ID NO: 33215 - protein, 352 aa, Neisseria meningitidis
MRPLNVQIRLGNLRHNYRILKEMHGGKLLAVVKADAYGHGAVRCAFALADLADGFAVATIDEGIRLRESGITHPIVLLEGVFEASEYEAVEQYSLWPAVGNQWQLEALLSRHWKKPVKVWLKMDSGMHRTGFFPHDYASVYAALKQSEYVDSIVKFSHFSCADEPESGMTEIQMEAFDLGTEGLEGEESLANSAAILNVPEARRDWGRAGLALYGISPFGGSDDRLKPVMRLSTRIFGERVLQPHSPIGYGATFYTSKSTRVGLIACGYADGYPRRAPSNSPVAVDGKLTRVIGRVSMDMMTIELDASQEGLGHEVELWGDTVNINTVAEAAGTIPYELMCNIKRAKFTYIE

SEQ ID NO: 33216 - DNA, 1059 bp, Neisseria meningitidis
  CDS (1)..(1059): transl_table=11
atgcgccctttgaacgtgcagatcaggttgggcaaccttaggcacaattatcggattttgaaggaaatgcacggaggcaaactgttggcggtagtgaaggccgacgcatacggacacggtgcggtcagatgtgctttcgcgctggcagacttggcagacggctttgccgtggcgacaatcgatgaaggaatcaggctgcgggagagcggcattacccatccgattgtccttttggaaggcgtatttgaagcatcggaatacgaagcggtcgaacaatactcgctttggccggcagtcggaaaccaatggcagcttgaggctttgctgatccgccattggaaaaaaaccgtcaaagtctggttgaaaatggattcggggatgcaccgtaccggttttttccctcatgattacgcttcggcatatgcggcattgaagcagtcggaatatgtggacagtattgtcaaattctcgcatttctcctgtgcggacgaacccgaaagcggtatgacggaaatacagatggaagcattcgatttgggtacggaagggctggaaggcgaagaaagccttgccaactccgccgctattttgaatgttcccgaagcacgcagggactgggggcgcgccggtctggcgttatacggcatttccccgttcggaggaggcgatgacaggctgaagcccgtgatgaggctttcaacccgtattttcggcgaacgcgttttacagccgcactcccctatcggttatggcgcaacattttataccagcaaatctacgcgcgtcggcctgattgcctgcggttatgcggacggttatccgcgccgcgccccaagcaattcccccgtcgctgtcgacggcaaattgacccgggtcatcggcagggtctctatggatatgatgaccatcgagctggatgcttcgcaagaaggtttgggacacgaggtcgaactgtggggcgatacggtcaacatcaataccgttgccgaagcggccggaaccatcccttacgaattgatgtgcaatatcaaacgtgcaaaattcacttatatcgagtaa

SEQ ID NO: 33217 - protein, 352 aa, Neisseria meningitidis
MRPLNVQIRLGNLRHNYRILKEMHGGKLLAVVKADAYGHGAVRCAFALADLADGFAVATIDEGIRLRESGITHPIVLLEGVFEASEYEAVEQYSLWPAVGNQWQLEALLIRHWKKTVKVWLKMDSGMHRTGFFPHDYASAYAALKQSEYVDSIVKFSHFSCADEPESGMTEIQMEAFDLGTEGLEGEESLANSAAILNVPEARRDWGRAGLALYGISPFGGGDDRLKPVMRLSTRIFGERVLQPHSPIGYGATFYTSKSTRVGLIACGYADGYPRRAPSNSPVAVDGKLTRVIGRVSMDMMTIELDASQEGLGHEVELWGDTVNINTVAEAAGTIPYELMCNIKRAKFTYIE

SEQ ID NO: 33218 - DNA, 1083 bp, Pasteurella multocida
  CDS (1)..(1083): transl_table=11
atgaatatgaaacctgccacagcaaaaatcagttctgtggcattaaaacacaacattcaaacgattaaacaaaaagccccgcaaagtaaaattattgctgttgtgaaagccaacgcctatggtcatggtgttgtgtttgtgtccgctgccgtagaagagttggtcgattgttttggcgtcgcccgtttagaagaagccttaagtttacgctcaaatgggattacgaaacctattttgctcttagaaggttttttttgcgataaagatttaccggtgattgcgataaataatattcaaactgtggtgcataacgtcgaacaattggaagcgttaaaagcagctaaagttcctaatccgattaaagtctggctaaaaattgataccggtatgcaccgtttaggggtagcactagaagacgttgagtatttttaccaagcgctccgcgattcagagaatgttgatccacagattggttttgtcagccattttagtcgcgcggatgaattggaatgtgactataccaagttacaattgacacgttttttaaatgctacgcaaaataaagcgggcgaaaaaagtattgctgcctcaggtgggatcttattttgggaaagttcccatttagactggattcgtccgggcattattatgtatgggatttcaccgattaatgtaccagcacaagaatatgatttaacccctgtgatgaccttaacctcctctcttattgcaattaaacagcataaaaaaggggagccagtaggatatggcgggatttgggtcagcgataaagacacgaaaattggtgtggttgccattggttatggcgatggttatccgcgtgacataccaacaggcacaccggtttacctcaatggtcgtcgtgtgcccattgtgggacgtgtctcgatggatatgttgacagtcgatctcggtgcagaagcacaagacaaagttggcgatgaagtcattctttggggcaaagaattgcccattgaagaaatcgcggatattagtggggtgattagttatgaattgattacaaaattaacgccacgtgttttaacggaatatattgattaa

SEQ ID NO: 33219 - protein, 360 aa, Pasteurella multocida
MNMKPATAKISSVALKHNIQTIKQKAPQSKIIAVVKANAYGHGVVFVSAAVEELVDCFGVARLEEALSLRSNGITKPILLLEGFFCDKDLPVIAINNIQTVVHNVEQLEALKAAKVPNPIKVWLKIDTGMHRLGVALEDVEYFYQALRDSENVDPQIGFVSHFSRADELECDYTKLQLTRFLNATQNKAGEKSIAASGGILFWESSHLDWIRPGIIMYGISPINVPAQEYDLTPVMTLTSSLIAIKQHKKGEPVGYGGIWVSDKDTKIGVVAIGYGDGYPRDIPTGTPVYLNGRRVPIVGRVSMDMLTVDLGAEAQDKVGDEVILWGKELPIEEIADISGVISYELITKLTPRVLTEYID

SEQ ID NO: 33220 - DNA, 1128 bp, Ralstonia solanacearum
  CDS (1)..(1128): transl_table=11
atgccaagacccattcaggccgtcatccacggccccgcactcgtcaacaatctccaggtggttcgccgccacgccgcggactcgcgcgtctgggcggtcatcaaggccaacgcatatggccacggcatcgagcgtgcctatgaggggctgcgccaggccgacggcttcggcctgctcgatctggacgaggccgtccggctgcgccagctgggctggcaggggccgatcctgctgctcgagggcttcttcaagccggaagacctggcgctggtcgagcaataccgactgaccaccaccgtccattgcgaggagcagttgcgcatgctggagctggcgcgcctgaaggggccggtgagtatccagctgaagatcaacacgggcatgagccgcctgggcttcgcgccggccgcgtaccgtgcggcctgggagcatgcccgcgccatttccggcatcggcaccatcgtccacatgacgcatttttccgatgccgacggcccgcgcggcatcgatcaccagttggccgccttcgagcaagccacgcaggggctgccgggcgaggcgagcctgtccaactccgccgccacgctgtggcatccgagggcgcaccgggactgggtgcgccccggcgtgatcctgtacggtgcttcgccgaccggcgtggccgccgacatcgaaggcaccggcctgatgccggccatgacgctcaagagcgagctgatcgccgtccaggacctgcagccgggcgcgaccgtcggctacggctcgcgcttcgaggccgagcagccgatgcgcatcggcatcgtcgcgtgcggctatgccgatggctatccgcgccatgctcccggctgggacggcaactacacgccggtgctggtggacggcgtgcgcacgcgcatggtgggccgcgtgtcgatggacatgatcaccgtggacctggccgaagtgccgggcgcccgcgttggcgcacccgtcacgctgtgggggcagggcctgccgatcgacgaggtggcgcatgccgccggcacggtcggctacgagctgatgtgcgcgctggcgccgcgcgtgccggtgacggtcgagccggccggcgcggcggatgccggcgagacgctcggcaaggcggcctga

SEQ ID NO: 33221 - protein, 375 aa, Ralstonia solanacearum
MPRPIQAVIHGPALVNNLQVVRRHAADSRVWAVIKANAYGHGIERAYEGLRQADGFGLLDLDEAVRLRQLGWQGPILLLEGFFKPEDLALVEQYRLTTTVHCEEQLRMLELARLKGPVSIQLKINTGMSRLGFAPAAYRAAWEHARAISGIGTIVHMTHFSDADGPRGIDHQLAAFEQATQGLPGEASLSNSAATLWHPRAHRDWVRPGVILYGASPTGVAADIEGTGLMPAMTLKSELIAVQDLQPGATVGYGSRFEAEQPMRIGIVACGYADGYPRHAPGWDGNYTPVLVDGVRTRMVGRVSMDMITVDLAEVPGARVGAPVTLWGQGLPIDEVAHAAGTVGYELMCALAPRVPVTVEPAGAADAGETLGKAA

SEQ ID NO: 33222 - DNA, 1140 bp, Rhizobium meliloti
  CDS (1)..(1140): transl_table=11
atgcaaagccccgagtttctttccgcctccagcaggctcaccgtcgacctcaccgcgctcgccgacaattggcgggcgatgaacgagcggtccggaaaagcccgcgccgccgccgttctgaaggccgatgcctacggtctcggcgtcgtgcatgccgctccggctctctatgccgccggcgcgcgcgatttcttcgtggccagtgtcgaagaaggggccgatcttcgcccgcttgttccggatgggcgaatctacattctcgcgggaatgtggcccggcaacgaggagctcttcttcgagaacgatctcgtgccgatcatcaactcggaagagcagctggcggtcttcatggcagcgctttccgaacggggcgaccacccctgcgttctccacgtcgacacgggcatgaaccggctcggcctgtcgcctgaggaggcgcttgccctcgcccacgaccctgcgcggcctgcgagtttctcgccggtcctcgtcatgagccatctggcctgcgccgacgatcccggacacccgatgaaccgctatcagcttcagcgtttccgcgaggtgaccgccgccttcgagggcgtgccggcgagccttgcaaattccggcggcgtgttcctcggtgcggactaccacttcgacctcacccggcccggcatcgcggtctatggcggcgaggcggtaaatggcgcggtcaatccgatgaaagcggtcgtcaccgccgaagcgcgcatcgtgcaggtcaggacggttccatccggcggaacggcaagctacggcgcctcggtccgcttcggccgcgacagccgcattgcgacggtcgcgatcggctatgccgacggctaccaccgttcggtttcgggcggcggcgtcaccctcagacaggcgatgccctcgggcgccttcggtttcctgcatggtatgaaggtgccgcatgtcggtcgggtgacgatggatctgagcctgttcgatgtcacggacctgccggaagcggccgtacgtgccggcgattatatcgaggtcttcgggcgcaatgtcgtcatcgacgacgtcgcgcgcgccggcggtaccatcggctacgagctgctgacgagcctcggccggcgctatcatcggacctatgtcggaggcgcttga

SEQ ID NO: 33223 - protein, 379 aa, Rhizobium meliloti
MQSPEFLSASSRLTVDLTALADNWRAMNERSGKARAAAVLKADAYGLGVVHAAPALYAAGARDFFVASVEEGADLRPLVPDGRIYILAGMWPGNEELFFENDLVPIINSEEQLAVFMAALSERGDHPCVLHVDTGMNRLGLSPEEALALAHDPARPASFSPVLVMSHLACADDPGHPMNRYQLQRFREVTAAFEGVPASLANSGGVFLGADYHFDLTRPGIAVYGGEAVNGAVNPMKAVVTAEARIVQVRTVPSGGTASYGASVRFGRDSRIATVAIGYADGYHRSVSGGGVTLRQAMPSGAFGFLHGMKVPHVGRVTMDLSLFDVTDLPEAAVRAGDYIEVFGRNVVIDDVARAGGTIGYELLTSLGRRYHRTYVGGA

SEQ ID NO: 33224 - DNA, 1068 bp, Rickettsia conorii
  CDS (1)..(1068): transl_table=11
atgagcttgtgtactgtagaaataaatctatctacaataaaaaataattaccttttattacaagatatttgcaaaacctcattagtcggtgctgccgttaaagctaacggttacggtcttggagcagtacaaatttctaaagctttaatagaagaaaattgtaggcatttttttgtggcctcaagtgaagaaggagtgaatttacgcaatgctttaggattagatgttaatattttagttcttaacggcgtttttgaacatgatgctttagagctgatagaatataatttaacacctgtcctaaataacttaaaacaaatagaaatttggcaaaaatttagtaatttgaaaaaccgattattgccttgttatttacatttcaatacggggattaatcgtcttggcttaagctctgatgagatagagcagctcattaatgatcgtgatttgttaaaagggctagatttacaatatattataagccatctagctatatccgaggaaatagataatccttataatctagaacaattaaacagatttaaagcttatttacaatatttcccaaacgtcaaagcaagccttgctaattccggcggcatatttttaggacaggattaccattttgatttagcaagaccaggggcagccttatatggtcttaatcccttaacaaagaatcccgtaaccttaaaagctcctataattcacttacagaatttgacactagatagccatatcggttataatatgacttttacaactaagcgtgatagtgtcattgcaacgttaccgcttggttatgccgatgggtttagtcgtaattttagcaatcaaggcgaagtatttattaacagtcgcagcgttcctatagtagggcgagtatcgatggatttaataaatatcgatgttaccgatctaccaccatccgagatttttctagggcaggaagcggaaattatcggaaattattgcacgcccgataaaatagcgagtattataggtactatcgggtatgaggtattaactaaccttggtagtagatataaaagaaagtatatcgggtag

SEQ ID NO: 33225 - protein, 355 aa, Rickettsia conorii
MSLCTVEINLSTIKNNYLLLQDICKTSLVGAAVKANGYGLGAVQISKALIEENCRHFFVASSEEGVNLRNALGLDVNILVLNGVFEHDALELIEYNLTPVLNNLKQIEIWQKFSNLKNRLLPCYLHFNTGINRLGLSSDEIEQLINDRDLLKGLDLQYIISHLAISEEIDNPYNLEQLNRFKAYLQYFPNVKASLANSGGIFLGQDYHFDLARPGAALYGLNPLTKNPVTLKAPIIHLQNLTLDSHIGYNMTFTTKRDSVIATLPLGYADGFSRNFSNQGEVFINSRSVPIVGRVSMDLINIDVTDLPPSEIFLGQEAEIIGNYCTPDKIASIIGTIGYEVLTNLGSRYKRKYIG

SEQ ID NO: 33226 - DNA, 1215 bp, Rickettsia prowazekii
  CDS (1)..(1215): transl_table=11
atgagcttgtgtaccctagaaataaatctatctgcaataaagaataattatcgtttattacaagatatttgtaaaactgcattagttggtgctgtagttaaagctaacggttatgggcttggtgcgatgcaaattgctaaagctttaataaaagaaaattgtcagtatttttttgtagctacaagcgaggagggaattaatttacgtaaagtactaaataatgatataactattttagttctcaatggagtttttacacatgatgctttagagcttatacaatataatttaactcctgttctaaataatttaagccaaatagaaatctggcaaaaatttagtaatttaaaaggaaaaatattgccttgttatctacattttaatactgggcttaatcgttttggcttaaactctgatgagatagaacagttgattaatgatcgtgatttattaaaaggtttagatctgcaatatattatcagtcatttagcagcttctgaagaaactggtaatccatataatttaatacaattaaacagatttaaagtttatttggaatattttccaaacgttaaggcaagttttgctaattccggtggcatatttttagggcaggattatcattttgatttagcaaggccaggtgcggctttatacggacttaattctttaatagaggtttcgtctaatctgtcttatacagaggaatttgaaagcaacacagcagctcttactaccacagcgtgtataaataaatgtccagatgttagtgtcagattgactcccaaattacctttaaaaggaagttatactgtacgtctacagaatcctgtaactttaaaggctcctataattgacttacagaatttgacactagatagtcatatcggttataatatgacttttacaactaagcgtgatagtgtaattgcaacgttaccacttggttatgccgatggatttagtcgtaattttagcagtcaaggtgaagtatttattaatagttgtagcgttcctatagtagggcgtgtatcgatggatttgataaatattgatgttacagatctaccaccgtccgaggtttttcttgggcaggaagcagagattataggtaattattgtacgccagataaaatagcgagtattatagggactatcggatatgaggtattgactagccttggtagtagatataagagaaagtatatatcgtag

SEQ ID NO: 33227 - protein, 404 aa, Rickettsia prowazekii
MSLCTLEINLSAIKNNYRLLQDICKTALVGAVVKANGYGLGAMQIAKALIKENCQYFFVATSEEGINLRKVLNNDITILVLNGVFTHDALELIQYNLTPVLNNLSQIEIWQKFSNLKGKILPCYLHFNTGLNRFGLNSDEIEQLINDRDLLKGLDLQYIISHLAASEETGNPYNLIQLNRFKVYLEYFPNVKASFANSGGIFLGQDYHFDLARPGAALYGLNSLIEVSSNLSYTEEFESNTAALTTTACINKCPDVSVRLTPKLPLKGSYTVRLQNPVTLKAPIIDLQNLTLDSHIGYNMTFTTKRDSVIATLPLGYADGFSRNFSSQGEVFINSCSVPIVGRVSMDLINIDVTDLPPSEVFLGQEAEIIGNYCTPDKIASIIGTIGYEVLTSLGSRYKRKYIS

SEQ ID NO: 33228 - DNA, 1149 bp, Staphylococcus epidermidis
  CDS (1)..(1149): transl_table=11
atgtcagagaagttttatagagcaacatatttaaatgtgaatttagatgcaattttagcaaattatcaaaatttcaatcaattacacgctaataagactgtcatttcagttattaaagcaaatggatatggattaggaagtgtgaaaatagcacaacatttaatgcgtcatggtgcaacattttttgcggtggctacacttgatgaagcaatagagttaagaatgcatggagttgatgctaaattattagttttaggcgttgttccaacagaagacattgagaaggctatacagcatcgtgttgcattaacagtaccttctaaagcatggttgaaggaaactatcaagcaaattcctgatgataaccaaaaaaatttatggctacatgtaaaattagatactggtatgggccgaattggaatgaaagatatagatgaatataaagaagtggttgatttaattaataaaagagatcatttagtttttgaaggggttttcacacattttgcgagtgctgatgaacctggaagttctatgaatgaacaatatactttgttcaaagagatggttaatcaagttgagaaaccaatttatattcattgtcaaaattctgctggatcactactcatggatggtcaattttgtaatgcaataagattaggaatctctctttatggatactatccttcagaatatgttaaagataatgtgaaagttcatttaagaccgagtgcgcagttagtatcagaaaccgttcaagtcaaaacgcttaaagttggggaaactgttagttatggacgtacatttattgctgatgaagaaatgacaattgcaattttacctattgggtatgccgacggatatttaagatcgatgcaaggtgcattcgtcaatgttaacgggagtcaatgtgaagtcattggacgcatttgtatggaccaaatgatagttaaggttccttctcatgtaaaaacgggtgaaaaagtaatacttatggataatcacgttgattcaccacaatcagctgaagccgtagcaaataaacaaggtacaattaactacgaagtattatgtaatttatcaagacgtcttccaagaatatattattatgataataatgaagaggttactaacgaattgttaaaatag

SEQ ID NO: 33229 - protein, 382 aa, Staphylococcus epidermidis
MSEKFYRATYLNVNLDAILANYQNFNQLHANKTVISVIKANGYGLGSVKIAQHLMRHGATFFAVATLDEAIELRMHGVDAKLLVLGVVPTEDIEKAIQHRVALTVPSKAWLKETIKQIPDDNQKNLWLHVKLDTGMGRIGMKDIDEYKEVVDLINKRDHLVFEGVFTHFASADEPGSSMNEQYTLFKEMVNQVEKPIYIHCQNSAGSLLMDGQFCNAIRLGISLYGYYPSEYVKDNVKVHLRPSAQLVSETVQVKTLKVGETVSYGRTFIADEEMTIAILPIGYADGYLRSMQGAFVNVNGSQCEVIGRICMDQMIVKVPSHVKTGEKVILMDNHVDSPQSAEAVANKQGTINYEVLCNLSRRLPRIYYYDNNEEVTNELLK

SEQ ID NO: 33230 - DNA, 1176 bp, Streptomyces coelicolor
  CDS (1)..(1176): transl_table=11
atgagcgagacaactgctcggcgggacgcggacgcggtactgcgcgcccgggccgagatcgacctggccgccctgcgggccaacgtacgcgcactgcgcgaacgggcccccggggcggctctcatggccgtcgtcaaggcggacgcctacggccacggcgcgatcccctgcgcccgtgcggccgtcgcggccggtgcgacctggctcggcaccgccaccccgcaggaggccctcgccctgcgcgcggcggagccaggcctgccggacgacgtacggatcatgtgctggctgtggacgcccggcgggccctggcgggaggcggtcgaggcccgtctcgacgtgtccgtcagcgcgatgtgggccatggaggaggtcaccggggcggcccgggcggccggggtgcccgcgcgcgtgcagctcaaggccgacaccggcctcgggcggggcggctgccagcccggcgcggactgggagcggctggtcggggccgcgctgcgggccgaggaggaggggctgctgagagtcaccgggctctggtcccacttcgcctgcgccgacgagcccggccacccctccatcgccgcccagctcacccgtttccgggagatgacggcctacgccgagcagcggggcctgcgtcccgaggtgcggcacatcgccaactcgccggccaccctcaccctccccgacgcccacttcgacctcgtccggcccggcatcgcgatgtacggtgtctcaccgagccccgagatcggcaccccggccgacttcgggctgcgccccgtgatgacgctggccgcctcgctggccctggtcaagcaggtccccggcggccacggcgtcagctacgggcaccactacaccacccccggcgagaccaccctcggcctcgtcccgctcggctacgcggacggcatcccccggcacgcctcctccagcggccccgtgctggtcgacggcaagtggcgcacggtcgcggggcggatcgcgatggaccagttcgtcgtcgacctgggcggggaccggcccgagccgggcgccgaggcggtgctgttcggaccgggcgaccgcggcgagcccaccgccgaggactgggcccaggcggcgggcaccatcgcgtacgagatcgtcacccggatcggaagccgggtcccgcgcgtctacgtcaacgaatga

SEQ ID NO: 33231 - protein, 391 aa, Streptomyces coelicolor
MSETTARRDADAVLRARAEIDLAALRANVRALRERAPGAALMAVVKADAYGHGAIPCARAAVAAGATWLGTATPQEALALRAAEPGLPDDVRIMCWLWTPGGPWREAVEARLDVSVSAMWAMEEVTGAARAAGVPARVQLKADTGLGRGGCQPGADWERLVGAALRAEEEGLLRVTGLWSHFACADEPGHPSIAAQLTRFREMTAYAEQRGLRPEVRHIANSPATLTLPDAHFDLVRPGIAMYGVSPSPEIGTPADFGLRPVMTLAASLALVKQVPGGHGVSYGHHYTTPGETTLGLVPLGYADGIPRHASSSGPVLVDGKWRTVAGRIAMDQFVVDLGGDRPEPGAEAVLFGPGDRGEPTAEDWAQAAGTIAYEIVTRIGSRVPRVYVNE

SEQ ID NO: 33232 - DNA, 1119 bp, Synechocystis sp
  CDS (1)..(1119)
atgattcgtcagcgggcttgggtggaaattgaccaagcggcgttggtgcataacgtccggcagttccgccagtatgtggggccaaaaactaatttgatggcggtggtcaaagccgatgcctatggccatggagcagtccgggtagcccaaactgctttacaggccggggctgattggttggcgatcgccactttgggggagggcatcgaactgagggaagcgggcatcaccgccccgattttgcttttgggaggtattaatagcccagaggaaattgaagccattgcccattggcgactacagcccaccctctgctccccggaacaggcccaattgttcaacgatattttgcttaagttgggtaaggttttacccgtacatctcaagctggatacgggcatgactaggttgggtactccctggccccaggcggcgaactttgttggtttggtgcaatctttgccccagctacggctagctagtttatattcccatctggccacagcggacgaccccaacaccgccaccatgctccagcaacaggaaagatttgccaaggcgatcgccagtttgcgtcaagcccgattacccatacccaaattacatttagctaattctgcggccaccctccacggccaggcttggcactacgacatggtccgggtaggtttaggtttgtatggcctttatcctgctccccacctaggcgattgcctggacctaaaacccgtattaacagtgcgggccaaaatcacccagatcagaaccattccccccggcaccggcgttagttacggtcaccaattcgttagtgaagaaaccatgcccatggcagtagtgggcattggctatgcggacggtgtcccccgtaatctttccaatcaattggaagtgcttttgcggggccaaccagtgcgacaaatcggggccatcaccatggatcaaatgatggtggatttacggggcattgatgatccccaagtgggggaagtggttaccctgattggccaagacggcgatcgccaaatcaccgcagaccattgggcctctactttgggcaccatatcctgggaaattctctgtggcttcaaacaccgtctaccccgtattcttatctaa

SEQ ID NO: 33233 - protein, 372 aa, Synechocystis sp
MIRQRAWVEIDQAALVHNVRQFRQYVGPKTNLMAVVKADAYGHGAVRVAQTALQAGADWLAIATLGEGIELREAGITAPILLLGGINSPEEIEAIAHWRLQPTLCSPEQAQLFNDILLKLGKVLPVHLKLDTGMTRLGTPWPQAANFVGLVQSLPQLRLASLYSHLATADDPNTATMLQQQERFAKAIASLRQARLPIPKLHLANSAATLHGQAWHYDMVRVGLGLYGLYPAPHLGDCLDLKPVLTVRAKITQIRTIPPGTGVSYGHQFVSEETMPMAVVGIGYADGVPRNLSNQLEVLLRGQPVRQIGAITMDQMMVDLRGIDDPQVGEVVTLIGQDGDRQITADHWASTLGTISWEILCGFKHRLPRILI

SEQ ID NO: 33234 - DNA, 1134 bp, Treponema pallidum
  CDS (1)..(1134)
atggcatgcaatcaggcattgatccatttagcaaacttgcgtcataacctcggtgaaattatgagccgtacacgcgcgcgtgtgtgtctacctgttaaggcggacgcgtatggacacggtgcgtgtgacgtcgcacaggcggcgctttcgtgcggggtgcactcgttcgccgttgcatgtgtgcaagaagcgtcgcaactgcgtgcggcaggtgttcgcgcgccgattttgtgtttaagtactccaactgctgaagagatttctagtcttattgagcatcgtgtgcacaccgtgatttctgagcgcgcgcatattgcccttatcgcacgcgcgctccgtcagtctgctgatacgggtgccacgtgtggggtacacgtaaagattgataccggaatggggagaatcggctgtgcgccggatgaggcctgtgcgctcgtgcagatggtgtgcgcaacaccgggtctccatcttgagggggtatgtacgcatttttctgtcgcggattctgtgcgtgctgaggacctgcagtacactgagatgcaacgtgcacattttatgcattgcgtacagtacatacggaaaagtggcatatcgattccattggtgcatgcggcaaactctgcagcgctgttgtgccatccgcgggcacacttcgacatggtgcgtccgggattgttggcatacggctatgcccctgagtctgtgcatcctgctgtgcgcagtgtgttccttcccgtcatggagcttgttacccaagtccgtgcaatcaaaaaaatacctgcaggcgcgtacgtttcttaccagcgcttgtggcgtgcgcatacagaaacacatgtaggtattctgcctatcggatatgcagacggagttatgcgcgcgctgtcgccgggtttgcaggtgtgcattggggggaagtggtatccggtggtgggggcaatttgcatggaccagtgtgtagtggacctaggtaccccgctgcgtgtgacagttggagatagggtgacacttttcggtcctcaggacgcaggtggcccaggacagggggcagatgtgctcgcctcgcatgcaggcaccattccctatgagcttttgtgcgcgattggtaagcgtgtcgaacgggtgtacatccggtga

SEQ ID NO: 33235 - protein, 377 aa, Treponema pallidum
MACNQALIHLANLRHNLGEIMSRTRARVCLPVKADAYGHGACDVAQAALSCGVHSFAVACVQEASQLRAAGVRAPILCLSTPTAEEISSLIEHRVHTVISERAHIALIARALRQSADTGATCGVHVKIDTGMGRIGCAPDEACALVQMVCATPGLHLEGVCTHFSVADSVRAEDLQYTEMQRAHFMHCVQYIRKSGISIPLVHAANSAALLCHPRAHFDMVRPGLLAYGYAPESVHPAVRSVFLPVMELVTQVRAIKKIPAGAYVSYQRLWRAHTETHVGILPIGYADGVMRALSPGLQVCIGGKWYPVVGAICMDQCVVDLGTPLRVTVGDRVTLFGPQDAGGPGQGADVLASHAGTIPYELLCAIGKRVERVYIR

SEQ ID NO: 33236 - DNA, 1074 bp, Wigglesworthia glossinidia brevipalpis
  CDS (1)..(1074)
atgccaagaaaaactacaatcagaattagttctaatgcattagcttcaaatttaagaacaataaaaaattacgcaaataaatcaaaagtatggtccgttataaaatctaatgcttatggtcacaccataaaagcagcattaaaaggattaaaagaaacttctgggtttgcagtattagaattaaatgaagctgtattattaagagaaaatggatggaatggaccaattttattacttgaaggattttttgaagaatctgatttactagaaatatgtcaatataaaataactactgttatacacaacgattggcaattaaattacatcaagcaatatgacattaaatctcctatagatgtttatttaaagcttaatagcggaatgaatagattaggttttaatgaaaaagattttattagaacgtggtatgatttgtctaatttaaaaaaaatatctagcttgactttaatgagtcatttttctttaggattttctacaaaaacagtaaataaacaaatgaacataattagaaaaatattcaaaatattaaatcctactttatgcctagcaaattcaacagctattatatttcatacttatactcataaagattggattaggccaggaattatattatatgggattttacctaaagaaaacaaaaaaatatctaaaaaattcaatttaaaaccagttatgactttagaaagtagaataatttctatacaaaatattaaatctaaagaatatatagggtatgggaaaaattattattctaataaatcaaatttaattggaatagtatcatgtggatatgcagatggatatccattcagcgtaccttttagtggtactcctgtttttgtaaatggaacacgtacccaaattattggatctgtttgcatggatatgttaacgattgatttaaatgattgtccaaatgcaaaaattggatccaaagtagaattatggggtaataatataagtattaatgaaatttcaaagctagctaatacaacaagttatgaattaatgtgtagaatttcttccagagttttagtgaaaatagaataa

SEQ ID NO: 33237 - protein, 357 aa, Wigglesworthia glossinidia brevipalpis
MPRKTTIRISSNALASNLRTIKNYANKSKVWSVIKSNAYGHTIKAALKGLKETSGFAVLELNEAVLLRENGWNGPILLLEGFFEESDLLEICQYKITTVIHNDWQLNYIKQYDIKSPIDVYLKLNSGMNRLGFNEKDFIRTWYDLSNLKKISSLTLMSHFSLGFSTKTVNKQMNIIRKIFKILNPTLCLANSTAIIFHTYTHKDWIRPGIILYGILPKENKKISKKFNLKPVMTLESRIISIQNIKSKEYIGYGKNYYSNKSNLIGIVSCGYADGYPFSVPFSGTPVFVNGTRTQIIGSVCMDMLTIDLNDCPNAKIGSKVELWGNNISINEISKLANTTSYELMCRISSRVLVKIE

SEQ ID NO: 33238 - DNA, 1101 bp, Xanthomonas axonopodis
  CDS (1)..(1101): transl_table=11
gtgcgtcctgcgcaagcgtcgatcgatctggaggcattgcgccacaactaccgcctggccaagcgcctgggcggcagcaaggcgctggcggtggtcaaggccgacgcgtacggacacggtgcagtgcgctgcgcgcaggcgctggagccggaagccgatggctttgcagtggcctgcatcgaagaggcgctggaactgcgccaggccggcatccgtgcgccgatcctgttgctggaaggattcttcgaacacgacgagctgcgcctgatcgccgagcacgacctgtggacggtggctgccacgccgcagcaggtgcgcgcgctggccgagttccagagcccgcggccgttgcgggtatggttgaagctggacagcggcatgcatcggctgggtctgtcgccggaagatttccgcgccgcctggttgcgcctgcgggggctgccgcagatcgcctcgctggtgctgatgacccatctggcgcgtgccgacgaattggactgcagccgcaccgacgagcaggcggtggcctttgcgctcaccgcaggcggcatgcgcgcggaaaccagcctgcgcaattcgcccggcctgctcggctggccggcgctgcgcaacgactggtcgcgcccggggctgatgttgtacggcgccaacccgttcccgcaggacaccgaaaacaccgcgcagctgcgcccggtgatgacgctgcgctcgcgcatcatttcggttcgcgagctgccggccggcgaaccggtgggctacggcgcacgctttgttgccgagcggccgacgcgtgtcggcgtcgtggcgatgggctatgccgacggctacccgcagttcgcacccaacggcaccccggtgctggtggacggccaggtctgtccgttggccggtcgcgtctcgatggacatgctcaccgtggacctcaccgaccacccgcaggccgacatcggcacgccggtgcagctgtggggtgatgcaccgcaggtcggcgcactggccgcgcaatgcaacgtcagcgcgtaccaactgctgtgcgggctcaagcgggtgccgcgggtgtatatgggcgaggcagcagcgaaggagggagtcacgcgttga

SEQ ID NO: 33239 - protein, 366 aa, Xanthomonas axonopodis
MRPAQASIDLEALRHNYRLAKRLGGSKALAVVKADAYGHGAVRCAQALEPEADGFAVACIEEALELRQAGIRAPILLLEGFFEHDELRLIAEHDLWTVAATPQQVRALAEFQSPRPLRVWLKLDSGMHRLGLSPEDFRAAWLRLRGLPQIASLVLMTHLARADELDCSRTDEQAVAFALTAGGMRAETSLRNSPGLLGWPALRNDWSRPGLMLYGANPFPQDTENTAQLRPVMTLRSRIISVRELPAGEPVGYGARFVAERPTRVGVVAMGYADGYPQFAPNGTPVLVDGQVCPLAGRVSMDMLTVDLTDHPQADIGTPVQLWGDAPQVGALAAQCNVSAYQLLCGLKRVPRVYMGEAAAKEGVTR

SEQ ID NO: 33240 - DNA, 1083 bp, Xanthomonas campestris
  CDS (1)..(1083): transl_table=11
gtgcgtcctgcgcaagcgttgatcgacctggacgcgttgcgtcacaactaccgcctggcccggcaactgggtggcggcaaggcactggcagtggtcaaggccgacgcctacggccacggcgcggtgcgctgtgcgcaggcgctggaaccggaggccgacggctttgcggtggcctgcatcgaagaagcgctggagctgcgccaggccggcgtgcgcgcgccgatcctgctgctggaaggttttttcgagcatgacgagctggcgctgattgccgaacacgatctatggacggtggtcgccacgccctggcaggtgcgcgcgctggccgagttccgcagcccgcgccctttgcgggtgtggttgaagctggacagcggcatgcatcggctcggcctgtcgccggaagattttcgcgccgcatggctgcatttgcgcggcttgccgcagatcgactcgctggtgctgatgacgcatctggcacaggccgacgagctggagtgcagccgcaccgacgaacaggccgtggcgttcgcgctgacctgcggcggcatgcgcgcggaaaccagcctgcgcaattcgcccggcctgctcggctggccagcgctgcgcaacgattggtcacgcccggggctgatgctgtacggcgccaacccgttcccgcagccgagcgagctcaccgcgcaactgcgcccggtgatgacggtgcgctcgcgcatcatcagcgtgcgcgacctgccggccggcgagccggttggctatggcgcgcgcttcgttgccgaacggcccacgcgcgtgggcgtggtggcgatgggctatgccgacggctacccgcagttcgcgcccaacggcacgccggtgctggtggatggcaaggtgtgcccgctgatcggccgtgtgtcgatggacatgctcactgtggatctcaccgagcatccgcacgccgatgtgggaacgcccgtgcagctgtggggcgacgcgccgcaggtgagcacgttggccgcgcagtgcaatgtcagtgcataccagctgctgtgtggactcaagcgcgttccgcgtcactacagcacccctgcacacgcgtaa

SEQ ID NO: 33241 - protein, 360 aa, Xanthomonas campestris
MRPAQALIDLDALRHNYRLARQLGGGKALAVVKADAYGHGAVRCAQALEPEADGFAVACIEEALELRQAGVRAPILLLEGFFEHDELALIAEHDLWTVVATPWQVRALAEFRSPRPLRVWLKLDSGMHRLGLSPEDFRAAWLHLRGLPQIDSLVLMTHLAQADELECSRTDEQAVAFALTCGGMRAETSLRNSPGLLGWPALRNDWSRPGLMLYGANPFPQPSELTAQLRPVMTVRSRIISVRDLPAGEPVGYGARFVAERPTRVGVVAMGYADGYPQFAPNGTPVLVDGKVCPLIGRVSMDMLTVDLTEHPHADVGTPVQLWGDAPQVSTLAAQCNVSAYQLLCGLKRVPRHYSTPAHA

SEQ ID NO: 33242 - DNA, 23 bp, Artificial sequence
  Primer sequence
atgcaagcggcaactgttgtgat

SEQ ID NO: 33243 - DNA, 24 bp, Artificial sequence
  Primer sequence
ttaatccacgtatttcatcgcgac

SEQ ID NO: 33244 - protein, 490 aa, Artificial sequence
  Consensus
  Variant (2)..(4): Xaa in position 2 to 4 is any amino acid
  Variant (7)..(8): Xaa in position 7 to 8 is any amino acid
  Variant (10)..(18): Xaa in position 10 to 18 is any amino acid
  Variant (19)..(30): Xaa in position 19 to 30 is any or no amino acid
  Variant (32)..(32): Xaa in position 32 is any amino acid
  Variant (38)..(38): Xaa in position 38 is any amino acid
  Variant (42)..(42): Xaa in position 42 is any amino acid
  Variant (44)..(58): Xaa in position 44 to 58 is any amino acid
  Variant (59)..(62): Xaa in position 59 to 62 is any or no amino acid
  Variant (65)..(65): Xaa in position 65 is any amino acid
  Variant (67)..(67): Xaa in position 67 is any amino acid
  Variant (71)..(71): Xaa in position 71 is any amino acid
  Variant (74)..(80): Xaa in position 74 to 80 is any amino acid
  Variant (83)..(83): Xaa in position 83 is any amino acid
  Variant (85)..(92): Xaa in position 85 to 92 is any amino acid
  Variant (93)..(103): Xaa in position 93 to 103 is any or no amino acid
  Variant (105)..(107): Xaa in position 105 to 107 is any amino acid
  Variant (109)..(124): Xaa in position 109 to 124 is any amino acid
  Variant (125)..(146): Xaa in position 125 to 146 is any or no amino acid
  Variant (148)..(148): Xaa in position 148 is any amino acid
  Variant (153)..(153): Xaa in position 153 is any or no amino acid
  Variant (155)..(155): Xaa in position 155 is any amino acid
  Variant (157)..(157): Xaa in position 157 is any amino acid
  Variant (159)..(171): Xaa in position 159 to 171 is any amino acid
  Variant (172)..(185): Xaa in position 172 to 185 is any or no amino acid
  Variant (187)..(187): Xaa in position 187 is any or no amino acid
  Variant (190)..(190): Xaa in position 190 is any amino acid
  Variant (192)..(192): Xaa in position 192 is any amino acid
  Variant (195)..(200): Xaa in position 195 to 200 is any amino acid
  Variant (201)..(207): Xaa in position 201 to 207 is any or no amino acid
  Variant (209)..(211): Xaa in position 209 to 211 is any amino acid
  Variant (213)..(225): Xaa in position 213 to 225 is any amino acid
  Variant (226)..(236): Xaa in position 226 to 236 is any or no amino acid
  Variant (239)..(239): Xaa in position 239 is any amino acid
  Variant (241)..(241): Xaa in position 241 is any amino acid
  Variant (243)..(250): Xaa in position 243 to 250 is any amino acid
  Variant (251)..(266): Xaa in position 251 to 266 is any or no amino acid
  Variant (268)..(268): Xaa in position 268 is any amino acid
  Variant (271)..(271): Xaa in position 271 is any amino acid
  Variant (275)..(276): Xaa in position 275 to 276 is any amino acid
  Variant (278)..(280): Xaa in position 278 to 280 is any amino acid
  Variant (281)..(327): Xaa in position 281 to 327 is any or no amino acid
  Variant (329)..(329): Xaa in position 329 is any or no amino acid
  Variant (331)..(331): Xaa in position 331 is any amino acid
  Variant (333)..(333): Xaa in position 333 is any amino acid
  Variant (335)..(337): Xaa in position 335 to 337 is any amino acid
  Variant (339)..(340): Xaa in position 339 to 340 is any amino acid
  Variant (342)..(343): Xaa in position 342 to 343 is any amino acid
  Variant (345)..(347): Xaa in position 345 to 347 is any amino acid
  Variant (348)..(351): Xaa in position 348 to 351 is any or no amino acid
  Variant (353)..(353): Xaa in position 353 is any or no amino acid
  Variant (356)..(357): Xaa in position 356 to 357 is any or no amino acid
  Variant (359)..(366): Xaa in position 359 to 366 is any or no amino acid
  Variant (369)..(369): Xaa in position 369 is any amino acid
  Variant (371)..(372): Xaa in position 371 to 372 is any amino acid
  Variant (378)..(379): Xaa in position 378 to 379 is any amino acid
  Variant (381)..(384): Xaa in position 381 to 384 is any amino acid
  Variant (385)..(413): Xaa in position 385 to 413 is any or no amino acid
  Variant (415)..(415): Xaa in position 415 is any or no amino acid
  Variant (417)..(417): Xaa in position 417 is any amino acid
  Variant (419)..(423): Xaa in position 419 to 423 is any amino acid
  Variant (426)..(426): Xaa in position 426 is any amino acid
  Variant (428)..(428): Xaa in position 428 is any amino acid
  Variant (431)..(433): Xaa in position 431 to 433 is any amino acid
  Variant (435)..(435): Xaa in position 435 is any amino acid
  Variant (437)..(439): Xaa in position 437 to 439 is any amino acid
  Variant (440)..(449): Xaa in position 440 to 449 is any or no amino acid
  Variant (451)..(451): Xaa in position 451 is any amino acid
  Variant (452)..(452): Xaa in position 452 is any or no amino acid
  Variant (454)..(454): Xaa in position 454 is any amino acid
  Variant (456)..(456): Xaa in position 456 is any amino acid
  Variant (458)..(463): Xaa in position 458 to 463 is any amino acid
  Variant (464)..(472): Xaa in position 464 to 472 is any or no amino acid
  Variant (474)..(476): Xaa in position 474 to 476 is any amino acid
  Variant (477)..(477): Xaa in position 477 is any or no amino acid
  Variant (480)..(480): Xaa in position 480 is any amino acid
  Variant (484)..(486): Xaa in position 484 to 486 is any amino acid
  Variant (488)..(489): Xaa in position 488 to 489 is any amino acid
IXXXALXXNXXXXXXXXXXXXXXXXXXXXXLXAVVKAXAYGXGXXXXXXXXXXXXXXXXXXXVAXLXEALXLRXXXXXXXILXLXXXXXXXXXXXXXXXXXXXLXXXVXXXXXXXXXXXXXXXXXXXXXXXXXXXXXXXXXXXXXXLXVDTGXMXRXGXXXXXXXXXXXXXXXXXXXXXXXXXXXIXTHXAXADXXXXXXXXXXXXXQXXXFXXXXXXXXXXXXXXXXXXXXXXXXNSXAXLXXXXXXXXXXXXXXXXXXXXXXXXRXGIXLYGXXPXXXXXXXXXXXXXXXXXXXXXXXXXXXXXXXXXXXXXXXXXXXXXXXXXXLXPXMXLXXXVXXVXXLXXXXXXXVXYGXXFXXXXXXXXIAXVXXGYADGXXRXXXXXXXXXXXXXXXXXXXXXXXXXXXXXXXXXVXVXGXXXXXVGXVXMDXXXVXLXXXXXXXXXXXXXGXXVXLXGXXXXXXXXXXXXXXXAXXXXTIXYELXXXLXXR

SEQ ID NO: 33245 - protein, 10 aa, Artificial sequence
  Consensus
  Variant (2)..(2): Xaa in position 2 is any or no amino acid
  Variant (5)..(5): Xaa in position 5 is Asp or Asn
  Variant (6)..(6): Xaa in position 6 is Ala, Cys or Gly
  Variant (9)..(9): Xaa in position 9 is any amino acid
VXKAXXYGXG

SEQ ID NO: 33246 - protein, 6 aa, Artificial sequence
  Consensus
  Variant (3)..(3): Xaa in position 3 is any amino acid
  Variant (5)..(5): Xaa in position 5 is any amino acid
GMXRXG

SEQ ID NO: 33247 - protein, 11 aa, Artificial sequence
  Consensus
  Variant (2)..(2): Xaa in position 2 is any amino acid
  Variant (4)..(4): Xaa in position 4 is Ala, Ile, Leu or Val
  Variant (5)..(6): Xaa in position 5 to 6 is any amino acid
  Variant (9)..(10): Xaa in position 9 to 10 is any amino acid
RXGXXXYGXXP

SEQ ID NO: 33248 - protein, 26 aa, Artificial sequence
  Consensus
  Variant (2)..(2): Xaa in position 2 is Asp, Gly or Asn
  Variant (3)..(13): Xaa in position 3 to 13 is any amino acid
  Variant (14)..(14): Xaa in position 14 is Ala or Gly
  Variant (15)..(15): Xaa in position 15 is any amino acid
  Variant (16)..(16): Xaa in position 16 is Ala, Ile, Leu or Val
  Variant (17)..(17): Xaa in position 17 is Ala, Gly, Pro, Ser or Thr
  Variant (18)..(18): Xaa in position 18 is any amino acid
  Variant (21)..(21): Xaa in position 21 is Ala, Glu, Gly, Asn or Ser
  Variant (24)..(25): Xaa in position 24 to 25 is any amino acid
YXXXXXXXXXXXXXXXXXGYXDGXXR

SEQ ID NO: 33249 - DNA, 2280 bp, Escherichia coli K12; identical to SEQ ID NO: 11018
  CDS (470)..(1951)

SEQ ID NO: 33250 - protein, 493 aa, Escherichia coli K12; identical to SEQ ID NO: 11019

SEQ ID NO: 33251 - DNA, 1770 bp, Arabidopsis thaliana; identical to SEQ ID NO: 11020
  CDS (84)..(1559)

SEQ ID NO: 33252 - protein, 491 aa, Arabidopsis thaliana; identical to SEQ ID NO: 11021

SEQ ID NO: 33253 - DNA, 1512 bp, Arabidopsis thaliana; identical to SEQ ID NO: 11022
  CDS (1)..(1479)

SEQ ID NO: 33254 - protein, 492 aa, Arabidopsis thaliana; identical to SEQ ID NO: 11023

SEQ ID NO: 33255 - DNA, 1500 bp, Arabidopsis thaliana; identical to SEQ ID NO: 11024
  CDS (1)..(1500)

SEQ ID NO: 33256 - protein, 499 aa, Arabidopsis thaliana; identical to SEQ ID NO: 11025

SEQ ID NO: 33257 - DNA, 1865 bp, Solanum tuberosum; identical to SEQ ID NO: 11026
  CDS (66)..(1547)

SEQ ID NO: 33258 - protein, 493 aa, Solanum tuberosum; identical to SEQ ID NO: 11027

SEQ ID NO: 33259 - DNA, 1616 bp, Arabidopsis thaliana; identical to SEQ ID NO: 11028
  CDS (44)..(1576)

SEQ ID NO: 33260 - protein, 510 aa, Arabidopsis thaliana; identical to SEQ ID NO: 11029

SEQ ID NO: 33261 - DNA, 1416 bp, Nostoc sp. PCC 7120; identical to SEQ ID NO: 11030
  CDS (1)..(1416)

SEQ ID NO: 33262 - protein, 471 aa, Nostoc sp. PCC 7120; identical to SEQ ID NO: 11031

SEQ ID NO: 33263 - DNA, 1437 bp, Salmonella enterica subsp. enterica serovar Typhi; identical to SEQ ID NO: 11032
  CDS (1)..(1437)

SEQ ID NO: 33264 - protein, 478 aa, Salmonella enterica subsp. enterica serovar Typhi; identical to SEQ ID NO: 11033

SEQ ID NO: 33265 - DNA, 1452 bp, Brucella melitensis; identical to SEQ ID NO: 11034
  CDS (1)..(1452)

SEQ ID NO: 33266 - protein, 483 aa, Brucella melitensis; identical to SEQ ID NO: 11035

SEQ ID NO: 33267 - DNA, 1416 bp, Bacillus halodurans; identical to SEQ ID NO: 11036
  CDS (1)..(1416)

SEQ ID NO: 33268 - protein, 471 aa, Bacillus halodurans; identical to SEQ ID NO: 11037

SEQ ID NO: 33269 - DNA, 1428 bp, Haemophilus influenzae; identical to SEQ ID NO: 11038
  CDS (1)..(1428)

SEQ ID NO: 33270 - protein, 475 aa, Haemophilus influenzae; identical to SEQ ID NO: 11039

SEQ ID NO: 33271 - DNA, 1398 bp, Neisseria meningitidis; identical to SEQ ID NO: 11040
  CDS (1)..(1398)

SEQ ID NO: 33272 - protein, 465 aa, Neisseria meningitidis; identical to SEQ ID NO: 11041

SEQ ID NO: 33273 - DNA, 1425 bp, Pseudomonas aeruginosa; identical to SEQ ID NO: 11042
  CDS (1)..(1425)

SEQ ID NO: 33274 - protein, 474 aa, Pseudomonas aeruginosa; identical to SEQ ID NO: 11043

SEQ ID NO: 33275 - DNA, 1398 bp, Clostridium acetobutylicum; identical to SEQ ID NO: 11044
  CDS (1)..(1398)

SEQ ID NO: 33276 - protein, 465 aa, Clostridium acetobutylicum; identical to SEQ ID NO: 11045

SEQ ID NO: 33277 - DNA, 1446 bp, Agrobacterium tumefaciens; identical to SEQ ID NO: 11046
  CDS (1)..(1446)

SEQ ID NO: 33278 - protein, 481 aa, Agrobacterium tumefaciens; identical to SEQ ID NO: 11047

SEQ ID NO: 33279 - DNA, 1377 bp, Thermotoga maritima; identical to SEQ ID NO: 11048
  CDS (1)..(1377)

SEQ ID NO: 33280 - protein, 458 aa, Thermotoga maritima; identical to SEQ ID NO: 11049

SEQ ID NO: 33281 - DNA, 1407 bp, Campylobacter jejuni; identical to SEQ ID NO: 11050
  CDS (1)..(1407)

SEQ ID NO: 33282 - protein, 468 aa, Campylobacter jejuni; identical to SEQ ID NO: 11051

SEQ ID NO: 33283 - DNA, 1452 bp, Vibrio cholerae; identical to SEQ ID NO: 11052
  CDS (1)..(1452)

SEQ ID NO: 33284 - protein, 483 aa, Vibrio cholerae; identical to SEQ ID NO: 11053

SEQ ID NO: 33285 - DNA, 1413 bp, Clostridium acetobutylicum; identical to SEQ ID NO: 11054
  CDS (1)..(1413)

SEQ ID NO: 33286 - protein, 470 aa, Clostridium acetobutylicum; identical to SEQ ID NO: 11055

SEQ ID NO: 33287 - DNA, 1407 bp, Helicobacter pylori; identical to SEQ ID NO: 11056
  CDS (1)..(1407)

SEQ ID NO: 33288 - protein, 468 aa, Helicobacter pylori; identical to SEQ ID NO: 11057

SEQ ID NO: 33289 - DNA, 2867 bp, Serratia marcescens; identical to SEQ ID NO: 11058
  CDS (787)..(2223)

SEQ ID NO: 33290 - protein, 478 aa, Serratia marcescens; identical to SEQ ID NO: 11059

SEQ ID NO: 33291 - DNA, 1428 bp, Bacillus subtilis; identical to SEQ ID NO: 11060
  CDS (1)..(1428)

SEQ ID NO: 33292 - protein, 475 aa, Bacillus subtilis; identical to SEQ ID NO: 11061

SEQ ID NO: 33293 - DNA, 2066 bp, Pseudomonas fluorescens; identical to SEQ ID NO: 11062
  CDS (323)..(1759)

SEQ ID NO: 33294 - protein, 478 aa, Pseudomonas fluorescens; identical to SEQ ID NO: 11063

SEQ ID NO: 33295 - DNA, 1437 bp, Bacillus cereus; identical to SEQ ID NO: 11064
  CDS (1)..(1437)

SEQ ID NO: 33296 - protein, 478 aa, Bacillus cereus; identical to SEQ ID NO: 11065

SEQ ID NO: 33297 - DNA, 1419 bp, Acinetobacter sp; identical to SEQ ID NO: 11066
  CDS (1)..(1419)

SEQ ID NO: 33298 - protein, 472 aa, Acinetobacter sp; identical to SEQ ID NO: 11067

SEQ ID NO: 33299 - DNA, 1431 bp, Bacillus anthracis str; identical to SEQ ID NO: 11068
  CDS (1)..(1431)

SEQ ID NO: 33300 - protein, 476 aa, Bacillus anthracis str; identical to SEQ ID NO: 11069

SEQ ID NO: 33301 - DNA, 1461 bp, Photobacterium profundum; identical to SEQ ID NO: 11070
  CDS (1)..(1461)

SEQ ID NO: 33302 - protein, 486 aa, Photobacterium profundum; identical to SEQ ID NO: 11071

SEQ ID NO: 33303 - DNA, 1431 bp, Bdellovibrio bacteriovorus; identical to SEQ ID NO: 11072
  CDS (1)..(1431)

SEQ ID NO: 33304 - protein, 476 aa, Bdellovibrio bacteriovorus; identical to SEQ ID NO: 11073

SEQ ID NO: 33305 - DNA, 1575 bp, Corynebacterium diphtheriae; identical to SEQ ID NO: 11074
  CDS (1)..(1575)

SEQ ID NO: 33306 - protein, 524 aa, Corynebacterium diphtheriae; identical to SEQ ID NO: 11075

SEQ ID NO: 33307 - DNA, 1407 bp, Desulfovibrio vulgaris; identical to SEQ ID NO: 11076
  CDS (1)..(1407)

SEQ ID NO: 33308 - protein, 468 aa, Desulfovibrio vulgaris; identical to SEQ ID NO: 11077

SEQ ID NO: 33309 - DNA, 1413 bp, Desulfovibrio vulgaris; identical to SEQ ID NO: 11078
  CDS (1)..(1413)

SEQ ID NO: 33310 - protein, 470 aa, Desulfovibrio vulgaris; identical to SEQ ID NO: 11079

SEQ ID NO: 33311 - DNA, 1434 bp, Bacillus cereus; identical to SEQ ID NO: 11080
  CDS (1)..(1434)

SEQ ID NO: 33312 - protein, 477 aa, Bacillus cereus; identical to SEQ ID NO: 11081

SEQ ID NO: 33313 - DNA, 1392 bp, Treponema denticola; identical to SEQ ID NO: 11082
  CDS (1)..(1392)

SEQ ID NO: 33314 - protein, 463 aa, Treponema denticola; identical to SEQ ID NO: 11083

SEQ ID NO: 33315 - DNA, 1392 bp, Geobacter sulfurreducens; identical to SEQ ID NO: 11084
  CDS (1)..(1392)

SEQ ID NO: 33316 - protein, 463 aa, Geobacter sulfurreducens; identical to SEQ ID NO: 11085

SEQ ID NO: 33317 - DNA, 1437 bp, Yersinia pestis; identical to SEQ ID NO: 11086
  CDS (1)..(1437)

SEQ ID NO: 33318 - protein, 478 aa, Yersinia pestis; identical to SEQ ID NO: 11087

SEQ ID NO: 33319 - DNA, 1401 bp, Bradyrhizobium japonicum USDA 110; identical to SEQ ID NO: 11088
  CDS (1)..(1401)

SEQ ID NO: 33320 - protein, 466 aa, Bradyrhizobium japonicum USDA 110; identical to SEQ ID NO: 11089

SEQ ID NO: 33321 - DNA, 1416 bp, Wolinella succinogenes; identical to SEQ ID NO: 11090
  CDS (1)..(1416)

SEQ ID NO: 33322 - protein, 471 aa, Wolinella succinogenes; identical to SEQ ID NO: 11091

SEQ ID NO: 33323 - DNA, 1452 bp, Vibrio vulnificus; identical to SEQ ID NO: 11092
  CDS (1)..(1452)

SEQ ID NO: 33324 - protein, 483 aa, Vibrio vulnificus; identical to SEQ ID NO: 11093

SEQ ID NO: 33325 - DNA, 1428 bp, Porphyromonas gingivalis W83; identical to SEQ ID NO: 11094
  CDS (1)..(1428)

SEQ ID NO: 33326 - protein, 475 aa, Porphyromonas gingivalis W83; identical to SEQ ID NO: 11095

SEQ ID NO: 33327 - DNA, 1425 bp, Photorhabdus luminescens subsp; identical to SEQ ID NO: 11096
  CDS (1)..(1425)

SEQ ID NO: 33328 - protein, 474 aa, Photorhabdus luminescens subsp; identical to SEQ ID NO: 11097

SEQ ID NO: 33329 - DNA, 1410 bp, Gloeobacter violaceus PCC 7421; identical to SEQ ID NO: 11098
  CDS (1)..(1410)

SEQ ID NO: 33330 - protein, 469 aa, Gloeobacter violaceus PCC 7421; identical to SEQ ID NO: 11099

SEQ ID NO: 33331 - DNA, 1404 bp, Chromobacterium violaceum ATCC 12472; identical to SEQ ID NO: 11100
  CDS (1)..(1404)

SEQ ID NO: 33332 - protein, 467 aa, Chromobacterium violaceum ATCC 12472; identical to SEQ ID NO: 11101

SEQ ID NO: 33333 - DNA, 1440 bp, Helicobacter hepaticus ATCC 51449; identical to SEQ ID NO: 11102
  CDS (1)..(1440)

SEQ ID NO: 33334 - protein, 479 aa, Helicobacter hepaticus ATCC 51449; identical to SEQ ID NO: 11103

SEQ ID NO: 33335 - DNA, 1428 bp, Haemophilus ducreyi 35000HP; identical to SEQ ID NO: 11104
  CDS (1)..(1428)

SEQ ID NO: 33336 - protein, 475 aa, Haemophilus ducreyi 35000HP; identical to SEQ ID NO: 11105

SEQ ID NO: 33337 - DNA, 1413 bp, Streptomyces avermitilis; identical to SEQ ID NO: 11106
  CDS (1)..(1413)

SEQ ID NO: 33338 - protein, 470 aa, Streptomyces avermitilis; identical to SEQ ID NO: 11107

SEQ ID NO: 33339 - DNA, 1395 bp, Eikenella corrodens; identical to SEQ ID NO: 11108
  CDS (1)..(1395)

SEQ ID NO: 33340 - protein, 464 aa, Eikenella corrodens; identical to SEQ ID NO: 11109

SEQ ID NO: 33341 - DNA, 1452 bp, Vibrio parahaemolyticus; identical to SEQ ID NO: 11110
  CDS (1)..(1452)

SEQ ID NO: 33342 - protein, 483 aa, Vibrio parahaemolyticus; identical to SEQ ID NO: 11111

SEQ ID NO: 33343 - DNA, 1425 bp, Pseudomonas syringae pv; identical to SEQ ID NO: 11112
  CDS (1)..(1425)

SEQ ID NO: 33344 - protein, 474 aa, Pseudomonas syringae pv; identical to SEQ ID NO: 11113

SEQ ID NO: 33345 - DNA, 1437 bp, Pseudomonas putida; identical to SEQ ID NO: 11114
  CDS (1)..(1437)

SEQ ID NO: 33346 - protein, 478 aa, Pseudomonas putida; identical to SEQ ID NO: 11115

SEQ ID NO: 33347 - DNA, 1401 bp, Lactobacillus plantarum WCFS1; identical to SEQ ID NO: 11116
  CDS (1)..(1401)

SEQ ID NO: 33348 - protein, 466 aa, Lactobacillus plantarum WCFS1; identical to SEQ ID NO: 11117

SEQ ID NO: 33349 - DNA, 1413 bp, Clostridium tetani E88; identical to SEQ ID NO: 11118
  CDS (1)..(1413)

SEQ ID NO: 33350 - protein, 470 aa, Clostridium tetani E88; identical to SEQ ID NO: 11119

SEQ ID NO: 33351 - DNA, 1461 bp, Bacteroides thetaiotaomicron VPI; identical to SEQ ID NO: 11120
  CDS (1)..(1461)

SEQ ID NO: 33352 - protein, 486 aa, Bacteroides thetaiotaomicron VPI; identical to SEQ ID NO: 11121

SEQ ID NO: 33353 - DNA, 1440 bp, Wigglesworthia glossinidia brevipalpis; identical to SEQ ID NO: 11122
  CDS (1)..(1440)

SEQ ID NO: 33354 - protein, 479 aa, Wigglesworthia glossinidia brevipalpis; identical to SEQ ID NO: 11123

SEQ ID NO: 33355 - DNA, 1617 bp, Corynebacterium efficiens YS; identical to SEQ ID NO: 11124
  CDS (1)..(1617)

SEQ ID NO: 33356 - protein, 538 aa, Corynebacterium efficiens YS; identical to SEQ ID NO: 11125

SEQ ID NO: 33357 - DNA, 1473 bp, Bifidobacterium longum; identical to SEQ ID NO: 11126
  CDS (1)..(1473)

SEQ ID NO: 33358 - protein, 490 aa, Bifidobacterium longum; identical to SEQ ID NO: 11127

SEQ ID NO: 33359 - DNA, 1410 bp, Cytophaga sp; identical to SEQ ID NO: 11128
  CDS (1)..(1410)

SEQ ID NO: 33360 - protein, 469 aa, Cytophaga sp; identical to SEQ ID NO: 11129

SEQ ID NO: 33361 - DNA, 1386 bp, Thermoanaerobacter tengcongensis; identical to SEQ ID NO: 11130
  CDS (1)..(1386)

SEQ ID NO: 33362 - protein, 461 aa, Thermoanaerobacter tengcongensis; identical to SEQ ID NO: 11131

SEQ ID NO: 33363 - DNA, 1419 bp, Pasteurella multocida; identical to SEQ ID NO: 11132
  CDS (1)..(1419)

SEQ ID NO: 33364 - protein, 472 aa, Pasteurella multocida; identical to SEQ ID NO: 11133

SEQ ID NO: 33365 - DNA, 1374 bp, Thermoplasma acidophilum; identical to SEQ ID NO: 11134
  CDS (1)..(1374)

SEQ ID NO: 33366 - protein, 457 aa, Thermoplasma acidophilum; identical to SEQ ID NO: 11135

SEQ ID NO: 33367 - DNA, 2106 bp, Bacillus sp; identical to SEQ ID NO: 11136
  CDS (349)..(1755)

SEQ ID NO: 33368 - protein, 468 aa, Bacillus sp; identical to SEQ ID NO: 11137

SEQ ID NO: 33369 - DNA, 1428 bp, Rhizobium etli; identical to SEQ ID NO: 11138
  CDS (1)..(1428)

SEQ ID NO: 33370 - protein, 475 aa, Rhizobium etli; identical to SEQ ID NO: 11139

SEQ ID NO: 33371 - DNA, 1581 bp, Corynebacterium glutamicum; identical to SEQ ID NO: 11140
  CDS (1)..(1581)

SEQ ID NO: 33372 - protein, 526 aa, Corynebacterium glutamicum; identical to SEQ ID NO: 11141

SEQ ID NO: 33373 - DNA, 26 bp, Artificial sequence
  Primer sequence
atgtgtttaaagcaaatcattggcag

SEQ ID NO: 33374 - DNA, 25 bp, Artificial sequence
  Primer sequence
ttactgttcgctttcatcagtatag

SEQ ID NO: 33375 - protein, 465 aa, Artificial sequence
  Consensus
  Variant (2)..(2): Xaa in position 2 is any amino acid
  Variant (4)..(4): Xaa in position 4 is any amino acid
  Variant (6)..(7): Xaa in position 6 to 7 is any amino acid
  Variant (9)..(12): Xaa in position 9 to 12 is any amino acid
  Variant (14)..(16): Xaa in position 14 to 16 is any amino acid
  Variant (18)..(18): Xaa in position 18 is any amino acid
  Variant (20)..(21): Xaa in position 20 to 21 is any amino acid
  Variant (23)..(23): Xaa in position 23 is any amino acid
  Variant (26)..(27): Xaa in position 26 to 27 is any amino acid
  Variant (30)..(30): Xaa in position 30 is any amino acid
  Variant (32)..(49): Xaa in position 32 to 49 is any amino acid
  Variant (51)..(51): Xaa in position 51 is any amino acid
  Variant (53)..(53): Xaa in position 53 is any amino acid
  Variant (55)..(56): Xaa in position 55 to 56 is any amino acid
  Variant (58)..(70): Xaa in position 58 to 70 is any amino acid
  Variant (72)..(73): Xaa in position 72 to 73 is any amino acid
  Variant (75)..(88): Xaa in position 75 to 88 is any amino acid
  Variant (90)..(91): Xaa in position 90 to 91 is any amino acid
  Variant (93)..(94): Xaa in position 93 to 94 is any amino acid
  Variant (102)..(102): Xaa in position 102 is any amino acid
  Variant (106)..(106): Xaa in position 106 is any amino acid
  Variant (110)..(110): Xaa in position 110 is any amino acid
  Variant (113)..(113): Xaa in position 113 is any amino acid
  Variant (115)..(115): Xaa in position 115 is any amino acid
  Variant (117)..(118): Xaa in position 117 to 118 is any amino acid
  Variant (120)..(122): Xaa in position 120 to 122 is any amino acid
  Variant (124)..(124): Xaa in position 124 is any amino acid
  Variant (126)..(129): Xaa in position 126 to 129 is any amino acid
  Variant (132)..(133): Xaa in position 132 to 133 is any amino acid
  Variant (136)..(137): Xaa in position 136 to 137 is any amino acid
  Variant (143)..(144): Xaa in position 143 to 144 is any amino acid
  Variant (147)..(159): Xaa in position 147 to 159 is any amino acid
  Variant (161)..(166): Xaa in position 161 to 166 is any amino acid
  Variant (168)..(173): Xaa in position 168 to 173 is any amino acid
  Variant (175)..(176): Xaa in position 175 to 176 is any amino acid
  Variant (179)..(182): Xaa in position 179 to 182 is any amino acid
  Variant (184)..(184): Xaa in position 184 is any amino acid
  Variant (188)..(188): Xaa in position 188 is any amino acid
  Variant (195)..(197): Xaa in position 195 to 197 is any amino acid
  Variant (202)..(226): Xaa in position 202 to 226 is any amino acid
  Variant (228)..(228): Xaa in position 228 is any amino acid
  Variant (230)..(230): Xaa in position 230 is any amino acid
  Variant (233)..(233): Xaa in position 233 is any amino acid
  Variant (237)..(237): Xaa in position 237 is any amino acid
  Variant (239)..(242): Xaa in position 239 to 242 is any amino acid
  Variant (244)..(250): Xaa in position 244 to 250 is any amino acid
  Variant (252)..(261): Xaa in position 252 to 261 is any amino acid
  Variant (263)..(264): Xaa in position 263 to 264 is any amino acid
  Variant (266)..(267): Xaa in position 266 to 267 is any amino acid
  Variant (270)..(281): Xaa in position 270 to 281 is any amino acid
  Variant (284)..(285): Xaa in position 284 to 285 is any amino acid
  Variant (287)..(290): Xaa in position 287 to 290 is any amino acid
  Variant (292)..(293): Xaa in position 292 to 293 is any amino acid
  Variant (300)..(300): Xaa in position 300 is any amino acid
  Variant (305)..(305): Xaa in position 305 is any amino acid
  Variant (307)..(308): Xaa in position 307 to 308 is any amino acid
  Variant (310)..(311): Xaa in position 310 to 311 is any amino acid
  Variant (314)..(315): Xaa in position 314 to 315 is any amino acid
  Variant (317)..(317): Xaa in position 317 is any amino acid
  Variant (324)..(324): Xaa in position 324 is any amino acid
  Variant (330)..(331): Xaa in position 330 to 331 is any amino acid
  Variant (333)..(334): Xaa in position 333 to 334 is any amino acid
  Variant (337)..(340): Xaa in position 337 to 340 is any amino acid
  Variant (342)..(342): Xaa in position 342 is any amino acid
  Variant (346)..(350): Xaa in position 346 to 350 is any amino acid
  Variant (352)..(354): Xaa in position 352 to 354 is any amino acid
  Variant (358)..(358): Xaa in position 358 is any amino acid
  Variant (361)..(363): Xaa in position 361 to 363 is any amino acid
  Variant (365)..(372): Xaa in position 365 to 372 is any amino acid
  Variant (374)..(387): Xaa in position 374 to 387 is any amino acid
  Variant (389)..(390): Xaa in position 389 to 390 is any amino acid
  Variant (393)..(394): Xaa in position 393 to 394 is any amino acid
  Variant (396)..(405): Xaa in position 396 to 405 is any amino acid
  Variant (407)..(410): Xaa in position 407 to 410 is any amino acid
  Variant (412)..(412): Xaa in position 412 is any amino acid
  Variant (416)..(417): Xaa in position 416 to 417 is any amino acid
  Variant (419)..(432): Xaa in position 419 to 432 is any amino acid
  Variant (434)..(447): Xaa in position 434 to 447 is any amino acid
  Variant (449)..(464): Xaa in position 449 to 464 is any amino acid
RXEXDXXGXXXXPXXXYXGXXTXRAXXNFXIXXXXXXXXXXXXXXXXXXKXAXAXXNXXXXXXXXXXXXXIXXAXXXXXXXXXXXXXXFXXDXXQGGAGTSXNMNXNEVXANXAXEXXGXXXGXYXXXXPNXXVNXXQSTNDXXPTXXXXXXXXXXXXXLXXXXXXLXXXXXXKXXEFXXXXKXGRTXLQDAVPXXXGQEFXXXXXXXXXXXXXXXXXXXXXXXXXNXGXTAXGTGXNXXXXYXXXXXXXLXXXXXXXXXXAXXLXXATXXXXXXXXXXXXLKXXAXXXXKXXNDLRLLXSGPRXGXXEXXLPXXQXGSSIMPXKVNPVXXEXXNQXXXXVXGNDXXXXXAXXXGQLXLNXXXPXXXXXXXXSXXXXXXXXXXXXXXCXXGIXXNXXXXXXXXXXSXXXXTXLNPXXGXXXXXXXXXXXXXXGXXXXXXXXXXXXXXLXXXXXXXXXXXXXXXXP

SEQ ID NO: 33376 - protein, 50 aa, Artificial sequence; identical to SEQ ID NO: 13505
  Consensus
  Variant (2)..(2): Xaa in position 2 is any amino acid
  Variant (4)..(4): Xaa in position 4 is any amino acid
  Variant (6)..(6): Xaa in position 6 is any amino acid
  Variant (7)..(7): Xaa in position 7 is Leu, Ile, Phe, Met or Val
  Variant (9)..(11): Xaa in position 9 to 11 is any amino acid
  Variant (12)..(12): Xaa in position 12 is Val, Ile or Leu
  Variant (13)..(13): Xaa in position 13 is Pro, Ser, Glu or Ala
  Variant (14)..(16): Xaa in position 14 to 16 is any amino acid
  Variant (17)..(17): Xaa in position 17 is Tyr, Leu or Phe
  Variant (18)..(18): Xaa in position 18 is Tyr, Trp, Phe or His
  Variant (20)..(20): Xaa in position 20 is Ile, Val or Ala
  Variant (21)..(21): Xaa in position 21 is Gln, His or Asn
  Variant (22)..(22): Xaa in position 22 is Thr or Ser
  Variant (23)..(23): Xaa in position 23 is any amino acid
  Variant (25)..(25): Xaa in position 25 is Ala, Ser or Gly
  Variant (26)..(27): Xaa in position 26 to 27 is any amino acid
  Variant (29)..(29): Xaa in position 29 is Phe, Tyr or Val
  Variant (30)..(30): Xaa in position 30 is any amino acid
  Variant (31)..(31): Xaa in position 31 is Ile, Leu or Val
  Variant (32)..(32): Xaa in position 32 is Ser, Thr or Gly
  Variant (33)..(40): Xaa in position 33 to 40 is any amino acid
  Variant (41)..(42): Xaa in position 41 to 42 is any or no amino acid
  Variant (43)..(43): Xaa in position 43 is Ile, Val or Met
  Variant (44)..(44): Xaa in position 44 is any amino acid
  Variant (45)..(45): Xaa in position 45 is Ala, Gly or Ser
  Variant (46)..(48): Xaa in position 46 to 48 is any amino acid
  Variant (49)..(49): Xaa in position 49 is Val, Thr, Ile or Leu

SEQ ID NO: 33377 - protein, 57 aa, Artificial sequence; identical to SEQ ID NO: 13506
  Consensus
  Variant (1)..(1): Xaa in position 1 is Gln or Ser
  Variant (2)..(2): Xaa in position 2 is Gly, Thr or Ala
  Variant (4)..(4): Xaa in position 4 is Ala or Ser
  Variant (7)..(7): Xaa in position 7 is Ser, Gln or Thr
  Variant (8)..(8): Xaa in position 8 is any amino acid
  Variant (9)..(9): Xaa in position 9 is Asn or His
  Variant (12)..(12): Xaa in position 12 is any amino acid
  Variant (16)..(16): Xaa in position 16 is Ile, Leu or Val
  Variant (17)..(17): Xaa in position 17 is Ala, Ser, Thr or Gly
  Variant (19)..(19): Xaa in position 19 is Arg, Ile, Leu or Val
  Variant (20)..(20): Xaa in position 20 is Ala, Gly or Leu
  Variant (21)..(21): Xaa in position 21 is any amino acid
  Variant (22)..(22): Xaa in position 22 is Glu, Ile, Gln, Thr or Arg
  Variant (23)..(23): Xaa in position 23 is any amino acid
  Variant (24)..(24): Xaa in position 24 is Leu, Met, Arg, Ala or Ile
  Variant (25)..(25): Xaa in position 25 is Gly, Asn or Pro
  Variant (26)..(27): Xaa in position 26 to 27 is any or no amino acid
  Variant (28)..(28): Xaa in position 28 is Lys, Arg, Ala or Pro
  Variant (29)..(29): Xaa in position 29 is Gly or Val
  Variant (30)..(30): Xaa in position 30 is any amino acid
  Variant (31)..(31): Xaa in position 31 is Tyr, Phe or no amino acid
  Variant (32)..(33): Xaa in position 32 to 33 is any or no amino acid
  Variant (34)..(34): Xaa in position 34 is Leu, Val, Ile or Cys
  Variant (35)..(35): Xaa in position 35 is His, Asn, Ser or Asp
  Variant (37)..(37): Xaa in position 37 is Asn, Met, Ile or Leu
  Variant (38)..(38): Xaa in position 38 is any amino acid
  Variant (39)..(39): Xaa in position 39 is His or Asp
  Variant (40)..(40): Xaa in position 40 is Val or Leu
  Variant (42)..(42): Xaa in position 42 is any amino acid
  Variant (43)..(43): Xaa in position 43 is Ser, Ala, Cys, Gly or His
  Variant (46)..(46): Xaa in position 46 is Thr, Ser or Gln
  Variant (48)..(48): Xaa in position 48 is Asp or Cys
  Variant (49)..(49): Xaa in position 49 is Ala, Val, Thr or Ser
  Variant (50)..(50): Xaa in position 50 is Tyr, Phe or Ile
  Variant (51)..(51): Xaa in position 51 is Pro or Ser
  Variant (52)..(52): Xaa in position 52 is Thr, Ser or Ala
  Variant (53)..(53): Xaa in position 53 is Ala, Gly, Val, Ser or Met
  Variant (54)..(54): Xaa in position 54 is any amino acid
  Variant (55)..(55): Xaa in position 55 is Arg, His, Lys or Asn
  Variant (56)..(56): Xaa in position 56 is Ile, Leu, Val or Met
  Variant (57)..(57): Xaa in position 57 is Ala, Gly, Ser or Thr

SEQ ID NO: 33378 - protein, 56 aa, Artificial sequence; identical to SEQ ID NO: 13507
  Consensus
  Variant (1)..(1): Xaa in position 1 is Leu, Ile or Val
  Variant (2)..(2): Xaa in position 2 is Lys or Arg
  Variant (3)..(3): Xaa in position 3 is any amino acid
  Variant (4)..(4): Xaa in position 4 is Gly or Ala
  Variant (7)..(7): Xaa in position 7 is Gln or His
  Variant (8)..(8): Xaa in position 8 is Leu, Thr or Met
  Variant (9)..(9): Xaa in position 9 is Gln, Glu or Met
  Variant (11)..(11): Xaa in position 11 is Ala or Gly
  Variant (12)..(12): Xaa in position 12 is Val, Thr, Leu, Ala or Pro
  Variant (14)..(14): Xaa in position 14 is Met, Ile, Leu or Val
  Variant (15)..(15): Xaa in position 15 is Thr, Arg, Ser, Met or Leu
  Variant (16)..(16): Xaa in position 16 is Leu, Val, Met, Phe or Tyr
  Variant (18)..(18): Xaa in position 18 is any amino acid
  Variant (19)..(19): Xaa in position 19 is Glu or Thr
  Variant (21)..(21): Xaa in position 21 is any amino acid
  Variant (22)..(22): Xaa in position 22 is Ala, Gly, Thr or Ser
  Variant (23)..(23): Xaa in position 23 is Phe, Tyr or Trp
  Variant (24)..(26): Xaa in position 24 to 26 is any amino acid
  Variant (27)..(27): Xaa in position 27 is Leu, Val, Ile, Met or Phe
  Variant (28)..(29): Xaa in position 28 to 29 is any amino acid
  Variant (30)..(30): Xaa in position 30 is Asp, Glu, Gly, His or Asn
  Variant (31)..(33): Xaa in position 31 to 33 is any amino acid
  Variant (34)..(34): Xaa in position 34 is Leu, Ile, Val or Phe
  Variant (35)..(38): Xaa in position 35 to 38 is any amino acid
  Variant (39)..(39): Xaa in position 39 is Pro or no amino acid
  Variant (40)..(41): Xaa in position 40 to 41 is any amino acid
  Variant (42)..(42): Xaa in position 42 is Leu, Ile, Met, Val or Phe
  Variant (43)..(44): Xaa in position 43 to 44 is any amino acid
  Variant (45)..(45): Xaa in position 45 is Val, Ile, Leu or Met
  Variant (46)..(46): Xaa in position 46 is Asn, Ala, Gly or Ser
  Variant (47)..(47): Xaa in position 47 is Leu, Met, Ile or Gln
  Variant (49)..(49): Xaa in position 49 is Ala or Gly
  Variant (50)..(50): Xaa in position 50 is Thr or Ser
  Variant (51)..(51): Xaa in position 51 is Ala or Val
  Variant (52)..(52): Xaa in position 52 is Ile, Val or Ala
  Variant (55)..(55): Xaa in position 55 is Gly, Arg, Ala, Ser or Lys
  Variant (56)..(56): Xaa in position 56 is Leu, Ile, Val or Met

SEQ ID NO: 33379 - protein, 105 aa, Artificial sequence; identical to SEQ ID NO: 13508
  Consensus
  Variant (1)..(1): Xaa in position 1 is Lys or Arg
  Variant (2)..(2): Xaa in position 2 is any amino acid
  Variant (3)..(3): Xaa in position 3 is Cys, Ala, Ser or Gly
  Variant (4)..(4): Xaa in position 4 is Asn, Ser, His, Asp or Gly
  Variant (6)..(6): Xaa in position 6 is Leu or Ile
  Variant (8)..(8): Xaa in position 8 is Leu, Phe or Ile
  Variant (9)..(9): Xaa in position 9 is Leu or Met
  Variant (10)..(10): Xaa in position 10 is any amino acid
  Variant (14)..(15): Xaa in position 14 to 15 is any amino acid
  Variant (16)..(16): Xaa in position 16 is Gly or Val
  Variant (17)..(17): Xaa in position 17 is Leu, Ile or Phe
  Variant (18)..(18): Xaa in position 18 is any amino acid
  Variant (19)..(19): Xaa in position 19 is Glu or Asp
  Variant (20)..(20): Xaa in position 20 is Ile, Leu, Phe or Val
  Variant (21)..(21): Xaa in position 21 is any amino acid
  Variant (22)..(22): Xaa in position 22 is Leu, Val or Ile
  Variant (23)..(23): Xaa in position 23 is Pro or Glu
  Variant (24)..(25): Xaa in position 24 to 25 is any amino acid
  Variant (26)..(26): Xaa in position 26 is Gln, Glu or Ala
  Variant (27)..(27): Xaa in position 27 is Pro, Ala, Asn or Gln
  Variant (34)..(34): Xaa in position 34 is Gly or Ala
  Variant (36)..(36): Xaa in position 36 is Val, Ile or Tyr
  Variant (39)..(39): Xaa in position 39 is Val, Thr or Ser
  Variant (40)..(40): Xaa in position 40 is Ile, Met, Val, Gln or Leu
  Variant (41)..(41): Xaa in position 41 is Pro, Cys, Ala or Ser
  Variant (43)..(43): Xaa in position 43 is any amino acid
  Variant (44)..(44): Xaa in position 44 is Val, Ile, Leu, Met or Thr
  Variant (45)..(45): Xaa in position 45 is any amino acid
  Variant (46)..(46): Xaa in position 46 is Gln, Met, Thr or Leu
  Variant (47)..(47): Xaa in position 47 is Val, Ile, Thr, Ala or Cys
  Variant (48)..(48): Xaa in position 48 is Cys, Ala or Ser
  Variant (49)..(49): Xaa in position 49 is Phe, Tyr, Ala, His or Met
  Variant (50)..(50): Xaa in position 50 is any amino acid
  Variant (51)..(51): Xaa in position 51 is Val, Ile or Ala
  Variant (52)..(52): Xaa in position 52 is any amino acid
  Variant (53)..(53): Xaa in position 53 is Gly, Ala or Ser
  Variant (54)..(54): Xaa in position 54 is any amino acid
  Variant (55)..(55): Xaa in position 55 is Asp, His, Gln or Asn
  Variant (56)..(56): Xaa in position 56 is any amino acid
  Variant (57)..(57): Xaa in position 57 is Thr, Ala, Cys, Ser or Ile
  Variant (58)..(58): Xaa in position 58 is Val, Ile or Leu
  Variant (59)..(60): Xaa in position 59 to 60 is any amino acid
  Variant (61)..(61): Xaa in position 61 is Ala, Gly or Ser
  Variant (62)..(62): Xaa in position 62 is Ala, Ser, Gly, Val or Cys
  Variant (63)..(63): Xaa in position 63 is Glu, Ser, Gln, Ala or Asp
  Variant (64)..(64): Xaa in position 64 is any amino acid
  Variant (65)..(65): Xaa in position 65 is Gly or Ala
  Variant (66)..(66): Xaa in position 66 is Gln, His or Asn
  Variant (67)..(67): Xaa in position 67 is Leu, Phe or Met
  Variant (68)..(68): Xaa in position 68 is Gln or Glu
  Variant (71)..(71): Xaa in position 71 is Val, Ala or Gln
  Variant (72)..(72): Xaa in position 72 is Met or Phe
  Variant (73)..(73): Xaa in position 73 is any amino acid
  Variant (75)..(75): Xaa in position 75 is any amino acid
  Variant (76)..(76): Xaa in position 76 is Ile, Leu, Met, Thr or Val
  Variant (77)..(79): Xaa in position 77 to 79 is any amino acid
  Variant (80)..(80): Xaa in position 80 is Leu, Met, Ile or Cys
  Variant (81)..(82): Xaa in position 81 to 82 is any amino acid
  Variant (83)..(83): Xaa in position 83 is Ser, Gly or Thr
  Variant (84)..(86): Xaa in position 84 to 86 is any amino acid
  Variant (87)..(87): Xaa in position 87 is Leu, Met or Ile
  Variant (88)..(89): Xaa in position 88 to 89 is any amino acid
  Variant (90)..(90): Xaa in position 90 is Ala, Gly, Thr or Val
  Variant (91)..(93): Xaa in position 91 to 93 is any amino acid
  Variant (94)..(94): Xaa in position 94 is Leu or Phe
  Variant (95)..(96): Xaa in position 95 to 96 is any amino acid
  Variant (97)..(97): Xaa in position 97 is any or no amino acid
  Variant (98)..(98): Xaa in position 98 is Cys, Ala, Tyr or Leu
  Variant (99)..(99): Xaa in position 99 is Ile, Val or Leu
  Variant (100)..(101): Xaa in position 100 to 101 is any amino acid
  Variant (102)..(102): Xaa in position 102 is Ile, Leu, Met or Val
  Variant (103)..(103): Xaa in position 103 is any amino acid
  Variant (104)..(104): Xaa in position 104 is Ala, Val, Ile, Pro or Gly
  Variant (105)..(105): Xaa in position 105 is Asn, Asp or Gln

SEQ ID NO: 33380 - DNA, 1791 bp, Saccharomyces cerevisiae; identical to SEQ ID NO: 7248
  CDS (2)..(1504)

SEQ ID NO: 33381 - protein, 500 aa, Saccharomyces cerevisiae; identical to SEQ ID NO: 7249

SEQ ID NO: 33382 - DNA, 1461 bp, Vibrio cholerae; identical to SEQ ID NO: 7250
  CDS (1)..(1461)

SEQ ID NO: 33383 - protein, 486 aa, Vibrio cholerae; identical to SEQ ID NO: 7251

SEQ ID NO: 33384 - DNA, 1455 bp, Chlamydophila pneumoniae, Chlamydia pneumoniae; identical to SEQ ID NO: 7252
  CDS (1)..(1455)

SEQ ID NO: 33385 - protein, 484 aa, Chlamydophila pneumoniae, Chlamydia pneumoniae; identical to SEQ ID NO: 7253

SEQ ID NO: 33386 - DNA, 1419 bp, Clostridium acetobutylicum; identical to SEQ ID NO: 7254
  CDS (1)..(1419)

SEQ ID NO: 33387 - protein, 472 aa, Clostridium acetobutylicum; identical to SEQ ID NO: 7255

SEQ ID NO: 33388 - DNA, 1413 bp, Yersinia pestis; identical to SEQ ID NO: 7256
  CDS (1)..(1413)

SEQ ID NO: 33389 - protein, 470 aa, Yersinia pestis; identical to SEQ ID NO: 7257

SEQ ID NO: 33390 - DNA, 1413 bp, Salmonella enterica subsp. enterica serovar Typhi; identical to SEQ ID NO: 7258
  CDS (1)..(1413)

SEQ ID NO: 33391 - protein, 470 aa, Salmonella enterica subsp. enterica serovar Typhi; identical to SEQ ID NO: 7259

SEQ ID NO: 33392 - DNA, 1758 bp, Listeria innocua; identical to SEQ ID NO: 7260
  CDS (1)..(1758)

SEQ ID NO: 33393 - protein, 585 aa, Listeria innocua; identical to SEQ ID NO: 7261

SEQ ID NO: 33394 - DNA, 1431 bp, Nostoc sp. PCC 7120; identical to SEQ ID NO: 7262
  CDS (1)..(1431)

SEQ ID NO: 33395 - protein, 476 aa, Nostoc sp. PCC 7120; identical to SEQ ID NO: 7263

SEQ ID NO: 33396 - DNA, 1440 bp, Agrobacterium tumefaciens; identical to SEQ ID NO: 7264
  CDS (1)..(1440)

SEQ ID NO: 33397 - protein, 479 aa, Agrobacterium tumefaciens; identical to SEQ ID NO: 7265

SEQ ID NO: 33398 - DNA, 1770 bp, Nostoc sp. PCC 7120; identical to SEQ ID NO: 7266
  CDS (1)..(1770)

SEQ ID NO: 33399 - protein, 589 aa, Nostoc sp. PCC 7120; identical to SEQ ID NO: 7267

SEQ ID NO: 33400 - DNA, 1401 bp, Thermotoga maritima; identical to SEQ ID NO: 7268
  CDS (1)..(1401)

SEQ ID NO: 33401 - protein, 466 aa, Thermotoga maritima; identical to SEQ ID NO: 7269

SEQ ID NO: 33402 - DNA, 1377 bp, Aeropyrum pernix; identical to SEQ ID NO: 7270
  CDS (1)..(1377)

SEQ ID NO: 33403 - protein, 458 aa, Aeropyrum pernix; identical to SEQ ID NO: 7271

SEQ ID NO: 33404 - DNA, 1449 bp, Deinococcus radiodurans; identical to SEQ ID NO: 7272
  CDS (1)..(1449)

SEQ ID NO: 33405 - protein, 482 aa, Deinococcus radiodurans; identical to SEQ ID NO: 7273

SEQ ID NO: 33406 - DNA, 1446 bp, Vibrio cholerae; identical to SEQ ID NO: 7274
  CDS (1)..(1446)

SEQ ID NO: 33407 - protein, 481 aa, Vibrio cholerae; identical to SEQ ID NO: 7275

SEQ ID NO: 33408 - DNA, 1740 bp, Halobacterium sp. NRC-1; identical to SEQ ID NO: 7276
  CDS (1)..(1740)

SEQ ID NO: 33409 - protein, 579 aa, Halobacterium sp. NRC-1; identical to SEQ ID NO: 7277

SEQ ID NO: 33410 - DNA, 1437 bp, Haemophilus influenzae; identical to SEQ ID NO: 7278
  CDS (1)..(1437)

SEQ ID NO: 33411 - protein, 478 aa, Haemophilus influenzae; identical to SEQ ID NO: 7279

SEQ ID NO: 33412 - DNA, 1434 bp, Borrelia burgdorferi (Lyme disease spirochete); identical to SEQ ID NO: 7280
  CDS (1)..(1434)

SEQ ID NO: 33413 - protein, 477 aa, Borrelia burgdorferi (Lyme disease spirochete); identical to SEQ ID NO: 7281

SEQ ID NO: 33414 - DNA, 1413 bp, Vibrio cholerae; identical to SEQ ID NO: 7282
  CDS (1)..(1413)

SEQ ID NO: 33415 - protein, 470 aa, Vibrio cholerae; identical to SEQ ID NO: 7283

SEQ ID NO: 33416 - DNA, 1755 bp, Bacillus halodurans; identical to SEQ ID NO: 7284
  CDS (1)..(1755)

SEQ ID NO: 33417 - protein, 584 aa, Bacillus halodurans; identical to SEQ ID NO: 7285

SEQ ID NO: 33418 - DNA, 1443 bp, Buchnera sp; identical to SEQ ID NO: 7286
  CDS (1)..(1443)

SEQ ID NO: 33419 - protein, 480 aa, Buchnera sp; identical to SEQ ID NO: 7287

SEQ ID NO: 33420 - DNA, 1344 bp, Methanococcus jannaschii; identical to SEQ ID NO: 7288
  CDS (1)..(1344)

SEQ ID NO: 33421 - protein, 447 aa, Methanococcus jannaschii; identical to SEQ ID NO: 7289

SEQ ID NO: 33422 - DNA, 1413 bp, Escherichia coli; identical to SEQ ID NO: 7290
  CDS (1)..(1413)

SEQ ID NO: 33423 - protein, 470 aa, Escherichia coli; identical to SEQ ID NO: 7291

SEQ ID NO: 33424 - DNA, 1434 bp, Pseudomonas aeruginosa; identical to SEQ ID NO: 7292
  CDS (1)..(1434)

SEQ ID NO: 33425 - protein, 477 aa, Pseudomonas aeruginosa; identical to SEQ ID NO: 7293

SEQ ID NO: 33426 - DNA, 1509 bp, Lactococcus lactis subsp. lactis; identical to SEQ ID NO: 7294
  CDS (1)..(1509)

SEQ ID NO: 33427 - protein, 502 aa, Lactococcus lactis subsp. lactis; identical to SEQ ID NO: 7295

SEQ ID NO: 33428 - DNA, 1431 bp, Caulobacter crescentus; identical to SEQ ID NO: 7296
  CDS (1)..(1431)

SEQ ID NO: 33429 - protein, 476 aa, Caulobacter crescentus; identical to SEQ ID NO: 7297

SEQ ID NO: 33430 - DNA, 1452 bp, Pseudomonas aeruginosa; identical to SEQ ID NO: 7298
  CDS (1)..(1452)

SEQ ID NO: 33431 - protein, 483 aa, Pseudomonas aeruginosa; identical to SEQ ID NO: 7299

SEQ ID NO: 33432 - DNA, 1437 bp, Pyrococcus horikoshii; identical to SEQ ID NO: 7300
  CDS (1)..(1437)

SEQ ID NO: 33433 - protein, 478 aa, Pyrococcus horikoshii; identical to SEQ ID NO: 7301

SEQ ID NO: 33434 - DNA, 1443 bp, Campylobacter jejuni; identical to SEQ ID NO: 7302
  CDS (1)..(1443)

SEQ ID NO: 33435 - protein, 480 aa, Campylobacter jejuni; identical to SEQ ID NO: 7303

SEQ ID NO: 33436 - DNA, 1446 bp, Chlamydia muridarum, Chlamydia trachomatis MoPn; identical to SEQ ID NO: 7304
  CDS (1)..(1446)

SEQ ID NO: 33437 - protein, 481 aa, Chlamydia muridarum, Chlamydia trachomatis MoPn; identical to SEQ ID NO: 7305

SEQ ID NO: 33438 - DNA, 1704 bp, Arabidopsis thaliana (mouse-ear cress); identical to SEQ ID NO: 7306
  CDS (1)..(1704)

SEQ ID NO: 33439 - protein, 567 aa, Arabidopsis thaliana (mouse-ear cress); identical to SEQ ID NO: 7307

SEQ ID NO: 33440 - DNA, 1758 bp, Staphylococcus aureus; identical to SEQ ID NO: 7308
  CDS (1)..(1758)

SEQ ID NO: 33441 - protein, 585 aa, Staphylococcus aureus; identical to SEQ ID NO: 7309

SEQ ID NO: 33442 - DNA, 1758 bp, Bacillus subtilis; identical to SEQ ID NO: 7310
  CDS (1)..(1758)

SEQ ID NO: 33443 - protein, 585 aa, Bacillus subtilis; identical to SEQ ID NO: 7311

SEQ ID NO: 33444 - DNA, 1419 bp, Mycobacterium tuberculosis; identical to SEQ ID NO: 7312
  CDS (1)..(1419)

SEQ ID NO: 33445 - protein, 472 aa, Mycobacterium tuberculosis; identical to SEQ ID NO: 7313

SEQ ID NO: 33446 - DNA, 1458 bp, Chlamydia trachomatis; identical to SEQ ID NO: 7314
  CDS (1)..(1458)

SEQ ID NO: 33447 - protein, 485 aa, Chlamydia trachomatis; identical to SEQ ID NO: 7315

SEQ ID NO: 33448 - DNA, 1437 bp, Pyrococcus abyssi; identical to SEQ ID NO: 7316
  CDS (1)..(1437)

SEQ ID NO: 33449 - protein, 478 aa, Pyrococcus abyssi; identical to SEQ ID NO: 7317

SEQ ID NO: 33450 - DNA, 1473 bp, Neisseria meningitidis; identical to SEQ ID NO: 7318
  CDS (1)..(1473)

SEQ ID NO: 33451 - protein, 490 aa, Neisseria meningitidis; identical to SEQ ID NO: 7319

SEQ ID NO: 33452 - DNA, 1506 bp, Streptococcus pneumoniae; identical to SEQ ID NO: 7320
  CDS (1)..(1506)

SEQ ID NO: 33453 - protein, 501 aa, Streptococcus pneumoniae; identical to SEQ ID NO: 7321

SEQ ID NO: 33454 - DNA, 1422 bp, Clostridium acetobutylicum; identical to SEQ ID NO: 7322
  CDS (1)..(1422)

SEQ ID NO: 33455 - protein, 473 aa, Clostridium acetobutylicum; identical to SEQ ID NO: 7323

SEQ ID NO: 33456 - DNA, 1359 bp, Sulfolobus solfataricus; identical to SEQ ID NO: 7324
  CDS (1)..(1359)

SEQ ID NO: 33457 - protein, 452 aa, Sulfolobus solfataricus; identical to SEQ ID NO: 7325

SEQ ID NO: 33458 - DNA, 1428 bp, Mycoplasma pulmonis; identical to SEQ ID NO: 7326
  CDS (1)..(1428): transl_table=4

SEQ ID NO: 33459 - protein, 475 aa, Mycoplasma pulmonis; identical to SEQ ID NO: 7327

SEQ ID NO: 33460 - DNA, 1533 bp, Solanum tuberosum (potato); identical to SEQ ID NO: 7328
  CDS (1)..(1533)

SEQ ID NO: 33461 - protein, 510 aa, Solanum tuberosum (potato); identical to SEQ ID NO: 7329

SEQ ID NO: 33462 - DNA, 2083 bp, Bacillus psychrophilus; identical to SEQ ID NO: 7330
  CDS (271)..(2031)

SEQ ID NO: 33463 - protein, 586 aa, Bacillus psychrophilus; identical to SEQ ID NO: 7331

SEQ ID NO: 33464 - DNA, 2054 bp, Bacillus licheniformis; identical to SEQ ID NO: 7332
  CDS (132)..(1889)

SEQ ID NO: 33465 - protein, 585 aa, Bacillus licheniformis; identical to SEQ ID NO: 7333

SEQ ID NO: 33466 - DNA, 1617 bp, Trichoderma reesei; identical to SEQ ID NO: 7334
  CDS (1)..(1617)

SEQ ID NO: 33467 - protein, 538 aa, Trichoderma reesei; identical to SEQ ID NO: 7335

SEQ ID NO: 33468 - DNA, 1725 bp, Rattus norvegicus (Norway rat); identical to SEQ ID NO: 7336
  CDS (1)..(1725)

SEQ ID NO: 33469 - protein, 574 aa, Rattus norvegicus (Norway rat); identical to SEQ ID NO: 7337

SEQ ID NO: 33470 - DNA, 1596 bp, Trypanosoma brucei; identical to SEQ ID NO: 7338
  CDS (59)..(1558)

SEQ ID NO: 33471 - protein, 499 aa, Trypanosoma brucei; identical to SEQ ID NO: 7339

SEQ ID NO: 33472 - DNA, 1581 bp, Aspergillus niger; identical to SEQ ID NO: 7340
  CDS (1)..(1581)

SEQ ID NO: 33473 - protein, 526 aa, Aspergillus niger; identical to SEQ ID NO: 7341

SEQ ID NO: 33474 - DNA, 1636 bp, Bacillus stearothermophilus; identical to SEQ ID NO: 7342
  CDS (114)..(1598)

SEQ ID NO: 33475 - protein, 494 aa, Bacillus stearothermophilus; identical to SEQ ID NO: 7343

SEQ ID NO: 33476 - DNA, 1581 bp, Emericella nidulans, Aspergillus nidulans; identical to SEQ ID NO: 7344
  CDS (1)..(1581)

SEQ ID NO: 33477 - protein, 526 aa, Emericella nidulans, Aspergillus nidulans; identical to SEQ ID NO: 7345

SEQ ID NO: 33478 - DNA, 1847 bp, Nicotiana tabacum (common tobacco); identical to SEQ ID NO: 7346
  CDS (45)..(1571)

SEQ ID NO: 33479 - protein, 508 aa, Nicotiana tabacum (common tobacco); identical to SEQ ID NO: 7347

SEQ ID NO: 33480 - DNA, 2243 bp, Nicotiana tabacum (common tobacco); identical to SEQ ID NO: 7348
  CDS (318)..(2006)

SEQ ID NO: 33481 - protein, 562 aa, Nicotiana tabacum (common tobacco); identical to SEQ ID NO: 7349

SEQ ID NO: 33482 - DNA, 2044 bp, Xenopus sp. (clawed frog); identical to SEQ ID NO: 7350
  CDS (29)..(1612)

SEQ ID NO: 33483 - protein, 527 aa, Xenopus sp. (clawed frog); identical to SEQ ID NO: 7351

SEQ ID NO: 33484 - DNA, 2146 bp, Mus musculus (house mouse); identical to SEQ ID NO: 7352
  CDS (30)..(1625)

SEQ ID NO: 33485 - protein, 531 aa, Mus musculus (house mouse); identical to SEQ ID NO: 7353

SEQ ID NO: 33486 - DNA, 1596 bp, Homo sapiens (man); identical to SEQ ID NO: 7354
  CDS (1)..(1596)

SEQ ID NO: 33487 - protein, 531 aa, Homo sapiens (man) [sequence omitted]

SEQ ID NO: 33488 - DNA, 2113 bp, Saccharomyces cerevisiae; identical to SEQ ID NO: 7356
  CDS (437)..(1957)

SEQ ID NO: 33489 - protein, 506 aa, Saccharomyces cerevisiae; identical to SEQ ID NO: 7357

SEQ ID NO: 33490 - DNA, 1527 bp, Mycoplasma pneumoniae; identical to SEQ ID NO: 7358
  CDS (1)..(1527): transl_table=4

SEQ ID NO: 33491 - protein, 508 aa, Mycoplasma pneumoniae; identical to SEQ ID NO: 7359

SEQ ID NO: 33492 - DNA, 1452 bp, Synechocystis sp; identical to SEQ ID NO: 7360
  CDS (1)..(1452)

SEQ ID NO: 33493 - protein, 483 aa, Synechocystis sp; identical to SEQ ID NO: 7361

SEQ ID NO: 33494 - DNA, 1776 bp, Synechocystis sp; identical to SEQ ID NO: 7362
  CDS (1)..(1776)

SEQ ID NO: 33495 - protein, 591 aa, Synechocystis sp; identical to SEQ ID NO: 7363

SEQ ID NO: 33496 - DNA, 1494 bp, Arabidopsis thaliana (mouse-ear cress); identical to SEQ ID NO: 7364
  CDS (1)..(1494)

SEQ ID NO: 33497 - protein, 497 aa, Arabidopsis thaliana (mouse-ear cress); identical to SEQ ID NO: 7365

SEQ ID NO: 33498 - DNA, 2115 bp, Ricinus communis (castor bean); identical to SEQ ID NO: 7366
  CDS (118)..(1869)

SEQ ID NO: 33499 - protein, 583 aa, Ricinus communis (castor bean); identical to SEQ ID NO: 7367

SEQ ID NO: 33500 - DNA, 2022 bp, Ricinus communis (castor bean); identical to SEQ ID NO: 7368
  CDS (46)..(1527)

SEQ ID NO: 33501 - protein, 493 aa, Ricinus communis (castor bean); identical to SEQ ID NO: 7369

SEQ ID NO: 33502 - DNA, 1548 bp, Caenorhabditis elegans; identical to SEQ ID NO: 7370
  CDS (1)..(1548)

SEQ ID NO: 33503 - protein, 515 aa, Caenorhabditis elegans; identical to SEQ ID NO: 7371

SEQ ID NO: 33504 - DNA, 1437 bp, Streptomyces coelicolor; identical to SEQ ID NO: 7372
  CDS (1)..(1437)

SEQ ID NO: 33505 - protein, 478 aa, Streptomyces coelicolor; identical to SEQ ID NO: 7373

SEQ ID NO: 33506 - DNA, 1530 bp, Schizosaccharomyces pombe; identical to SEQ ID NO: 7374
  CDS (1)..(1530)

SEQ ID NO: 33507 - protein, 509 aa, Schizosaccharomyces pombe; identical to SEQ ID NO: 7375

SEQ ID NO: 33508 - DNA, 1584 bp, Arabidopsis thaliana (mouse-ear cress); identical to SEQ ID NO: 7376
  CDS (40)..(1584)

SEQ ID NO: 33509 - protein, 514 aa, Arabidopsis thaliana (mouse-ear cress); identical to SEQ ID NO: 7377

SEQ ID NO: 33510 - DNA, 1533 bp, Arabidopsis thaliana (mouse-ear cress); identical to SEQ ID NO: 7378
  CDS (1)..(1533)

SEQ ID NO: 33511 - protein, 510 aa, Arabidopsis thaliana (mouse-ear cress); identical to SEQ ID NO: 7379

SEQ ID NO: 33512 - DNA, 1479 bp, Arabidopsis thaliana (mouse-ear cress); identical to SEQ ID NO: 7380
  CDS (1)..(1479)

SEQ ID NO: 33513 - protein, 492 aa, Arabidopsis thaliana (mouse-ear cress); identical to SEQ ID NO: 7381

SEQ ID NO: 33514 - DNA, 1572 bp, synthetic construct; identical to SEQ ID NO: 7382
  CDS (1)..(1572)

SEQ ID NO: 33515 - protein, 523 aa, synthetic construct; identical to SEQ ID NO: 7383

SEQ ID NO: 33516 - DNA, 2795 bp, Corynebacterium glutamicum; identical to SEQ ID NO: 7384
  CDS (740)..(2173)

SEQ ID NO: 33517 - protein, 477 aa, Corynebacterium glutamicum; identical to SEQ ID NO: 7385

SEQ ID NO: 33518 - DNA, 2264 bp, Bacillus subtilis; identical to SEQ ID NO: 7386
  CDS (258)..(2012)

SEQ ID NO: 33519 - protein, 584 aa, Bacillus subtilis; identical to SEQ ID NO: 7387

SEQ ID NO: 33520 - DNA, 2569 bp, Zymomonas mobilis; identical to SEQ ID NO: 7388
  CDS (137)..(1564)

SEQ ID NO: 33521 - protein, 475 aa, Zymomonas mobilis; identical to SEQ ID NO: 7389

SEQ ID NO: 33522 - DNA, 1701 bp, Homo sapiens; identical to SEQ ID NO: 7390
  CDS (1)..(1701)

SEQ ID NO: 33523 - protein, 566 aa, Homo sapiens; identical to SEQ ID NO: 7391

SEQ ID NO: 33524 - DNA, 1515 bp, Debaryomyces hansenii; identical to SEQ ID NO: 7392
  CDS (1)..(1515)

SEQ ID NO: 33525 - protein, 504 aa, Debaryomyces hansenii; identical to SEQ ID NO: 7393

SEQ ID NO: 33526 - DNA, 1443 bp, Erwinia carotovora subsp; identical to SEQ ID NO: 7394
  CDS (1)..(1443)

SEQ ID NO: 33527 - protein, 480 aa, Erwinia carotovora subsp; identical to SEQ ID NO: 7395

SEQ ID NO: 33528 - DNA, 1179 bp, Mycoplasma arthritidis; identical to SEQ ID NO: 7396
  CDS (1)..(1179): transl-table=4

SEQ ID NO: 33529 - protein, 392 aa, Mycoplasma arthritidis; identical to SEQ ID NO: 7397

SEQ ID NO: 33530 - DNA, 1437 bp, Mesoplasma florum L1; identical to SEQ ID NO: 7398
  CDS (1)..(1437): transl_table=4

SEQ ID NO: 33531 - protein, 478 aa, Mesoplasma florum L1; identical to SEQ ID NO: 7399

SEQ ID NO: 33532 - DNA, 1506 bp, Candida glabrata; identical to SEQ ID NO: 7400
  CDS (1)..(1506)

SEQ ID NO: 33533 - protein, 501 aa, Candida glabrata; identical to SEQ ID NO: 7401

SEQ ID NO: 33534 - DNA, 1527 bp, Candida glabrata; identical to SEQ ID NO: 7402
  CDS (1)..(1527)

SEQ ID NO: 33535 - protein, 508 aa, Candida glabrata; identical to SEQ ID NO: 7403

SEQ ID NO: 33536 - DNA, 1071 bp, Bacillus thuringiensis serovar konkukian str; identical to SEQ ID NO: 7404
  CDS (1)..(1071)

SEQ ID NO: 33537 - protein, 356 aa, Bacillus thuringiensis serovar konkukian str; identical to SEQ ID NO: 7405

SEQ ID NO: 33538 - DNA, 1960 bp, Zea mays; identical to SEQ ID NO: 7406
  CDS (144)..(1673)

SEQ ID NO: 33539 - protein, 509 aa, Zea mays; identical to SEQ ID NO: 7407

SEQ ID NO: 33540 - DNA, 1452 bp, Mycoplasma mobile; identical to SEQ ID NO: 7408
  CDS (1)..(1452)

SEQ ID NO: 33541 - protein, 483 aa, Mycoplasma mobile; identical to SEQ ID NO: 7409

SEQ ID NO: 33542 - DNA, 1668 bp, Picrophilus torridus; identical to SEQ ID NO: 7410
  CDS (1)..(1668)

SEQ ID NO: 33543 - protein, 555 aa, Picrophilus torridus; identical to SEQ ID NO: 7411

SEQ ID NO: 33544 - DNA, 1536 bp, Plasmodium falciparum; identical to SEQ ID NO: 7412
  CDS (1)..(1536)

SEQ ID NO: 33545 - protein, 511 aa, Plasmodium falciparum; identical to SEQ ID NO: 7413

SEQ ID NO: 33546 - DNA, 1458 bp, Photobacterium profundum; identical to SEQ ID NO: 7414
  CDS (1)..(1458)

SEQ ID NO: 33547 - protein, 485 aa, Photobacterium profundum; identical to SEQ ID NO: 7415

SEQ ID NO: 33548 - DNA, 1413 bp, Photobacterium profundum; identical to SEQ ID NO: 7416
  CDS (1)..(1413)

SEQ ID NO: 33549 - protein, 470 aa, Photobacterium profundum; identical to SEQ ID NO: 7417

SEQ ID NO: 33550 - DNA, 1344 bp, Methanococcus maripaludis; identical to SEQ ID NO: 7418
  CDS (1)..(1344)

SEQ ID NO: 33551 - protein, 447 aa, Methanococcus maripaludis; identical to SEQ ID NO: 7419

SEQ ID NO: 33552 - DNA, 1797 bp, Parachlamydia sp; identical to SEQ ID NO: 7420
  CDS (1)..(1797)

SEQ ID NO: 33553 - protein, 598 aa, Parachlamydia sp; identical to SEQ ID NO: 7421

SEQ ID NO: 33554 - DNA, 1488 bp, Bdellovibrio bacteriovorus; identical to SEQ ID NO: 7422
  CDS (1)..(1488)

SEQ ID NO: 33555 - protein, 495 aa, Bdellovibrio bacteriovorus; identical to SEQ ID NO: 7423

SEQ ID NO: 33556 - DNA, 1437 bp, Mycoplasma mycoides; identical to SEQ ID NO: 7424
  CDS (1)..(1437): transl_table=4

SEQ ID NO: 33557 - protein, 478 aa, Mycoplasma mycoides; identical to SEQ ID NO: 7425

SEQ ID NO: 33558 - DNA, 1434 bp, Rhodopseudomonas palustris; identical to SEQ ID NO: 7426
  CDS (1)..(1434)

SEQ ID NO: 33559 - protein, 477 aa, Rhodopseudomonas palustris; identical to SEQ ID NO: 7427

SEQ ID NO: 33560 - DNA, 1422 bp, Corynebacterium diphtheriae; identical to SEQ ID NO: 7428
  CDS (1)..(1422)

SEQ ID NO: 33561 - protein, 473 aa, Corynebacterium diphtheriae; identical to SEQ ID NO: 7429

SEQ ID NO: 33562 - DNA, 3179 bp, Lactobacillus casei; identical to SEQ ID NO: 7430
  CDS (1307)..(3070)

SEQ ID NO: 33563 - protein, 587 aa, Lactobacillus casei; identical to SEQ ID NO: 7431

SEQ ID NO: 33564 - DNA, 1341 bp, Onion yellows phytoplasma; identical to SEQ ID NO: 7432
  CDS (1)..(1341)

SEQ ID NO: 33565 - protein, 446 aa, Onion yellows phytoplasma; identical to SEQ ID NO: 7433

SEQ ID NO: 33566 - DNA, 2023 bp, Oryza sativa; identical to SEQ ID NO: 7434
  CDS (324)..(1688)

SEQ ID NO: 33567 - protein, 454 aa, Oryza sativa; identical to SEQ ID NO: 7435

SEQ ID NO: 33568 - DNA, 1410 bp, Desulfovibrio vulgaris; identical to SEQ ID NO: 7436
  CDS (1)..(1410)

SEQ ID NO: 33569 - protein, 469 aa, Desulfovibrio vulgaris; identical to SEQ ID NO: 7437

SEQ ID NO: 33570 - DNA, 1425 bp, Thermus thermophilus; identical to SEQ ID NO: 7438
  CDS (1)..(1425)

SEQ ID NO: 33571 - protein, 474 aa, Thermus thermophilus; identical to SEQ ID NO: 7439

SEQ ID NO: 33572 - DNA, 1317 bp, Leptospira interrogans; identical to SEQ ID NO: 7440
  CDS (1)..(1317)

SEQ ID NO: 33573 - protein, 438 aa, Leptospira interrogans; identical to SEQ ID NO: 7441

SEQ ID NO: 33574 - DNA, 1758 bp, Bacillus cereus; identical to SEQ ID NO: 7442
  CDS (1)..(1758)

SEQ ID NO: 33575 - protein, 585 aa, Bacillus cereus; identical to SEQ ID NO: 7443

SEQ ID NO: 33576 - DNA, 1059 bp, Bacillus cereus; identical to SEQ ID NO: 7444
  CDS (1)..(1059): Xaa of translated CDS can stand for any naturally occuring amino acid which can be translated from respective CDS-codon

SEQ ID NO: 33577 - protein, 352 aa, Bacillus cereus; identical to SEQ ID NO: 7445
  misc_feature (224)..(224): Xaa can be any naturally occuring amino acid

SEQ ID NO: 33578 - DNA, 1416 bp, Treponema denticola; identical to SEQ ID NO: 7446
  CDS (1)..(1416)

SEQ ID NO: 33579 - protein, 471 aa, Treponema denticola; identical to SEQ ID NO: 7447

SEQ ID NO: 33580 - DNA, 1419 bp, Mycobacterium paratuberculosis; identical to SEQ ID NO: 7448
  CDS (1)..(1419)

SEQ ID NO: 33581 - protein, 472 aa, Mycobacterium paratuberculosis; identical to SEQ ID NO: 7449

SEQ ID NO: 33582 - DNA, 1443 bp, Geobacter sulfurreducens; identical to SEQ ID NO: 7450
  CDS (1)..(1443)

SEQ ID NO: 33583 - protein, 480 aa, Geobacter sulfurreducens; identical to SEQ ID NO: 7451

SEQ ID NO: 33584 - DNA, 1770 bp, Lactobacillus johnsonii; identical to SEQ ID NO: 7452
  CDS (1)..(1770)

SEQ ID NO: 33585 - protein, 589 aa, Lactobacillus johnsonii; identical to SEQ ID NO: 7453

SEQ ID NO: 33586 - DNA, 1506 bp, Ashbya gossypii; identical to SEQ ID NO: 7454
  CDS (1)..(1506)

SEQ ID NO: 33587 - protein, 501 aa, Ashbya gossypii; identical to SEQ ID NO: 7455

SEQ ID NO: 33588 - DNA, 1461 bp, Leptospira interrogans; identical to SEQ ID NO: 7456
  CDS (1)..(1461)

SEQ ID NO: 33589 - protein, 486 aa, Leptospira interrogans; identical to SEQ ID NO: 7457

SEQ ID NO: 33590 - DNA, 1519 bp, Bombyx mori; identical to SEQ ID NO: 7458
  CDS (130)..(1341)

SEQ ID NO: 33591 - protein, 403 aa, Bombyx mori; identical to SEQ ID NO: 7459

SEQ ID NO: 33592 - DNA, 1437 bp, Pyrococcus kodakaraensis; identical to SEQ ID NO: 7460
  CDS (1)..(1437)

SEQ ID NO: 33593 - protein, 478 aa, Pyrococcus kodakaraensis; identical to SEQ ID NO: 7461

SEQ ID NO: 33594 - DNA, 1503 bp, Streptococcus pyogenes; identical to SEQ ID NO: 7462
  CDS (1)..(1503)

SEQ ID NO: 33595 - protein, 500 aa, Streptococcus pyogenes; identical to SEQ ID NO: 7463

SEQ ID NO: 33596 - DNA, 1476 bp, Vibrio vulnificus; identical to SEQ ID NO: 7464
  CDS (1)..(1476)

SEQ ID NO: 33597 - protein, 491 aa, Vibrio vulnificus; identical to SEQ ID NO: 7465

SEQ ID NO: 33598 - DNA, 1449 bp, Vibrio vulnificus; identical to SEQ ID NO: 7466
  CDS (1)..(1449)

SEQ ID NO: 33599 - protein, 482 aa, Vibrio vulnificus; identical to SEQ ID NO: 7467

SEQ ID NO: 33600 - DNA, 1410 bp, Photorhabdus luminescens; identical to SEQ ID NO: 7468
  CDS (1)..(1410)

SEQ ID NO: 33601 - protein, 469 aa, Photorhabdus luminescens; identical to SEQ ID NO: 7469

SEQ ID NO: 33602 - DNA, 1443 bp, Photorhabdus luminescens; identical to SEQ ID NO: 7470
  CDS (1)..(1443)

SEQ ID NO: 33603 - protein, 480 aa, Photorhabdus luminescens; identical to SEQ ID NO: 7471

SEQ ID NO: 33604 - DNA, 1527 bp, Mycoplasma gallisepticum; identical to SEQ ID NO: 7472
  CDS (1)..(1527)

SEQ ID NO: 33605 - protein, 508 aa, Mycoplasma gallisepticum; identical to SEQ ID NO: 7473

SEQ ID NO: 33606 - DNA, 1818 bp, Gloeobacter violaceus; identical to SEQ ID NO: 7474
  CDS (1)..(1818)

SEQ ID NO: 33607 - protein, 605 aa, Gloeobacter violaceus; identical to SEQ ID NO: 7475

SEQ ID NO: 33608 - DNA, 1422 bp, Gloeobacter violaceus; identical to SEQ ID NO: 7476
  CDS (1)..(1422)

SEQ ID NO: 33609 - protein, 473 aa, Gloeobacter violaceus; identical to SEQ ID NO: 7477

SEQ ID NO: 33610 - DNA, 1407 bp, Chromobacterium violaceum; identical to SEQ ID NO: 7478
  CDS (1)..(1407)

SEQ ID NO: 33611 - protein, 468 aa, Chromobacterium violaceum; identical to SEQ ID NO: 7479

SEQ ID NO: 33612 - DNA, 1662 bp, Giardia lamblia ATCC 50803; identical to SEQ ID NO: 7480
  CDS (1)..(1662)

SEQ ID NO: 33613 - protein, 553 aa, Giardia lamblia ATCC 50803; identical to SEQ ID NO: 7481

SEQ ID NO: 33614 - DNA, 1536 bp, Plasmodium yoelii yoelii; identical to SEQ ID NO: 7482
  CDS (1)..(1536)

SEQ ID NO: 33615 - protein, 511 aa, Plasmodium yoelii yoelii; identical to SEQ ID NO: 7483

SEQ ID NO: 33616 - DNA, 1584 bp, Neurospora crassa; identical to SEQ ID NO: 7484
  CDS (1)..(1584)

SEQ ID NO: 33617 - protein, 527 aa, Neurospora crassa; identical to SEQ ID NO: 7485

SEQ ID NO: 33618 - DNA, 1455 bp, Synechococcus sp; identical to SEQ ID NO: 7486
  CDS (1)..(1455)

SEQ ID NO: 33619 - protein, 484 aa, Synechococcus sp; identical to SEQ ID NO: 7487

SEQ ID NO: 33620 - DNA, 1431 bp, Rhodopirellula baltica; identical to SEQ ID NO: 7488
  CDS (1)..(1431)

SEQ ID NO: 33621 - protein, 476 aa, Rhodopirellula baltica; identical to SEQ ID NO: 7489

SEQ ID NO: 33622 - DNA, 1791 bp, Prochlorococcus marinus subsp; identical to SEQ ID NO: 7490
  CDS (1)..(1791)

SEQ ID NO: 33623 - protein, 596 aa, Prochlorococcus marinus subsp; identical to SEQ ID NO: 7491

SEQ ID NO: 33624 - DNA, 1818 bp, Prochlorococcus marinus; identical to SEQ ID NO: 7492
  CDS (1)..(1818)

SEQ ID NO: 33625 - protein, 605 aa, Prochlorococcus marinus; identical to SEQ ID NO: 7493

SEQ ID NO: 33626 - DNA, 1785 bp, Prochlorococcus marinus; identical to SEQ ID NO: 7494
  CDS (1)..(1785)

SEQ ID NO: 33627 - protein, 594 aa, Prochlorococcus marinus; identical to SEQ ID NO: 7495

SEQ ID NO: 33628 - DNA, 1440 bp, Haemophilus ducreyi; identical to SEQ ID NO: 7496
  CDS (1)..(1440)

SEQ ID NO: 33629 - protein, 479 aa, Haemophilus ducreyi; identical to SEQ ID NO: 7497

SEQ ID NO: 33630 - DNA, 1467 bp, Candidatus Blochmannia floridanus; identical to SEQ ID NO: 7498
  CDS (1)..(1467)

SEQ ID NO: 33631 - protein, 488 aa, Candidatus Blochmannia floridanus; identical to SEQ ID NO: 7499

SEQ ID NO: 33632 - DNA, 1443 bp, Bordetella parapertussis; identical to SEQ ID NO: 7500
  CDS (1)..(1443)

SEQ ID NO: 33633 - protein, 480 aa, Bordetella parapertussis; identical to SEQ ID NO: 7501

SEQ ID NO: 33634 - DNA, 2002 bp, Oryza sativa; identical to SEQ ID NO: 7502
  CDS (113)..(1648)

SEQ ID NO: 33635 - protein, 511 aa, Oryza sativa; identical to SEQ ID NO: 7503

SEQ ID NO: 33636 - DNA, 1071 bp, Bacillus cereus; identical to SEQ ID NO: 7504
  CDS (1)..(1071)

SEQ ID NO: 33637 - protein, 356 aa, Bacillus cereus; identical to SEQ ID NO: 7505

SEQ ID NO: 33638 - DNA, 1059 bp, Bacillus anthracis; identical to SEQ ID NO: 7506
  CDS (1)..(1059)

SEQ ID NO: 33639 - protein, 352 aa, Bacillus anthracis; identical to SEQ ID NO: 7507

SEQ ID NO: 33640 - DNA, 1446 bp, Chlamydophila caviae; identical to SEQ ID NO: 7508
  CDS (1)..(1446)

SEQ ID NO: 33641 - protein, 481 aa, Chlamydophila caviae; identical to SEQ ID NO: 7509

SEQ ID NO: 33642 - DNA, 1437 bp, Streptomyces avermitilis; identical to SEQ ID NO: 7510
  CDS (1)..(1437)

SEQ ID NO: 33643 - protein, 478 aa, Streptomyces avermitilis; identical to SEQ ID NO: 7511

SEQ ID NO: 33644 - DNA, 1431 bp, Streptomyces avermitilis; identical to SEQ ID NO: 7512
  CDS (1)..(1431)

SEQ ID NO: 33645 - protein, 476 aa, Streptomyces avermitilis; identical to SEQ ID NO: 7513

SEQ ID NO: 33646 - DNA, 1491 bp, Nitrosomonas europaea; identical to SEQ ID NO: 7514
  CDS (1)..(1491)

SEQ ID NO: 33647 - protein, 496 aa, Nitrosomonas europaea; identical to SEQ ID NO: 7515

SEQ ID NO: 33648 - DNA, 1758 bp, Enterococcus faecalis; identical to SEQ ID NO: 7516
  CDS (1)..(1758)

SEQ ID NO: 33649 - protein, 585 aa, Enterococcus faecalis; identical to SEQ ID NO: 7517

SEQ ID NO: 33650 - DNA, 1434 bp, Coxiella burnetii; identical to SEQ ID NO: 7518
  CDS (1)..(1434)

SEQ ID NO: 33651 - protein, 477 aa, Coxiella burnetii; identical to SEQ ID NO: 7519

SEQ ID NO: 33652 - DNA, 1422 bp, Tropheryma whipplei; identical to SEQ ID NO: 7520
  CDS (1)..(1422)

SEQ ID NO: 33653 - protein, 473 aa, Tropheryma whipplei; identical to SEQ ID NO: 7521

SEQ ID NO: 33654 - DNA, 1416 bp, Tropheryma whipplei; identical to SEQ ID NO: 7522
  CDS (1)..(1416)

SEQ ID NO: 33655 - protein, 471 aa, Tropheryma whipplei; identical to SEQ ID NO: 7523

SEQ ID NO: 33656 - DNA, 1584 bp, Shigella flexneri; identical to SEQ ID NO: 7524
  CDS (1)..(1584)

SEQ ID NO: 33657 - protein, 527 aa, Shigella flexneri; identical to SEQ ID NO: 7525

SEQ ID NO: 33658 - DNA, 1425 bp, Microbispora rosea subsp; identical to SEQ ID NO: 7526
  CDS (1)..(1425)

SEQ ID NO: 33659 - protein, 474 aa, Microbispora rosea subsp; identical to SEQ ID NO: 7527

SEQ ID NO: 33660 - DNA, 1806 bp, Oryza sativa; identical to SEQ ID NO: 7528
  CDS (75)..(1721)

SEQ ID NO: 33661 - protein, 548 aa, Oryza sativa; identical to SEQ ID NO: 7529

SEQ ID NO: 33662 - DNA, 1506 bp, Kluyveromyces lactis; identical to SEQ ID NO: 7530
  CDS (1)..(1506)

SEQ ID NO: 33663 - protein, 501 aa, Kluyveromyces lactis; identical to SEQ ID NO: 7531

SEQ ID NO: 33664 - DNA, 1506 bp, Saccharomyces kluyveri; identical to SEQ ID NO: 7532
  CDS (1)..(1506)

SEQ ID NO: 33665 - protein, 501 aa, Saccharomyces kluyveri; identical to SEQ ID NO: 7533

SEQ ID NO: 33666 - DNA, 1506 bp, Saccharomyces castellii; identical to SEQ ID NO: 7534
  CDS (1)..(1506)

SEQ ID NO: 33667 - protein, 501 aa, Saccharomyces castellii; identical to SEQ ID NO: 7535

SEQ ID NO: 33668 - DNA, 1521 bp, Saccharomyces bayanus; identical to SEQ ID NO: 7536
  CDS (1)..(1521)

SEQ ID NO: 33669 - protein, 506 aa, Saccharomyces bayanus; identical to SEQ ID NO: 7537

SEQ ID NO: 33670 - DNA, 1467 bp, Xylella fastidiosa; identical to SEQ ID NO: 7538
  CDS (1)..(1467)

SEQ ID NO: 33671 - protein, 488 aa, Xylella fastidiosa; identical to SEQ ID NO: 7539

SEQ ID NO: 33672 - DNA, 1479 bp, Vibrio parahaemolyticus; identical to SEQ ID NO: 7540
  CDS (1)..(1479)

SEQ ID NO: 33673 - protein, 492 aa, Vibrio parahaemolyticus; identical to SEQ ID NO: 7541

SEQ ID NO: 33674 - DNA, 1443 bp, Vibrio parahaemolyticus; identical to SEQ ID NO: 7542
  CDS (1)..(1443)

SEQ ID NO: 33675 - protein, 480 aa, Vibrio parahaemolyticus; identical to SEQ ID NO: 7543

SEQ ID NO: 33676 - DNA, 1413 bp, Vibrio parahaemolyticus; identical to SEQ ID NO: 7544
  CDS (1)..(1413)

SEQ ID NO: 33677 - protein, 470 aa, Vibrio parahaemolyticus; identical to SEQ ID NO: 7545

SEQ ID NO: 33678 - DNA, 1452 bp, Pseudomonas syringae; identical to SEQ ID NO: 7546
  CDS (1)..(1452)

SEQ ID NO: 33679 - protein, 483 aa, Pseudomonas syringae; identical to SEQ ID NO: 7547

SEQ ID NO: 33680 - DNA, 1416 bp, Pseudomonas putida; identical to SEQ ID NO: 7548
  CDS (1)..(1416)

SEQ ID NO: 33681 - protein, 471 aa, Pseudomonas putida; identical to SEQ ID NO: 7549

SEQ ID NO: 33682 - DNA, 1455 bp, Pseudomonas putida; identical to SEQ ID NO: 7550
  CDS (1)..(1455)

SEQ ID NO: 33683 - protein, 484 aa, Pseudomonas putida; identical to SEQ ID NO: 7551

SEQ ID NO: 33684 - DNA, 1761 bp, Lactobacillus plantarum; identical to SEQ ID NO: 7552
  CDS (1)..(1761)

SEQ ID NO: 33685 - protein, 586 aa, Lactobacillus plantarum; identical to SEQ ID NO: 7553

SEQ ID NO: 33686 - DNA, 1755 bp, Clostridium tetani; identical to SEQ ID NO: 7554
  CDS (1)..(1755)

SEQ ID NO: 33687 - protein, 584 aa, Clostridium tetani; identical to SEQ ID NO: 7555

SEQ ID NO: 33688 - DNA, 1437 bp, Bradyrhizobium japonicum; identical to SEQ ID NO: 7556
  CDS (1)..(1437)

SEQ ID NO: 33689 - protein, 478 aa, Bradyrhizobium japonicum; identical to SEQ ID NO: 7557

SEQ ID NO: 33690 - DNA, 1458 bp, Bacteroides thetaiotaomicron; identical to SEQ ID NO: 7558
  CDS (1)..(1458)

SEQ ID NO: 33691 - protein, 485 aa, Bacteroides thetaiotaomicron; identical to SEQ ID NO: 7559

SEQ ID NO: 33692 - DNA, 2797 bp, Staphylococcus epidermidis; identical to SEQ ID NO: 7560
  CDS (854)..(2611)

SEQ ID NO: 33693 - protein, 585 aa, Staphylococcus epidermidis; identical to SEQ ID NO: 7561

SEQ ID NO: 33694 - DNA, 1440 bp, Wigglesworthia glossinidia brevipalpis; identical to SEQ ID NO: 7562
  CDS (1)..(1440)

SEQ ID NO: 33695 - protein, 479 aa, Wigglesworthia glossinidia brevipalpis; identical to SEQ ID NO: 7563

SEQ ID NO: 33696 - DNA, 1413 bp, Vibrio vulnificus; identical to SEQ ID NO: 7564
  CDS (1)..(1413)

SEQ ID NO: 33697 - protein, 470 aa, Vibrio vulnificus; identical to SEQ ID NO: 7565

SEQ ID NO: 33698 - DNA, 1785 bp, Synechococcus elongatus; identical to SEQ ID NO: 7566
  CDS (1)..(1785)

SEQ ID NO: 33699 - protein, 594 aa, Synechococcus elongatus; identical to SEQ ID NO: 7567

SEQ ID NO: 33700 - DNA, 1503 bp, Streptococcus mutans; identical to SEQ ID NO: 7568
  CDS (1)..(1503)

SEQ ID NO: 33701 - protein, 500 aa, Streptococcus mutans; identical to SEQ ID NO: 7569

SEQ ID NO: 33702 - DNA, 1503 bp, Streptococcus agalactiae; identical to SEQ ID NO: 7570
  CDS (1)..(1503)

SEQ ID NO: 33703 - protein, 500 aa, Streptococcus agalactiae; identical to SEQ ID NO: 7571

SEQ ID NO: 33704 - DNA, 1440 bp, Shewanella oneidensis; identical to SEQ ID NO: 7572
  CDS (1)..(1440)

SEQ ID NO: 33705 - protein, 479 aa, Shewanella oneidensis; identical to SEQ ID NO: 7573

SEQ ID NO: 33706 - DNA, 1761 bp, Oceanobacillus iheyensis; identical to SEQ ID NO: 7574
  CDS (1)..(1761)

SEQ ID NO: 33707 - protein, 586 aa, Oceanobacillus iheyensis; identical to SEQ ID NO: 7575

SEQ ID NO: 33708 - DNA, 1497 bp, Mycoplasma penetrans; identical to SEQ ID NO: 7576
  CDS (1)..(1497): transl_table=4

SEQ ID NO: 33709 - protein, 498 aa, Mycoplasma penetrans; identical to SEQ ID NO: 7577

SEQ ID NO: 33710 - DNA, 1584 bp, Escherichia coli O6; identical to SEQ ID NO: 7578
  CDS (1)..(1584)

SEQ ID NO: 33711 - protein, 527 aa, Escherichia coli O6; identical to SEQ ID NO: 7579

SEQ ID NO: 33712 - DNA, 1437 bp, Brucella suis; identical to SEQ ID NO: 7580
  CDS (1)..(1437)

SEQ ID NO: 33713 - protein, 478 aa, Brucella suis; identical to SEQ ID NO: 7581

SEQ ID NO: 33714 - DNA, 1530 bp, Bifidobacterium longum; identical to SEQ ID NO: 7582
  CDS (1)..(1530)

SEQ ID NO: 33715 - protein, 509 aa, Bifidobacterium longum; identical to SEQ ID NO: 7583

SEQ ID NO: 33716 - DNA, 1890 bp, Lactobacillus delbrueckii; identical to SEQ ID NO: 7584
  CDS (1)..(1770)

SEQ ID NO: 33717 - protein, 589 aa, Lactobacillus delbrueckii; identical to SEQ ID NO: 7585

SEQ ID NO: 33718 - DNA, 2043 bp, Stigmatella aurantiaca; identical to SEQ ID NO: 7586
  CDS (463)..(1896)

SEQ ID NO: 33719 - protein, 477 aa, Stigmatella aurantiaca; identical to SEQ ID NO: 7587

SEQ ID NO: 33720 - DNA, 1584 bp, Arabidopsis thaliana; identical to SEQ ID NO: 7588
  CDS (1)..(1584)

SEQ ID NO: 33721 - protein, 527 aa, Arabidopsis thaliana; identical to SEQ ID NO: 7589

SEQ ID NO: 33722 - DNA, 1437 bp, Bartonella henselae; identical to SEQ ID NO: 7590
  CDS (1)..(1437)

SEQ ID NO: 33723 - protein, 478 aa, Bartonella henselae; identical to SEQ ID NO: 7591

SEQ ID NO: 33724 - DNA, 1533 bp, Glycine max; identical to SEQ ID NO: 7592
  CDS (1)..(1533)

SEQ ID NO: 33725 - protein, 510 aa, Glycine max; identical to SEQ ID NO: 7593

SEQ ID NO: 33726 - DNA, 1536 bp, Glycine max; identical to SEQ ID NO: 7594
  CDS (1)..(1536)

SEQ ID NO: 33727 - protein, 511 aa, Glycine max; identical to SEQ ID NO: 7595

SEQ ID NO: 33728 - DNA, 1527 bp, Xanthomonas campestris; identical to SEQ ID NO: 7596
  CDS (1)..(1527)

SEQ ID NO: 33729 - protein, 508 aa, Xanthomonas campestris; identical to SEQ ID NO: 7597

SEQ ID NO: 33730 - DNA, 1506 bp, Xanthomonas axonopodis; identical to SEQ ID NO: 7598
  CDS (1)..(1506)

SEQ ID NO: 33731 - protein, 501 aa, Xanthomonas axonopodis; identical to SEQ ID NO: 7599

SEQ ID NO: 33732 - DNA, 1434 bp, Methanosarcina mazei; identical to SEQ ID NO: 7600
  CDS (1)..(1434)

SEQ ID NO: 33733 - protein, 477 aa, Methanosarcina mazei; identical to SEQ ID NO: 7601

SEQ ID NO: 33734 - DNA, 1752 bp, Thermoanaerobacter tengcongensis; identical to SEQ ID NO: 7602
  CDS (1)..(1752)

SEQ ID NO: 33735 - protein, 583 aa, Thermoanaerobacter tengcongensis; identical to SEQ ID NO: 7603

SEQ ID NO: 33736 - DNA, 1428 bp, Fusobacterium nucleatum; identical to SEQ ID NO: 7604
  CDS (1)..(1428)

SEQ ID NO: 33737 - protein, 475 aa, Fusobacterium nucleatum; identical to SEQ ID NO: 7605

SEQ ID NO: 33738 - DNA, 1713 bp, Oryza sativa; identical to SEQ ID NO: 7606
  CDS (1)..(1713)

SEQ ID NO: 33739 - protein, 570 aa, Oryza sativa; identical to SEQ ID NO: 7607

SEQ ID NO: 33740 - DNA, 1872 bp, Oryza sativa; identical to SEQ ID NO: 7608
  CDS (1)..(1872)

SEQ ID NO: 33741 - protein, 623 aa, Oryza sativa; identical to SEQ ID NO: 7609

SEQ ID NO: 33742 - DNA, 1560 bp, Encephalitozoon cuniculi; identical to SEQ ID NO: 7610
  CDS (1)..(1560)

SEQ ID NO: 33743 - protein, 519 aa, Encephalitozoon cuniculi; identical to SEQ ID NO: 7611

SEQ ID NO: 33744 - DNA, 1470 bp, Methanosarcina acetivorans; identical to SEQ ID NO: 7612
  CDS (1)..(1470)

SEQ ID NO: 33745 - protein, 489 aa, Methanosarcina acetivorans; identical to SEQ ID NO: 7613

SEQ ID NO: 33746 - DNA, 1434 bp, Pyrococcus furiosus; identical to SEQ ID NO: 7614
  CDS (1)..(1434)

SEQ ID NO: 33747 - protein, 477 aa, Pyrococcus furiosus; identical to SEQ ID NO: 7615

SEQ ID NO: 33748 - DNA, 1404 bp, Clostridium perfringens; identical to SEQ ID NO: 7616
  CDS (1)..(1404)

SEQ ID NO: 33749 - protein, 467 aa, Clostridium perfringens; identical to SEQ ID NO: 7617

SEQ ID NO: 33750 - DNA, 1419 bp, Ralstonia solanacearum; identical to SEQ ID NO: 7618
  CDS (1)..(1419)

SEQ ID NO: 33751 - protein, 472 aa, Ralstonia solanacearum; identical to SEQ ID NO: 7619

SEQ ID NO: 33752 - DNA, 1440 bp, Ralstonia solanacearum; identical to SEQ ID NO: 7620
  CDS (1)..(1440)

SEQ ID NO: 33753 - protein, 479 aa, Ralstonia solanacearum; identical to SEQ ID NO: 7621

SEQ ID NO: 33754 - DNA, 1443 bp, Salmonella typhimurium; identical to SEQ ID NO: 7622
  CDS (1)..(1443)

SEQ ID NO: 33755 - protein, 480 aa, Salmonella typhimurium; identical to SEQ ID NO: 7623

SEQ ID NO: 33756 - DNA, 1386 bp, Pyrobaculum aerophilum; identical to SEQ ID NO: 7624
  CDS (1)..(1386)

SEQ ID NO: 33757 - protein, 461 aa, Pyrobaculum aerophilum; identical to SEQ ID NO: 7625

SEQ ID NO: 33758 - DNA, 1440 bp, Rhizobium meliloti; identical to SEQ ID NO: 7626
  CDS (1)..(1440)

SEQ ID NO: 33759 - protein, 479 aa, Rhizobium meliloti; identical to SEQ ID NO: 7627

SEQ ID NO: 33760 - DNA, 1745 bp, Mastigamoeba balamuthi; identical to SEQ ID NO: 7628
  CDS (36)..(1541)

SEQ ID NO: 33761 - protein, 501 aa, Mastigamoeba balamuthi; identical to SEQ ID NO: 7629

SEQ ID NO: 33762 - DNA, 2207 bp, Toxoplasma gondii; identical to SEQ ID NO: 7630
  CDS (225)..(1820)

SEQ ID NO: 33763 - protein, 531 aa, Toxoplasma gondii; identical to SEQ ID NO: 7631

SEQ ID NO: 33764 - DNA, 1317 bp, Sulfolobus tokodaii; identical to SEQ ID NO: 7632
  CDS (1)..(1317)

SEQ ID NO: 33765 - protein, 438 aa, Sulfolobus tokodaii; identical to SEQ ID NO: 7633

SEQ ID NO: 33766 - DNA, 1626 bp, Thermoplasma volcanium; identical to SEQ ID NO: 7634
  CDS (1)..(1626)

SEQ ID NO: 33767 - protein, 541 aa, Thermoplasma volcanium; identical to SEQ ID NO: 7635

SEQ ID NO: 33768 - DNA, 1437 bp, Rhizobium loti; identical to SEQ ID NO: 7636
  CDS (1)..(1437)

SEQ ID NO: 33769 - protein, 478 aa, Rhizobium loti; identical to SEQ ID NO: 7637

SEQ ID NO: 33770 - DNA, 1440 bp, Pasteurella multocida; identical to SEQ ID NO: 7638
  CDS (1)..(1440)

SEQ ID NO: 33771 - protein, 479 aa, Pasteurella multocida; identical to SEQ ID NO: 7639

SEQ ID NO: 33772 - DNA, 1880 bp, Arabidopsis thaliana; identical to SEQ ID NO: 7640
  CDS (126)..(1658)

SEQ ID NO: 33773 - protein, 510 aa, Arabidopsis thaliana; identical to SEQ ID NO: 7641

SEQ ID NO: 33774 - DNA, 1517 bp, Arabidopsis thaliana; identical to SEQ ID NO: 7642
  CDS (1)..(1497)

SEQ ID NO: 33775 - protein, 498 aa, Arabidopsis thaliana; identical to SEQ ID NO: 7643

SEQ ID NO: 33776 - DNA, 1564 bp, Arabidopsis thaliana; identical to SEQ ID NO: 7644
  CDS (1)..(1533)

SEQ ID NO: 33777 - protein, 510 aa, Arabidopsis thaliana; identical to SEQ ID NO: 7645

SEQ ID NO: 33778 - DNA, 1581 bp, Aspergillus oryzae; identical to SEQ ID NO: 7646
  CDS (1)..(1581)

SEQ ID NO: 33779 - protein, 526 aa, Aspergillus oryzae; identical to SEQ ID NO: 7647

SEQ ID NO: 33780 - DNA, 1431 bp, Streptomyces coelicolor; identical to SEQ ID NO: 7648
  CDS (1)..(1431)

SEQ ID NO: 33781 - protein, 476 aa, Streptomyces coelicolor; identical to SEQ ID NO: 7649

SEQ ID NO: 33782 - DNA, 1503 bp, Streptococcus thermophilus; identical to SEQ ID NO: 7650
  CDS (1)..(1503)

SEQ ID NO: 33783 - protein, 500 aa, Streptococcus thermophilus; identical to SEQ ID NO: 7651

SEQ ID NO: 33784 - DNA, 2150 bp, Pseudomonas hydrogenothermophila; identical to SEQ ID NO: 7652
  CDS (16)..(1437)

SEQ ID NO: 33785 - protein, 473 aa, Pseudomonas hydrogenothermophila; identical to SEQ ID NO: 7653

SEQ ID NO: 33786 - DNA, 1413 bp, Selenomonas ruminantium; identical to SEQ ID NO: 7654
  CDS (1)..(1413)

SEQ ID NO: 33787 - protein, 470 aa, Selenomonas ruminantium; identical to SEQ ID NO: 7655

SEQ ID NO: 33788 - DNA, 1822 bp, Arabidopsis thaliana; identical to SEQ ID NO: 7656
  CDS (1)..(1791)

SEQ ID NO: 33789 - protein, 596 aa, Arabidopsis thaliana; identical to SEQ ID NO: 7657

SEQ ID NO: 33790 - DNA, 1494 bp, Arabidopsis thaliana; identical to SEQ ID NO: 7658
  CDS (1)..(1494)

SEQ ID NO: 33791 - protein, 497 aa, Arabidopsis thaliana; identical to SEQ ID NO: 7659

SEQ ID NO: 33792 - DNA, 1920 bp, Lilium longiflorum; identical to SEQ ID NO: 7660
  CDS (145)..(1677)

SEQ ID NO: 33793 - protein, 510 aa, Lilium longiflorum; identical to SEQ ID NO: 7661

SEQ ID NO: 33794 - DNA, 1413 bp, Vibrio marinus; identical to SEQ ID NO: 7662
  CDS (1)..(1413)

SEQ ID NO: 33795 - protein, 470 aa, Vibrio marinus; identical to SEQ ID NO: 7663

SEQ ID NO: 33796 - DNA, 1979 bp, Oryza sativa; identical to SEQ ID NO: 7664
  CDS (224)..(1747)

SEQ ID NO: 33797 - protein, 507 aa, Oryza sativa; identical to SEQ ID NO: 7665

SEQ ID NO: 33798 - DNA, 1533 bp, Arabidopsis thaliana; identical to SEQ ID NO: 7666
  CDS (1)..(1533)

SEQ ID NO: 33799 - protein, 510 aa, Arabidopsis thaliana; identical to SEQ ID NO: 7667

SEQ ID NO: 33800 - DNA, 2235 bp, Drosophila melanogaster; identical to SEQ ID NO: 7668
  CDS (1)..(2235)

SEQ ID NO: 33801 - protein, 744 aa, Drosophila melanogaster; identical to SEQ ID NO: 7669

SEQ ID NO: 33802 - DNA, 3033 bp, Drosophila melanogaster; identical to SEQ ID NO: 7670
  CDS (1)..(3033)

SEQ ID NO: 33803 - protein, 1010 aa, Drosophila melanogaster; identical to SEQ ID NO: 7671

SEQ ID NO: 33804 - DNA, 1814 bp, Drosophila melanogaster; identical to SEQ ID NO: 7672
  CDS (83)..(1747)

SEQ ID NO: 33805 - protein, 554 aa, Drosophila melanogaster; identical to SEQ ID NO: 7673

SEQ ID NO: 33806 - DNA, 1425 bp, Agrobacterium vitis; identical to SEQ ID NO: 7674
  CDS (1)..(1425)

SEQ ID NO: 33807 - protein, 474 aa, Agrobacterium vitis; identical to SEQ ID NO: 7675

SEQ ID NO: 33808 - DNA, 1449 bp, Agrobacterium vitis; identical to SEQ ID NO: 7676
  CDS (1)..(1449)

SEQ ID NO: 33809 - protein, 482 aa, Agrobacterium vitis; identical to SEQ ID NO: 7677

SEQ ID NO: 33810 - DNA, 2234 bp, Nicotiana tabacum; identical to SEQ ID NO: 7678
  CDS (59)..(1840)

SEQ ID NO: 33811 - protein, 593 aa, Nicotiana tabacum; identical to SEQ ID NO: 7679

SEQ ID NO: 33812 - DNA, 1599 bp, Agaricus bisporus; identical to SEQ ID NO: 7680
  CDS (1)..(1599)

SEQ ID NO: 33813 - protein, 532 aa, Agaricus bisporus; identical to SEQ ID NO: 7681

SEQ ID NO: 33814 - DNA, 1446 bp, Buchnera aphidicola; identical to SEQ ID NO: 7682
  CDS (1)..(1446)

SEQ ID NO: 33815 - protein, 481 aa, Buchnera aphidicola; identical to SEQ ID NO: 7683

SEQ ID NO: 33816 - DNA, 1440 bp, Buchnera aphidicola; identical to SEQ ID NO: 7684
  CDS (1)..(1440)

SEQ ID NO: 33817 - protein, 479 aa, Buchnera aphidicola; identical to SEQ ID NO: 7685

SEQ ID NO: 33818 - DNA, 2354 bp, Gallus gallus; identical to SEQ ID NO: 7686
  CDS (81)..(1673)

SEQ ID NO: 33819 - protein, 530 aa, Gallus gallus; identical to SEQ ID NO: 7687

SEQ ID NO: 33820 - DNA, 1425 bp, Clostridium perfringens; identical to SEQ ID NO: 7688
  CDS (1)..(1425)

SEQ ID NO: 33821 - protein, 474 aa, Clostridium perfringens; identical to SEQ ID NO: 7689

SEQ ID NO: 33822 - DNA, 1425 bp, Corynebacterium efficiens; identical to SEQ ID NO: 7690
  CDS (1)..(1425)

SEQ ID NO: 33823 - protein, 474 aa, Corynebacterium efficiens; identical to SEQ ID NO: 7691

SEQ ID NO: 33824 - DNA, 2084 bp, Drosophila melanogaster; identical to SEQ ID NO: 7692
  CDS (229)..(1830)

SEQ ID NO: 33825 - protein, 533 aa, Drosophila melanogaster; identical to SEQ ID NO: 7693

SEQ ID NO: 33826 - DNA, 1901 bp, Eimeria tenella; identical to SEQ ID NO: 7694
  CDS (57)..(1652)

SEQ ID NO: 33827 - protein, 531 aa, Eimeria tenella; identical to SEQ ID NO: 7695

SEQ ID NO: 33828 - DNA, 3479 bp, Lactobacillus delbrueckii; identical to SEQ ID NO: 7696
  CDS (1277)..(3046)

SEQ ID NO: 33829 - protein, 589 aa, Lactobacillus delbrueckii; identical to SEQ ID NO: 7697

SEQ ID NO: 33830 - DNA, 1941 bp, Leishmania mexicana; identical to SEQ ID NO: 7698
  CDS (112)..(1611)

SEQ ID NO: 33831 - protein, 499 aa, Leishmania mexicana; identical to SEQ ID NO: 7699

SEQ ID NO: 33832 - DNA, 1452 bp, Methylobacterium extorquens; identical to SEQ ID NO: 7700
  CDS (1)..(1452)

SEQ ID NO: 33833 - protein, 483 aa, Methylobacterium extorquens; identical to SEQ ID NO: 7701

SEQ ID NO: 33834 - DNA, 1439 bp, Mycobacterium intracellulare; identical to SEQ ID NO: 7702
  CDS (1)..(1419)

SEQ ID NO: 33835 - protein, 472 aa, Mycobacterium intracellulare; identical to SEQ ID NO: 7703

SEQ ID NO: 33836 - DNA, 1635 bp, Thermoplasma acidophilum; identical to SEQ ID NO: 7704
  CDS (1)..(1635)

SEQ ID NO: 33837 - protein, 544 aa, Thermoplasma acidophilum; identical to SEQ ID NO: 7705

SEQ ID NO: 33838 - DNA, 1497 bp, Trypanoplasma borreli; identical to SEQ ID NO: 7706
  CDS (1)..(1497)

SEQ ID NO: 33839 - protein, 498 aa, Trypanoplasma borreli; identical to SEQ ID NO: 7707

SEQ ID NO: 33840 - DNA, 1629 bp, Yarrowia lipolytica; identical to SEQ ID NO: 7708
  CDS (1)..(1629)

SEQ ID NO: 33841 - protein, 542 aa, Yarrowia lipolytica; identical to SEQ ID NO: 7709

SEQ ID NO: 33842 - DNA, 1596 bp, Oryctolagus cuniculus; identical to SEQ ID NO: 7710
  CDS (1)..(1596)

SEQ ID NO: 33843 - protein, 531 aa, Oryctolagus cuniculus; identical to SEQ ID NO: 7711

SEQ ID NO: 33844 - DNA, 1799 bp, Xenopus laevis; identical to SEQ ID NO: 7712
  CDS (11)..(1606)

SEQ ID NO: 33845 - protein, 531 aa, Xenopus laevis; identical to SEQ ID NO: 7713

SEQ ID NO: 33846 - DNA, 2404 bp, Brachydanio rerio; identical to SEQ ID NO: 7714
  CDS (37)..(1635)

SEQ ID NO: 33847 - protein, 532 aa, Brachydanio rerio; identical to SEQ ID NO: 7715

SEQ ID NO: 33848 - DNA, 26 bp, Artificial sequence
  Primer sequence
atgtctagattagaaagattgacctc

SEQ ID NO: 33849 - DNA, 25 bp, Artificial sequence
  Primer sequence
ttaaacggtagagacttgcaaagtg

SEQ ID NO: 33850 - protein, 346 aa, Artificial sequence; identical to SEQ ID NO: 9106
  Consensus
  Variant (2)..(6): Xaa in position 2 to 6 is any amino acid
  Variant (8)..(8): Xaa in position 8 is any amino acid
  Variant (14)..(17): Xaa in position 14 to 17 is any amino acid
  Variant (19)..(46): Xaa in position 19 to 46 is any amino acid
  Variant (48)..(49): Xaa in position 48 to 49 is any amino acid
  Variant (52)..(52): Xaa in position 52 is any amino acid
  Variant (55)..(72): Xaa in position 55 to 72 is any amino acid
  Variant (74)..(110): Xaa in position 74 to 110 is any amino acid
  Variant (112)..(117): Xaa in position 112 to 117 is any amino acid
  Variant (120)..(124): Xaa in position 120 to 124 is any amino acid
  Variant (126)..(149): Xaa in position 126 to 149 is any amino acid
  Variant (151)..(155): Xaa in position 151 to 155 is any amino acid
  Variant (157)..(158): Xaa in position 157 to 158 is any amino acid
  Variant (160)..(172): Xaa in position 160 to 172 is any amino acid
  Variant (175)..(176): Xaa in position 175 to 176 is any amino acid
  Variant (178)..(188): Xaa in position 178 to 188 is any amino acid
  Variant (190)..(193): Xaa in position 190 to 193 is any amino acid
  Variant (196)..(200): Xaa in position 196 to 200 is any amino acid
  Variant (202)..(226): Xaa in position 202 to 226 is any amino acid
  Variant (228)..(228): Xaa in position 228 is any amino acid
  Variant (230)..(242): Xaa in position 230 to 242 is any amino acid
  Variant (244)..(247): Xaa in position 244 to 247 is any amino acid
  Variant (249)..(250): Xaa in position 249 to 250 is any amino acid
  Variant (259)..(259): Xaa in position 259 is any amino acid
  Variant (261)..(269): Xaa in position 261 to 269 is any amino acid
  Variant (272)..(273): Xaa in position 272 to 273 is any amino acid
  Variant (275)..(283): Xaa in position 275 to 283 is any amino acid
  Variant (286)..(286): Xaa in position 286 is any amino acid
  Variant (292)..(292): Xaa in position 292 is any amino acid
  Variant (295)..(297): Xaa in position 295 to 297 is any amino acid
  Variant (299)..(299): Xaa in position 299 is any amino acid
  Variant (305)..(306): Xaa in position 305 to 306 is any amino acid
  Variant (309)..(309): Xaa in position 309 is any amino acid
  Variant (312)..(313): Xaa in position 312 to 313 is any amino acid
  Variant (316)..(316): Xaa in position 316 is any amino acid
  Variant (318)..(319): Xaa in position 318 to 319 is any amino acid
  Variant (323)..(323): Xaa in position 323 is any amino acid
  Variant (325)..(325): Xaa in position 325 is any amino acid
  Variant (327)..(327): Xaa in position 327 is any amino acid
  Variant (329)..(330): Xaa in position 329 to 330 is any amino acid
  Variant (332)..(334): Xaa in position 332 to 334 is any amino acid
  Variant (336)..(337): Xaa in position 336 to 337 is any amino acid
  Variant (339)..(345): Xaa in position 339 to 345 is any amino acid

SEQ ID NO: 33851 - protein, 48 aa, Artificial sequence; identical to SEQ ID NO: 9104
  Consensus
  Variant (2)..(2): Xaa in position 2 is Ile, Val or Leu
  Variant (4)..(6): Xaa in position 4 to 6 is any amino acid
  Variant (7)..(7): Xaa in position 7 is Gly, Ala, Ser, Thr or Val
  Variant (8)..(8): Xaa in position 8 is Val, Ile, Leu or Met
  Variant (9)..(10): Xaa in position 9 to 10 is any amino acid
  Variant (11)..(13): Xaa in position 11 to 13 is any or no amino acid
  Variant (14)..(14): Xaa in position 14 is Phe, Ile, Leu or Met
  Variant (15)..(16): Xaa in position 15 to 16 is any amino acid
  Variant (17)..(17): Xaa in position 17 is Ile, Val or Leu
  Variant (18)..(18): Xaa in position 18 is Leu, Ile, Val, Ala or Cys
  Variant (19)..(20): Xaa in position 19 to 20 is any amino acid
  Variant (21)..(21): Xaa in position 21 is Ser, Ala, Thr, Phe or Cys
  Variant (22)..(22): Xaa in position 22 is Asp or Gln
  Variant (23)..(23): Xaa in position 23 is any amino acid
  Variant (24)..(24): Xaa in position 24 is Ile, Val, Leu, Phe or Ala
  Variant (25)..(25): Xaa in position 25 is Met or Ile
  Variant (26)..(26): Xaa in position 26 is Val, Ile or Leu
  Variant (27)..(27): Xaa in position 27 is Ala or Ser
  Variant (31)..(31): Xaa in position 31 is Leu or Met
  Variant (32)..(32): Xaa in position 32 is Gly or Ala
  Variant (33)..(33): Xaa in position 33 is Val, Ile, Met, Ala or Leu
  Variant (34)..(34): Xaa in position 34 is Glu or Gln
  Variant (35)..(35): Xaa in position 35 is Ile, Leu, Val, Met, Cys or Tyr
  Variant (36)..(39): Xaa in position 36 to 39 is any amino acid
  Variant (40)..(40): Xaa in position 40 is Val, Leu, Ile or Met
  Variant (41)..(43): Xaa in position 41 to 43 is any amino acid
  Variant (44)..(44): Xaa in position 44 is Gln or Glu
  Variant (45)..(45): Xaa in position 45 is Lys, Arg, Glu or Gln
  Variant (46)..(46): Xaa in position 46 is any amino acid
  Variant (47)..(47): Xaa in position 47 is Ile, Leu, Met or Ala
  Variant (48)..(48): Xaa in position 48 is Ile, Val, Thr, Leu or Ala

SEQ ID NO: 33852 - protein, 63 aa, Artificial sequence; identical to SEQ ID NO: 9105
  Consensus
  Variant (1)..(1): Xaa in position 1 is Val, Ile, Ala, Cys, Ser or Thr
  Variant (2)..(2): Xaa in position 2 is Ile, Val or Ala
  Variant (3)..(3): Xaa in position 3 is any or no amino acid
  Variant (5)..(5): Xaa in position 5 is Thr or Ser
  Variant (6)..(6): Xaa in position 6 is Gln, Asn, His or Glu
  Variant (7)..(7): Xaa in position 7 is Met, Leu, Val or Ile
  Variant (8)..(8): Xaa in position 8 is Leu, Met or Val
  Variant (9)..(9): Xaa in position 9 is any amino acid
  Variant (10)..(10): Xaa in position 10 is Ser or Thr
  Variant (11)..(11): Xaa in position 11 is Met or Leu
  Variant (12)..(16): Xaa in position 12 to 16 is any amino acid
  Variant (17)..(17): Xaa in position 17 is Pro or Ala
  Variant (20)..(20): Xaa in position 20 is Ala or Ser
  Variant (22)..(22): Xaa in position 22 is Val, Ala, Ile, Thr or Gly
  Variant (23)..(23): Xaa in position 23 is any amino acid
  Variant (25)..(25): Xaa in position 25 is Val or Ile
  Variant (26)..(26): Xaa in position 26 is Ala, Gly, Phe, Ser, Tyr or Thr
  Variant (27)..(27): Xaa in position 27 is any amino acid
  Variant (28)..(28): Xaa in position 28 is Ala or Ser
  Variant (29)..(29): Xaa in position 29 is Val, Ile or Thr
  Variant (30)..(32): Xaa in position 30 to 32 is any amino acid
  Variant (33)..(33): Xaa in position 33 is Thr, Ala, Ser or Val
  Variant (34)..(34): Xaa in position 34 is Asp, Ser or Asn
  Variant (35)..(35): Xaa in position 35 is Ala, Cys, Ser or Gly
  Variant (36)..(36): Xaa in position 36 is Val, Ile, Thr or Leu
  Variant (37)..(37): Xaa in position 37 is Met or Leu
  Variant (39)..(39): Xaa in position 39 is Ser or Thr
  Variant (40)..(40): Xaa in position 40 is Gly, Ala, Asn or Glu
  Variant (42)..(42): Xaa in position 42 is Thr or Ser
  Variant (43)..(43): Xaa in position 43 is Ala, Ser or Thr
  Variant (44)..(44): Xaa in position 44 is any amino acid
  Variant (46)..(46): Xaa in position 46 is any amino acid
  Variant (47)..(47): Xaa in position 47 is Tyr, Phe, His, Asp or Trp
  Variant (49)..(50): Xaa in position 49 to 50 is any amino acid
  Variant (51)..(51): Xaa in position 51 is Ala, Thr, Ser, Val or Cys
  Variant (52)..(52): Xaa in position 52 is Val, Ile, Leu or Ala
  Variant (53)..(54): Xaa in position 53 to 54 is any amino acid
  Variant (55)..(55): Xaa in position 55 is Met, Leu or Gln
  Variant (56)..(57): Xaa in position 56 to 57 is any amino acid
  Variant (58)..(58): Xaa in position 58 is Ile, Val, Thr or Ala
  Variant (59)..(61): Xaa in position 59 to 61 is any amino acid
  Variant (62)..(62): Xaa in position 62 is Ala, Thr, Val, Ile or Ser
  Variant (63)..(63): Xaa in position 63 is Glu, Asp or Gln

SEQ ID NO: 33853 - DNA, 2420 bp, Saccharomyces cerevisiae; identical to SEQ ID NO: 4987
  CDS (739)..(2115)

SEQ ID NO: 33854 - protein, 458 aa, Saccharomyces cerevisiae; identical to SEQ ID NO: 4988

SEQ ID NO: 33855 - DNA, 1345 bp, Arabidopsis thaliana (mouse-ear cress); identical to SEQ ID NO: 4989
  CDS (29)..(1345)

SEQ ID NO: 33856 - protein, 438 aa, Arabidopsis thaliana (mouse-ear cress); identical to SEQ ID NO: 4990

SEQ ID NO: 33857 - DNA, 1533 bp, Drosophila melanogaster; identical to SEQ ID NO: 4991
  CDS (1)..(1533)

SEQ ID NO: 33858 - protein, 510 aa, Drosophila melanogaster; identical to SEQ ID NO: 4992

SEQ ID NO: 33859 - DNA, 1221 bp, Schizosaccharomyces pombe; identical to SEQ ID NO: 4993
  CDS (1)..(1221)

SEQ ID NO: 33860 - protein, 406 aa, Schizosaccharomyces pombe; identical to SEQ ID NO: 4994

SEQ ID NO: 33861 - DNA, 1446 bp, Debaryomyces hansenii; identical to SEQ ID NO: 4995
  CDS (1)..(1446)

SEQ ID NO: 33862 - protein, 481 aa, Debaryomyces hansenii; identical to SEQ ID NO: 4996

SEQ ID NO: 33863 - DNA, 1617 bp, Yarrowia lipolytica; identical to SEQ ID NO: 4997
  CDS (1)..(1617)

SEQ ID NO: 33864 - protein, 538 aa, Yarrowia lipolytica; identical to SEQ ID NO: 4998

SEQ ID NO: 33865 - DNA, 1389 bp, Kluyveromyces lactis; identical to SEQ ID NO: 4999
  CDS (1)..(1389)

SEQ ID NO: 33866 - protein, 462 aa, Kluyveromyces lactis; identical to SEQ ID NO: 5000

SEQ ID NO: 33867 - DNA, 1395 bp, Pichia pastoris; identical to SEQ ID NO: 5001
  CDS (1)..(1395)

SEQ ID NO: 33868 - protein, 464 aa, Pichia pastoris; identical to SEQ ID NO: 5002

SEQ ID NO: 33869 - DNA, 1329 bp, Candida glabrata; identical to SEQ ID NO: 5003
  CDS (1)..(1329)

SEQ ID NO: 33870 - protein, 442 aa, Candida glabrata; identical to SEQ ID NO: 5004

SEQ ID NO: 33871 - DNA, 1299 bp, Ashbya gossypii; identical to SEQ ID NO: 5005
  CDS (1)..(1299)

SEQ ID NO: 33872 - protein, 432 aa, Ashbya gossypii; identical to SEQ ID NO: 5006

SEQ ID NO: 33873 - DNA, 1662 bp, Anopheles gambiae str; identical to SEQ ID NO: 5007
  CDS (1)..(1662)

SEQ ID NO: 33874 - protein, 553 aa, Anopheles gambiae str; identical to SEQ ID NO: 5008

SEQ ID NO: 33875 - DNA, 1446 bp, Mus musculus; identical to SEQ ID NO: 5009
  CDS (7)..(1323)

SEQ ID NO: 33876 - protein, 438 aa, Mus musculus; identical to SEQ ID NO: 5010

SEQ ID NO: 33877 - DNA, 1164 bp, Oryza sativa; identical to SEQ ID NO: 5011
  CDS (1)..(1164)

SEQ ID NO: 33878 - protein, 387 aa, Oryza sativa; identical to SEQ ID NO: 5012

SEQ ID NO: 33879 - DNA, 1329 bp, Neurospora crassa; identical to SEQ ID NO: 5013
  CDS (1)..(1329)

SEQ ID NO: 33880 - protein, 442 aa, Neurospora crassa; identical to SEQ ID NO: 5014

SEQ ID NO: 33881 - DNA, 1923 bp, Caenorhabditis elegans; identical to SEQ ID NO: 5015
  CDS (1)..(1923)

SEQ ID NO: 33882 - protein, 640 aa, Caenorhabditis elegans; identical to SEQ ID NO: 5016

SEQ ID NO: 33883 - DNA, 1507 bp, Homo sapiens; identical to SEQ ID NO: 5017
  CDS (7)..(1323)

SEQ ID NO: 33884 - protein, 438 aa, Homo sapiens; identical to SEQ ID NO: 5018

SEQ ID NO: 33885 - DNA, 1455 bp, Drosophila melanogaster; identical to SEQ ID NO: 5019
  CDS (1)..(1455)

SEQ ID NO: 33886 - protein, 484 aa, Drosophila melanogaster; identical to SEQ ID NO: 5020

SEQ ID NO: 33887 - DNA, 1581 bp, Drosophila virilis; identical to SEQ ID NO: 5021
  CDS (1)..(1581)

SEQ ID NO: 33888 - protein, 526 aa, Drosophila virilis; identical to SEQ ID NO: 5022

SEQ ID NO: 33889 - DNA, 23 bp, Artificial sequence
  Primer sequence
atggaaggtgaacagtctccgca

SEQ ID NO: 33890 - DNA, 25 bp, Artificial sequence
  Primer sequence
tcagttgagctttttttccatagag

SEQ ID NO: 33891 - protein, 492 aa, Artificial sequence
  Consensus
  Variant (2)..(3): Xaa in position 2 to 3 is any amino acid
  Variant (5)..(5): Xaa in position 5 is any amino acid
  Variant (11)..(12): Xaa in position 11 to 12 is any amino acid
  Variant (16)..(24): Xaa in position 16 to 24 is any amino acid
  Variant (26)..(28): Xaa in position 26 to 28 is any amino acid
  Variant (30)..(33): Xaa in position 30 to 33 is any amino acid
  Variant (35)..(35): Xaa in position 35 is any amino acid
  Variant (44)..(51): Xaa in position 44 to 51 is any amino acid
  Variant (53)..(55): Xaa in position 53 to 55 is any amino acid
  Variant (57)..(65): Xaa in position 57 to 65 is any amino acid
  Variant (67)..(68): Xaa in position 67 to 68 is any amino acid
  Variant (70)..(72): Xaa in position 70 to 72 is any amino acid
  Variant (74)..(83): Xaa in position 74 to 83 is any amino acid
  Variant (85)..(92): Xaa in position 85 to 92 is any amino acid
  Variant (94)..(102): Xaa in position 94 to 102 is any amino acid
  Variant (104)..(104): Xaa in position 104 is any amino acid
  Variant (106)..(106): Xaa in position 106 is any amino acid
  Variant (110)..(110): Xaa in position 110 is any amino acid
  Variant (118)..(157): Xaa in position 118 to 157 is any amino acid
  Variant (159)..(159): Xaa in position 159 is any amino acid
  Variant (161)..(163): Xaa in position 161 to 163 is any amino acid
  Variant (167)..(167): Xaa in position 167 is any amino acid
  Variant (170)..(171): Xaa in position 170 to 171 is any amino acid
  Variant (173)..(199): Xaa in position 173 to 199 is any amino acid
  Variant (201)..(206): Xaa in position 201 to 206 is any amino acid
  Variant (209)..(223): Xaa in position 209 to 223 is any amino acid
  Variant (225)..(228): Xaa in position 225 to 228 is any amino acid
  Variant (230)..(232): Xaa in position 230 to 232 is any amino acid
  Variant (234)..(234): Xaa in position 234 is any amino acid
  Variant (236)..(238): Xaa in position 236 to 238 is any amino acid
  Variant (240)..(240): Xaa in position 240 is any amino acid
  Variant (243)..(244): Xaa in position 243 to 244 is any amino acid
  Variant (246)..(256): Xaa in position 246 to 256 is any amino acid
  Variant (258)..(261): Xaa in position 258 to 261 is any amino acid
  Variant (263)..(265): Xaa in position 263 to 265 is any amino acid
  Variant (268)..(269): Xaa in position 268 to 269 is any amino acid
  Variant (271)..(273): Xaa in position 271 to 273 is any amino acid
  Variant (275)..(276): Xaa in position 275 to 276 is any amino acid
  Variant (278)..(400): Xaa in position 278 to 400 is any amino acid
  Variant (402)..(402): Xaa in position 402 is any amino acid
  Variant (405)..(408): Xaa in position 405 to 408 is any amino acid
  Variant (416)..(417): Xaa in position 416 to 417 is any amino acid
  Variant (420)..(423): Xaa in position 420 to 423 is any amino acid
  Variant (425)..(425): Xaa in position 425 is any amino acid
  Variant (427)..(475): Xaa in position 427 to 475 is any amino acid
  Variant (477)..(478): Xaa in position 477 to 478 is any amino acid
  Variant (481)..(482): Xaa in position 481 to 482 is any amino acid
  Variant (484)..(488): Xaa in position 484 to 488 is any amino acid
  Variant (490)..(491): Xaa in position 490 to 491 is any amino acid
IXXVXYTEIDXXAYMXXXXXXXXXGXXXYXXXXGXTGPLVYPAXXXXXXXXLXXXTXXXXXXXXXQXXFXXXYXXXXXXXXXXYXXXXXXXXPXXXXXXXXXSXRXHSIXVLRLFNDXXXXXXXXXXXXXXXXXXXXXXXXXXXXXXXXXXXXXXXXSXAXXXKMNXLLXXPXXXXXXXXXXXXXXXXXXXXXXXXXXXQXXXXXXFLXXXXXXXXXXXXXXXYXXXXFXXXRXFXXXWXVNXXFXXXXXXXXXXXFXXXXFXXXLLXXHXXXLXXFXXXXXXXXXXXXXXXXXXXXXXXXXXXXXXXXXXXXXXXXXXXXXXXXXXXXXXXXXXXXXXXXXXXXXXXXXXXXXXXXXXXXXXXXXXXXXXXXXXXXXXXXXXXXXXXXXXXXXXXXXXXNXIGXXXXRSLHYQFXXWYXXXXPXLXXXXXXXXXXXXXXXXXXXXXXXXXXXXXXXXXXXXXXXXXXXXXXXXXEXXWNXXPXXXXXSXXL

SEQ ID NO: 33892 - protein, 70 aa, Artificial sequence; identical to SEQ ID NO: 6179
  Consensus
  Variant (1)..(1): Xaa in position 1 is Val or Ile
  Variant (2)..(2): Xaa in position 2 is any amino acid
  Variant (5)..(5): Xaa in position 5 is Glu, Asp or Lys
  Variant (8)..(8): Xaa in position 8 is Trp, Tyr or Phe
  Variant (9)..(9): Xaa in position 9 is any amino acid
  Variant (10)..(10): Xaa in position 10 is Ala, Thr or Ser
  Variant (12)..(12): Xaa in position 12 is Met or Ile
  Variant (13)..(13): Xaa in position 13 is Gln, Glu, Ala or Ser
  Variant (14)..(14): Xaa in position 14 is Gln or Glu
  Variant (15)..(17): Xaa in position 15 to 17 is any amino acid
  Variant (18)..(18): Xaa in position 18 is Ile, Phe, Tyr or Val
  Variant (19)..(20): Xaa in position 19 to 20 is any amino acid
  Variant (21)..(21): Xaa in position 21 is any or no amino acid
  Variant (23)..(24): Xaa in position 23 to 24 is any amino acid
  Variant (25)..(25): Xaa in position 25 is Asp or Asn
  Variant (27)..(28): Xaa in position 27 to 28 is any amino acid
  Variant (29)..(29): Xaa in position 29 is Leu, Ile or Val
  Variant (30)..(30): Xaa in position 30 is any amino acid
  Variant (32)..(32): Xaa in position 32 is Asp, Gly or Cys
  Variant (35)..(35): Xaa in position 35 is Pro or Gln
  Variant (36)..(36): Xaa in position 36 is Leu, Met, Cys or Ile
  Variant (40)..(40): Xaa in position 40 is Ala or Gly
  Variant (41)..(41): Xaa in position 41 is Gly or Ala
  Variant (42)..(42): Xaa in position 42 is His or Phe
  Variant (43)..(43): Xaa in position 43 is Val, Leu or Ala
  Variant (44)..(44): Xaa in position 44 is any amino acid
  Variant (45)..(45): Xaa in position 45 is Ile, Val, Ala or Leu
  Variant (46)..(46): Xaa in position 46 is Tyr, Phe or His
  Variant (47)..(48): Xaa in position 47 to 48 is any amino acid
  Variant (49)..(49): Xaa in position 49 is Leu, Phe, Met or Val
  Variant (50)..(51): Xaa in position 50 to 51 is any amino acid
  Variant (52)..(52): Xaa in position 52 is Leu, Val, Ala, Phe or Tyr
  Variant (53)..(53): Xaa in position 53 is Thr or Ser
  Variant (54)..(54): Xaa in position 54 is Asp, Ser, Gly or Glu
  Variant (55)..(55): Xaa in position 55 is any amino acid
  Variant (56)..(57): Xaa in position 56 to 57 is any or no amino acid
  Variant (58)..(58): Xaa in position 58 is Asn, Asp, His or Glu
  Variant (59)..(59): Xaa in position 59 is Ile or Val
  Variant (60)..(61): Xaa in position 60 to 61 is any amino acid
  Variant (62)..(62): Xaa in position 62 is Ala, Gly or Val
  Variant (64)..(64): Xaa in position 64 is any amino acid
  Variant (65)..(65): Xaa in position 65 is Ile, Leu, Ala, Phe or Val
  Variant (66)..(66): Xaa in position 66 is Phe or Tyr
  Variant (67)..(68): Xaa in position 67 to 68 is any amino acid
  Variant (69)..(69): Xaa in position 69 is Leu, Ile, Val or Phe
  Variant (70)..(70): Xaa in position 70 is Tyr or Leu

SEQ ID NO: 33893 - protein, 15 aa, Artificial sequence
  Consensus
  Variant (1)..(1): Xaa in position 1 is Ser or Gly
  Variant (2)..(2): Xaa in position 2 is Lys or Tyr
  Variant (4)..(4): Xaa in position 4 is Leu, Ile or Val
  Variant (5)..(5): Xaa in position 5 is His or Phe
  Variant (7)..(7): Xaa in position 7 is Ile or Val
  Variant (8)..(8): Xaa in position 8 is Tyr or Phe
  Variant (9)..(9): Xaa in position 9 is Val or Ile
  Variant (12)..(12): Xaa in position 12 is Leu or Cys
XXRXXSXXXLRXFND

SEQ ID NO: 33894 - protein, 16 aa, Artificial sequence
  Consensus
  Variant (1)..(1): Xaa in position 1 is Ser or Thr
  Variant (2)..(2): Xaa in position 2 is any amino acid
  Variant (3)..(3): Xaa in position 3 is Ala or Gly
  Variant (4)..(4): Xaa in position 4 is Val, Ile, Cys or Leu
  Variant (5)..(5): Xaa in position 5 is Ser or Gly
  Variant (6)..(6): Xaa in position 6 is Val or Ile
  Variant (9)..(9): Xaa in position 9 is Asn, Ser or Thr
  Variant (10)..(10): Xaa in position 10 is any amino acid
  Variant (11)..(11): Xaa in position 11 is Leu or Met
  Variant (13)..(13): Xaa in position 13 is Tyr, Phe or Ser
  Variant (14)..(14): Xaa in position 14 is Ala, Leu, Phe or Val
  Variant (16)..(16): Xaa in position 16 is Ala, Gly or Thr
XXXXXXKMXXXLXXPX

SEQ ID NO: 33895 - protein, 67 aa, Artificial sequence
  Consensus
  Variant (2)..(2): Xaa in position 2 is Val, Leu or Ile
  Variant (3)..(3): Xaa in position 3 is any amino acid
  Variant (4)..(4): Xaa in position 4 is Leu, Val, Ile, Phe or Met
  Variant (5)..(5): Xaa in position 5 is Gly, Ala or Ser
  Variant (6)..(7): Xaa in position 6 to 7 is any amino acid
  Variant (9)..(18): Xaa in position 9 to 18 is any amino acid
  Variant (19)..(24): Xaa in position 19 to 24 is any or no amino acid
  Variant (26)..(26): Xaa in position 26 is Leu, Phe, Ile or Trp
  Variant (27)..(28): Xaa in position 27 to 28 is any amino acid
  Variant (29)..(29): Xaa in position 29 is Ala or Ser
  Variant (31)..(31): Xaa in position 31 is Asp, Asn or Glu
  Variant (32)..(32): Xaa in position 32 is Leu or Phe
  Variant (33)..(33): Xaa in position 33 is any amino acid
  Variant (35)..(35): Xaa in position 35 is any amino acid
  Variant (37)..(37): Xaa in position 37 is any amino acid
  Variant (38)..(38): Xaa in position 38 is Tyr, His, Phe or Trp
  Variant (39)..(39): Xaa in position 39 is any amino acid
  Variant (41)..(41): Xaa in position 41 is Thr or Ser
  Variant (42)..(42): Xaa in position 42 is Val or Ile
  Variant (44)..(44): Xaa in position 44 is Trp, Tyr or Phe
  Variant (45)..(45): Xaa in position 45 is Arg, Gln or Lys
  Variant (46)..(46): Xaa in position 46 is Phe, Met or Leu
  Variant (47)..(47): Xaa in position 47 is Leu, Val, Met or Ile
  Variant (48)..(57): Xaa in position 48 to 57 is any amino acid
  Variant (58)..(61): Xaa in position 58 to 61 is any or no amino acid
  Variant (63)..(66): Xaa in position 63 to 66 is any amino acid
QXXXXXXFXXXXXXXXXXXXXXXXYXXXXFXXXRXFXXXWXXNXXXXXXXXXXXXXXXXXXFXXXXF

SEQ ID NO: 33896 - protein, 26 aa, Artificial sequence
  Consensus
  Variant (2)..(2): Xaa in position 2 is Phe, Leu, Ala, Ile or Tyr
  Variant (3)..(3): Xaa in position 3 is Ile or Val
  Variant (5)..(5): Xaa in position 5 is Val, Ile or Leu
  Variant (6)..(6): Xaa in position 6 is any amino acid
  Variant (7)..(7): Xaa in position 7 is Phe or Cys
  Variant (8)..(8): Xaa in position 8 is Ala or Ser
  Variant (9)..(9): Xaa in position 9 is Arg or His
  Variant (16)..(16): Xaa in position 16 is Tyr or Leu
  Variant (17)..(17): Xaa in position 17 is Ser, Val, Ala or Ile
  Variant (18)..(18): Xaa in position 18 is Trp or Tyr
  Variant (19)..(19): Xaa in position 19 is Tyr, Phe or Val
  Variant (20)..(20): Xaa in position 20 is Phe, His, Ala, Cys or Tyr
  Variant (21)..(21): Xaa in position 21 is Trp, His, Phe or Tyr
  Variant (22)..(23): Xaa in position 22 to 23 is any amino acid
  Variant (25)..(25): Xaa in position 25 is any amino acid
  Variant (26)..(26): Xaa in position 26 is Leu or Met
NXXGXXXXXSLHYQFXXXXXXXXPXX

SEQ ID NO: 33897 - DNA, 1113 bp, Saccharomyces cerevisiae; identical to SEQ ID NO: 1363
  CDS (1)..(1113)

SEQ ID NO: 33898 - protein, 370 aa, Saccharomyces cerevisiae; identical to SEQ ID NO: 1364

SEQ ID NO: 33899 - DNA, 1086 bp, Deinococcus radiodurans; identical to SEQ ID NO: 1327
  CDS (1)..(1086)

SEQ ID NO: 33900 - protein, 361 aa, Deinococcus radiodurans; identical to SEQ ID NO: 1328

SEQ ID NO: 33901 - DNA, 1071 bp, Salmonella enterica subsp. enterica serovar Typhi; identical to SEQ ID NO: 2245
  CDS (1)..(1071)

SEQ ID NO: 33902 - protein, 356 aa, Salmonella enterica subsp. enterica serovar Typhi; identical to SEQ ID NO: 2246

SEQ ID NO: 33903 - DNA, 1071 bp, Yersinia pestis; identical to SEQ ID NO: 2247
  CDS (1)..(1071)

SEQ ID NO: 33904 - protein, 356 aa, Yersinia pestis; identical to SEQ ID NO: 2248

SEQ ID NO: 33905 - DNA, 1047 bp, Yersinia pestis; identical to SEQ ID NO: 1331
  CDS (1)..(1047)

SEQ ID NO: 33906 - protein, 348 aa, Yersinia pestis; identical to SEQ ID NO: 1332

SEQ ID NO: 33907 - DNA, 1053 bp, Escherichia coli; identical to SEQ ID NO: 2251
  CDS (1)..(1053)

SEQ ID NO: 33908 - protein, 350 aa, Escherichia coli; identical to SEQ ID NO: 1580

SEQ ID NO: 33909 - DNA, 1071 bp, Escherichia coli; identical to SEQ ID NO: 1333
  CDS (1)..(1071)

SEQ ID NO: 33910 - protein, 356 aa, Escherichia coli; identical to SEQ ID NO: 1334

SEQ ID NO: 33911 - DNA, 1131 bp, Nostoc sp. PCC 7120; identical to SEQ ID NO: 1335
  CDS (1)..(1131)

SEQ ID NO: 33912 - protein, 376 aa, Nostoc sp. PCC 7120; identical to SEQ ID NO: 1336

SEQ ID NO: 33913 - DNA, 1053 bp, Salmonella enterica subsp. enterica serovar Typhi; identical to SEQ ID NO: 1337
  CDS (1)..(1053)

SEQ ID NO: 33914 - protein, 350 aa, Salmonella enterica subsp. enterica serovar Typhi; identical to SEQ ID NO: 1338

SEQ ID NO: 33915 - DNA, 1077 bp, Pseudomonas aeruginosa; identical to SEQ ID NO: 1339
  CDS (1)..(1077)

SEQ ID NO: 33916 - protein, 358 aa, Pseudomonas aeruginosa; identical to SEQ ID NO: 1340

SEQ ID NO: 33917 - DNA, 1074 bp, Vibrio cholerae; identical to SEQ ID NO: 1343
  CDS (1)..(1074)

SEQ ID NO: 33918 - protein, 357 aa, Vibrio cholerae; identical to SEQ ID NO: 1344

SEQ ID NO: 33919 - DNA, 1038 bp, Lactococcus lactis subsp. lactis; identical to SEQ ID NO: 1345
  CDS (1)..(1038)

SEQ ID NO: 33920 - protein, 345 aa, Lactococcus lactis subsp. lactis; identical to SEQ ID NO: 1346

SEQ ID NO: 33921 - DNA, 1023 bp, Lactococcus lactis subsp. lactis; identical to SEQ ID NO: 1347
  CDS (1)..(1023)

SEQ ID NO: 33922 - protein, 340 aa, Lactococcus lactis subsp. lactis; identical to SEQ ID NO: 1348

SEQ ID NO: 33923 - DNA, 1032 bp, Streptococcus pneumoniae; identical to SEQ ID NO: 1349
  CDS (1)..(1032)

SEQ ID NO: 33924 - protein, 343 aa, Streptococcus pneumoniae; identical to SEQ ID NO: 1350

SEQ ID NO: 33925 - DNA, 1056 bp, Neisseria meningitidis; identical to SEQ ID NO: 2269
  CDS (1)..(1056)

SEQ ID NO: 33926 - protein, 351 aa, Neisseria meningitidis; identical to SEQ ID NO: 2270

SEQ ID NO: 33927 - DNA, 1095 bp, Pseudomonas aeruginosa; identical to SEQ ID NO: 1351
  CDS (1)..(1095)

SEQ ID NO: 33928 - protein, 364 aa, Pseudomonas aeruginosa; identical to SEQ ID NO: 1352

SEQ ID NO: 33929 - DNA, 1032 bp, Streptococcus pneumoniae; identical to SEQ ID NO: 1355
  CDS (1)..(1032)

SEQ ID NO: 33930 - protein, 343 aa, Streptococcus pneumoniae; identical to SEQ ID NO: 1356

SEQ ID NO: 33931 - DNA, 1143 bp, Xylella fastidiosa; identical to SEQ ID NO: 1603
  CDS (1)..(1143)

SEQ ID NO: 33932 - protein, 380 aa, Xylella fastidiosa; identical to SEQ ID NO: 1604

SEQ ID NO: 33933 - DNA, 1047 bp, Buchnera aphidicola; identical to SEQ ID NO: 1357
  CDS (1)..(1047)

SEQ ID NO: 33934 - protein, 348 aa, Buchnera aphidicola; identical to SEQ ID NO: 1358

SEQ ID NO: 33935 - DNA, 1104 bp, Corynebacterium glutamicum; identical to SEQ ID NO: 2279
  CDS (1)..(1104)

SEQ ID NO: 33936 - protein, 367 aa, Corynebacterium glutamicum; identical to SEQ ID NO: 2280

SEQ ID NO: 33937 - DNA, 1089 bp, Haemophilus influenzae; identical to SEQ ID NO: 1359
  CDS (1)..(1089)

SEQ ID NO: 33938 - protein, 362 aa, Haemophilus influenzae; identical to SEQ ID NO: 1360

SEQ ID NO: 33939 - DNA, 1502 bp, Candida albicans; identical to SEQ ID NO: 1361
  CDS (336)..(1442)

SEQ ID NO: 33940 - protein, 368 aa, Candida albicans; identical to SEQ ID NO: 1362

SEQ ID NO: 33941 - DNA, 2048 bp, Saccharomyces cerevisiae; identical to SEQ ID NO: 1365
  CDS (619)..(1731)

SEQ ID NO: 33942 - protein, 370 aa, Saccharomyces cerevisiae; identical to SEQ ID NO: 1366

SEQ ID NO: 33943 - DNA, 1107 bp, Schizosaccharomyces pombe; identical to SEQ ID NO: 1367
  CDS (1)..(1107)

SEQ ID NO: 33944 - protein, 368 aa, Schizosaccharomyces pombe; identical to SEQ ID NO: 1368

SEQ ID NO: 33945 - DNA, 1089 bp, Amycolatopsis orientalis; identical to SEQ ID NO: 1369
  CDS (1)..(1089)

SEQ ID NO: 33946 - protein, 362 aa, Amycolatopsis orientalis; identical to SEQ ID NO: 1370

SEQ ID NO: 33947 - DNA, 1119 bp, Schizosaccharomyces pombe; identical to SEQ ID NO: 1371
  CDS (1)..(1119)

SEQ ID NO: 33948 - protein, 372 aa, Schizosaccharomyces pombe; identical to SEQ ID NO: 1372

SEQ ID NO: 33949 - DNA, 1083 bp, Methylophilus methylotrophus; identical to SEQ ID NO: 1375
  CDS (1)..(1083)

SEQ ID NO: 33950 - protein, 360 aa, Methylophilus methylotrophus; identical to SEQ ID NO: 1376

SEQ ID NO: 33951 - DNA, 1770 bp, Debaryomyces hansenii; identical to SEQ ID NO: 2295
  CDS (1)..(1770)

SEQ ID NO: 33952 - protein, 589 aa, Debaryomyces hansenii; identical to SEQ ID NO: 2296

SEQ ID NO: 33953 - DNA, 1107 bp, Debaryomyces hansenii; identical to SEQ ID NO: 1377
  CDS (1)..(1107)

SEQ ID NO: 33954 - protein, 368 aa, Debaryomyces hansenii; identical to SEQ ID NO: 1378

SEQ ID NO: 33955 - DNA, 1074 bp, Yarrowia lipolytica; identical to SEQ ID NO: 1379
  CDS (1)..(1074)

SEQ ID NO: 33956 - protein, 357 aa, Yarrowia lipolytica; identical to SEQ ID NO: 1380

SEQ ID NO: 33957 - DNA, 1089 bp, Yarrowia lipolytica; identical to SEQ ID NO: 1381
  CDS (1)..(1089)

SEQ ID NO: 33958 - protein, 362 aa, Yarrowia lipolytica; identical to SEQ ID NO: 1382

SEQ ID NO: 33959 - DNA, 1119 bp, Kluyveromyces lactis; identical to SEQ ID NO: 1383
  CDS (1)..(1119)

SEQ ID NO: 33960 - protein, 372 aa, Kluyveromyces lactis; identical to SEQ ID NO: 1384

SEQ ID NO: 33961 - DNA, 1095 bp, Kluyveromyces lactis; identical to SEQ ID NO: 1385
  CDS (1)..(1095)

SEQ ID NO: 33962 - protein, 364 aa, Kluyveromyces lactis; identical to SEQ ID NO: 1386

SEQ ID NO: 33963 - DNA, 1074 bp, Erwinia carotovora subsp; identical to SEQ ID NO: 1387
  CDS (1)..(1074)

SEQ ID NO: 33964 - protein, 357 aa, Erwinia carotovora subsp; identical to SEQ ID NO: 1388

SEQ ID NO: 33965 - DNA, 1047 bp, Erwinia carotovora subsp; identical to SEQ ID NO: 1389
  CDS (1)..(1047)

SEQ ID NO: 33966 - protein, 348 aa, Erwinia carotovora subsp; identical to SEQ ID NO: 1390

SEQ ID NO: 33967 - DNA, 1056 bp, Erwinia carotovora subsp; identical to SEQ ID NO: 1391
  CDS (1)..(1056)

SEQ ID NO: 33968 - protein, 351 aa, Erwinia carotovora subsp; identical to SEQ ID NO: 1392

SEQ ID NO: 33969 - DNA, 1113 bp, Acinetobacter sp; identical to SEQ ID NO: 1393
  CDS (1)..(1113)

SEQ ID NO: 33970 - protein, 370 aa, Acinetobacter sp; identical to SEQ ID NO: 1394

SEQ ID NO: 33971 - DNA, 1056 bp, Acinetobacter sp; identical to SEQ ID NO: 1395
  CDS (1)..(1056)

SEQ ID NO: 33972 - protein, 351 aa, Acinetobacter sp; identical to SEQ ID NO: 1396

SEQ ID NO: 33973 - DNA, 1119 bp, Candida glabrata; identical to SEQ ID NO: 1397
  CDS (1)..(1119)

SEQ ID NO: 33974 - protein, 372 aa, Candida glabrata; identical to SEQ ID NO: 1398

SEQ ID NO: 33975 - DNA, 1071 bp, Candida glabrata; identical to SEQ ID NO: 1399
  CDS (1)..(1071)

SEQ ID NO: 33976 - protein, 356 aa, Candida glabrata; identical to SEQ ID NO: 1400

SEQ ID NO: 33977 - DNA, 1083 bp, Photobacterium profundum; identical to SEQ ID NO: 1401
  CDS (1)..(1083)

SEQ ID NO: 33978 - protein, 360 aa, Photobacterium profundum; identical to SEQ ID NO: 1402

SEQ ID NO: 33979 - DNA, 1053 bp, Photobacterium profundum; identical to SEQ ID NO: 1403
  CDS (1)..(1053)

SEQ ID NO: 33980 - protein, 350 aa, Photobacterium profundum; identical to SEQ ID NO: 1404

SEQ ID NO: 33981 - DNA, 1113 bp, Photobacterium profundum; identical to SEQ ID NO: 1405
  CDS (1)..(1113)

SEQ ID NO: 33982 - protein, 370 aa, Photobacterium profundum; identical to SEQ ID NO: 1406

SEQ ID NO: 33983 - DNA, 1056 bp, Photobacterium profundum; identical to SEQ ID NO: 1407
  CDS (1)..(1056)

SEQ ID NO: 33984 - protein, 351 aa, Photobacterium profundum; identical to SEQ ID NO: 1408

SEQ ID NO: 33985 - DNA, 1092 bp, Parachlamydia sp; identical to SEQ ID NO: 1409
  CDS (1)..(1092)

SEQ ID NO: 33986 - protein, 363 aa, Parachlamydia sp; identical to SEQ ID NO: 1410

SEQ ID NO: 33987 - DNA, 1095 bp, Rhodopseudomonas palustris; identical to SEQ ID NO: 1411
  CDS (1)..(1095)

SEQ ID NO: 33988 - protein, 364 aa, Rhodopseudomonas palustris; identical to SEQ ID NO: 1412

SEQ ID NO: 33989 - DNA, 1100 bp, Amycolatopsis methanolica; identical to SEQ ID NO: 1413
  CDS (1)..(1086)

SEQ ID NO: 33990 - protein, 361 aa, Amycolatopsis methanolica; identical to SEQ ID NO: 1414

SEQ ID NO: 33991 - DNA, 1071 bp, Treponema denticola; identical to SEQ ID NO: 1415
  CDS (1)..(1071)

SEQ ID NO: 33992 - protein, 356 aa, Treponema denticola; identical to SEQ ID NO: 1416

SEQ ID NO: 33993 - DNA, 1068 bp, Geobacter sulfurreducens; identical to SEQ ID NO: 1417
  CDS (1)..(1068)

SEQ ID NO: 33994 - protein, 355 aa, Geobacter sulfurreducens; identical to SEQ ID NO: 1418

SEQ ID NO: 33995 - DNA, 1095 bp, Ashbya gossypii; identical to SEQ ID NO: 1419
  CDS (1)..(1095)

SEQ ID NO: 33996 - protein, 364 aa, Ashbya gossypii; identical to SEQ ID NO: 1420

SEQ ID NO: 33997 - DNA, 1122 bp, Ashbya gossypii; identical to SEQ ID NO: 1421
  CDS (1)..(1122)

SEQ ID NO: 33998 - protein, 373 aa, Ashbya gossypii; identical to SEQ ID NO: 1422

SEQ ID NO: 33999 - DNA, 1098 bp, Amycolatopsis balhimycina; identical to SEQ ID NO: 1423
  CDS (1)..(1098)

SEQ ID NO: 34000 - protein, 365 aa, Amycolatopsis balhimycina; identical to SEQ ID NO: 1424

SEQ ID NO: 34001 - DNA, 1053 bp, Vibrio vulnificus; identical to SEQ ID NO: 2345
  CDS (1)..(1053)

SEQ ID NO: 34002 - protein, 350 aa, Vibrio vulnificus; identical to SEQ ID NO: 2346

SEQ ID NO: 34003 - DNA, 1047 bp, Photorhabdus luminescens; identical to SEQ ID NO: 1427
  CDS (1)..(1047)

SEQ ID NO: 34004 - protein, 348 aa, Photorhabdus luminescens; identical to SEQ ID NO: 1428

SEQ ID NO: 34005 - DNA, 1053 bp, Photorhabdus luminescens; identical to SEQ ID NO: 1429
  CDS (1)..(1053)

SEQ ID NO: 34006 - protein, 350 aa, Photorhabdus luminescens; identical to SEQ ID NO: 1430

SEQ ID NO: 34007 - DNA, 1095 bp, Photorhabdus luminescens; identical to SEQ ID NO: 1431
  CDS (1)..(1095)

SEQ ID NO: 34008 - protein, 364 aa, Photorhabdus luminescens; identical to SEQ ID NO: 1432

SEQ ID NO: 34009 - DNA, 1119 bp, Gloeobacter violaceus; identical to SEQ ID NO: 1433
  CDS (1)..(1119)

SEQ ID NO: 34010 - protein, 372 aa, Gloeobacter violaceus; identical to SEQ ID NO: 1434

SEQ ID NO: 34011 - DNA, 1107 bp, Chromobacterium violaceum; identical to SEQ ID NO: 1435
  CDS (1)..(1107)

SEQ ID NO: 34012 - protein, 368 aa, Chromobacterium violaceum; identical to SEQ ID NO: 1436

SEQ ID NO: 34013 - DNA, 1059 bp, Chromobacterium violaceum; identical to SEQ ID NO: 1437
  CDS (1)..(1059)

SEQ ID NO: 34014 - protein, 352 aa, Chromobacterium violaceum; identical to SEQ ID NO: 1438

SEQ ID NO: 34015 - DNA, 1140 bp, Neurospora crassa; identical to SEQ ID NO: 1439
  CDS (1)..(1140)

SEQ ID NO: 34016 - protein, 379 aa, Neurospora crassa; identical to SEQ ID NO: 1440

SEQ ID NO: 34017 - DNA, 1092 bp, Neurospora crassa; identical to SEQ ID NO: 1441
  CDS (1)..(1092)

SEQ ID NO: 34018 - protein, 363 aa, Neurospora crassa; identical to SEQ ID NO: 1442

SEQ ID NO: 34019 - DNA, 1068 bp, Synechococcus sp; identical to SEQ ID NO: 1443
  CDS (1)..(1068)

SEQ ID NO: 34020 - protein, 355 aa, Synechococcus sp; identical to SEQ ID NO: 1444

SEQ ID NO: 34021 - DNA, 1053 bp, Rhodopirellula baltica; identical to SEQ ID NO: 1445
  CDS (1)..(1053)

SEQ ID NO: 34022 - protein, 350 aa, Rhodopirellula baltica; identical to SEQ ID NO: 1446

SEQ ID NO: 34023 - DNA, 1068 bp, Prochlorococcus marinus subsp; identical to SEQ ID NO: 1447
  CDS (1)..(1068)

SEQ ID NO: 34024 - protein, 355 aa, Prochlorococcus marinus subsp; identical to SEQ ID NO: 1448

SEQ ID NO: 34025 - DNA, 1083 bp, Prochlorococcus marinus; identical to SEQ ID NO: 1449
  CDS (1)..(1083)

SEQ ID NO: 34026 - protein, 360 aa, Prochlorococcus marinus; identical to SEQ ID NO: 1450

SEQ ID NO: 34027 - DNA, 1074 bp, Prochlorococcus marinus; identical to SEQ ID NO: 1451
  CDS (1)..(1074)

SEQ ID NO: 34028 - protein, 357 aa, Prochlorococcus marinus; identical to SEQ ID NO: 1452

SEQ ID NO: 34029 - DNA, 1113 bp, Haemophilus ducreyi; identical to SEQ ID NO: 1453
  CDS (1)..(1113)

SEQ ID NO: 34030 - protein, 370 aa, Haemophilus ducreyi; identical to SEQ ID NO: 1454

SEQ ID NO: 34031 - DNA, 1080 bp, Haemophilus ducreyi; identical to SEQ ID NO: 1455
  CDS (1)..(1080)

SEQ ID NO: 34032 - protein, 359 aa, Haemophilus ducreyi; identical to SEQ ID NO: 1456

SEQ ID NO: 34033 - DNA, 1086 bp, Candidatus Blochmannia floridanus; identical to SEQ ID NO: 1457
  CDS (1)..(1086)

SEQ ID NO: 34034 - protein, 361 aa, Candidatus Blochmannia floridanus; identical to SEQ ID NO: 1458

SEQ ID NO: 34035 - DNA, 1074 bp, Bordetella pertussis; identical to SEQ ID NO: 2379
  CDS (1)..(1074)

SEQ ID NO: 34036 - protein, 357 aa, Bordetella pertussis; identical to SEQ ID NO: 1460

SEQ ID NO: 34037 - DNA, 1119 bp, Bordetella bronchiseptica; identical to SEQ ID NO: 1461
  CDS (1)..(1119)

SEQ ID NO: 34038 - protein, 372 aa, Bordetella bronchiseptica; identical to SEQ ID NO: 1462

SEQ ID NO: 34039 - DNA, 1179 bp, Nitrosomonas europaea; identical to SEQ ID NO: 1463
  CDS (1)..(1179)

SEQ ID NO: 34040 - protein, 392 aa, Nitrosomonas europaea; identical to SEQ ID NO: 1464

SEQ ID NO: 34041 - DNA, 1083 bp, Coxiella burnetii; identical to SEQ ID NO: 1465
  CDS (1)..(1083)

SEQ ID NO: 34042 - protein, 360 aa, Coxiella burnetii; identical to SEQ ID NO: 1466

SEQ ID NO: 34043 - DNA, 1053 bp, Vibrio parahaemolyticus; identical to SEQ ID NO: 1471
  CDS (1)..(1053)

SEQ ID NO: 34044 - protein, 350 aa, Vibrio parahaemolyticus; identical to SEQ ID NO: 1472

SEQ ID NO: 34045 - DNA, 1053 bp, Vibrio parahaemolyticus; identical to SEQ ID NO: 1473
  CDS (1)..(1053)

SEQ ID NO: 34046 - protein, 350 aa, Vibrio parahaemolyticus; identical to SEQ ID NO: 1474

SEQ ID NO: 34047 - DNA, 1074 bp, Vibrio parahaemolyticus; identical to SEQ ID NO: 1475
  CDS (1)..(1074)

SEQ ID NO: 34048 - protein, 357 aa, Vibrio parahaemolyticus; identical to SEQ ID NO: 1476

SEQ ID NO: 34049 - DNA, 1083 bp, Pseudomonas syringae; identical to SEQ ID NO: 1477
  CDS (1)..(1083)

SEQ ID NO: 34050 - protein, 360 aa, Pseudomonas syringae; identical to SEQ ID NO: 1478

SEQ ID NO: 34051 - DNA, 1077 bp, Pseudomonas syringae; identical to SEQ ID NO: 1479
  CDS (1)..(1077)

SEQ ID NO: 34052 - protein, 358 aa, Pseudomonas syringae; identical to SEQ ID NO: 1480

SEQ ID NO: 34053 - DNA, 1062 bp, Pseudomonas putida; identical to SEQ ID NO: 1481
  CDS (1)..(1062)

SEQ ID NO: 34054 - protein, 353 aa, Pseudomonas putida; identical to SEQ ID NO: 1482

SEQ ID NO: 34055 - DNA, 1113 bp, Pseudomonas putida; identical to SEQ ID NO: 1483
  CDS (1)..(1113)

SEQ ID NO: 34056 - protein, 370 aa, Pseudomonas putida; identical to SEQ ID NO: 1484

SEQ ID NO: 34057 - DNA, 1086 bp, Bradyrhizobium japonicum; identical to SEQ ID NO: 1485
  CDS (1)..(1086)

SEQ ID NO: 34058 - protein, 361 aa, Bradyrhizobium japonicum; identical to SEQ ID NO: 1486

SEQ ID NO: 34059 - DNA, 1053 bp, Yersinia pestis; identical to SEQ ID NO: 1487
  CDS (1)..(1053)

SEQ ID NO: 34060 - protein, 350 aa, Yersinia pestis; identical to SEQ ID NO: 1488

SEQ ID NO: 34061 - DNA, 1038 bp, Wigglesworthia glossinidia brevipalpis; identical to SEQ ID NO: 1491
  CDS (1)..(1038)

SEQ ID NO: 34062 - protein, 345 aa, Wigglesworthia glossinidia brevipalpis; identical to SEQ ID NO: 1492

SEQ ID NO: 34063 - DNA, 1071 bp, Vibrio vulnificus; identical to SEQ ID NO: 1739
  CDS (1)..(1071)

SEQ ID NO: 34064 - protein, 356 aa, Vibrio vulnificus; identical to SEQ ID NO: 1740

SEQ ID NO: 34065 - DNA, 1053 bp, Vibrio vulnificus; identical to SEQ ID NO: 1493
  CDS (1)..(1053)

SEQ ID NO: 34066 - protein, 350 aa, Vibrio vulnificus; identical to SEQ ID NO: 1494

SEQ ID NO: 34067 - DNA, 1071 bp, Vibrio vulnificus; identical to SEQ ID NO: 1497
  CDS (1)..(1071)

SEQ ID NO: 34068 - protein, 356 aa, Vibrio vulnificus; identical to SEQ ID NO: 1498

SEQ ID NO: 34069 - DNA, 1062 bp, Synechococcus elongatus; identical to SEQ ID NO: 1499
  CDS (1)..(1062)

SEQ ID NO: 34070 - protein, 353 aa, Synechococcus elongatus; identical to SEQ ID NO: 1500

SEQ ID NO: 34071 - DNA, 1032 bp, Streptococcus mutans; identical to SEQ ID NO: 1501
  CDS (1)..(1032)

SEQ ID NO: 34072 - protein, 343 aa, Streptococcus mutans; identical to SEQ ID NO: 1502

SEQ ID NO: 34073 - DNA, 1035 bp, Streptococcus mutans; identical to SEQ ID NO: 1503
  CDS (1)..(1035)

SEQ ID NO: 34074 - protein, 344 aa, Streptococcus mutans; identical to SEQ ID NO: 1504

SEQ ID NO: 34075 - DNA, 1008 bp, Streptococcus agalactiae; identical to SEQ ID NO: 1505
  CDS (1)..(1008)

SEQ ID NO: 34076 - protein, 335 aa, Streptococcus agalactiae; identical to SEQ ID NO: 1506

SEQ ID NO: 34077 - DNA, 1065 bp, Shewanella oneidensis; identical to SEQ ID NO: 1507
  CDS (1)..(1065)

SEQ ID NO: 34078 - protein, 354 aa, Shewanella oneidensis; identical to SEQ ID NO: 1508

SEQ ID NO: 34079 - DNA, 1092 bp, Shewanella oneidensis; identical to SEQ ID NO: 1509
  CDS (1)..(1092)

SEQ ID NO: 34080 - protein, 363 aa, Shewanella oneidensis; identical to SEQ ID NO: 1510

SEQ ID NO: 34081 - DNA, 1059 bp, Shewanella oneidensis; identical to SEQ ID NO: 1511
  CDS (1)..(1059)

SEQ ID NO: 34082 - protein, 352 aa, Shewanella oneidensis; identical to SEQ ID NO: 1512

SEQ ID NO: 34083 - DNA, 1170 bp, Corynebacterium efficiens; identical to SEQ ID NO: 1515
  CDS (1)..(1170)

SEQ ID NO: 34084 - protein, 389 aa, Corynebacterium efficiens; identical to SEQ ID NO: 1516

SEQ ID NO: 34085 - DNA, 1134 bp, Bifidobacterium longum; identical to SEQ ID NO: 1517
  CDS (1)..(1134)

SEQ ID NO: 34086 - protein, 377 aa, Bifidobacterium longum; identical to SEQ ID NO: 1518

SEQ ID NO: 34087 - DNA, 1233 bp, Bifidobacterium longum; identical to SEQ ID NO: 1519
  CDS (1)..(1233)

SEQ ID NO: 34088 - protein, 410 aa, Bifidobacterium longum; identical to SEQ ID NO: 1520

SEQ ID NO: 34089 - DNA, 1221 bp, Phytophthora infestans; identical to SEQ ID NO: 1521
  CDS (20)..(1153)

SEQ ID NO: 34090 - protein, 377 aa, Phytophthora infestans; identical to SEQ ID NO: 1522

SEQ ID NO: 34091 - DNA, 1062 bp, Chlorobium tepidum; identical to SEQ ID NO: 1523
  CDS (1)..(1062)

SEQ ID NO: 34092 - protein, 353 aa, Chlorobium tepidum; identical to SEQ ID NO: 1524

SEQ ID NO: 34093 - DNA, 1074 bp, Xanthomonas campestris; identical to SEQ ID NO: 1525
  CDS (1)..(1074)

SEQ ID NO: 34094 - protein, 357 aa, Xanthomonas campestris; identical to SEQ ID NO: 1526

SEQ ID NO: 34095 - DNA, 1074 bp, Xanthomonas axonopodis; identical to SEQ ID NO: 1527
  CDS (1)..(1074)

SEQ ID NO: 34096 - protein, 357 aa, Xanthomonas axonopodis; identical to SEQ ID NO: 1528

SEQ ID NO: 34097 - DNA, 1080 bp, Ralstonia solanacearum; identical to SEQ ID NO: 1529
  CDS (1)..(1080)

SEQ ID NO: 34098 - protein, 359 aa, Ralstonia solanacearum; identical to SEQ ID NO: 1530

SEQ ID NO: 34099 - DNA, 1179 bp, Ralstonia solanacearum; identical to SEQ ID NO: 1531
  CDS (1)..(1179)

SEQ ID NO: 34100 - protein, 392 aa, Ralstonia solanacearum; identical to SEQ ID NO: 1532

SEQ ID NO: 34101 - DNA, 1065 bp, Synechococcus sp; identical to SEQ ID NO: 1533
  CDS (1)..(1065)

SEQ ID NO: 34102 - protein, 354 aa, Synechococcus sp; identical to SEQ ID NO: 1534

SEQ ID NO: 34103 - DNA, 1035 bp, Escherichia coli; identical to SEQ ID NO: 1535
  CDS (1)..(1035)

SEQ ID NO: 34104 - protein, 344 aa, Escherichia coli; identical to SEQ ID NO: 1536

SEQ ID NO: 34105 - DNA, 1200 bp, Stigmatella aurantiaca; identical to SEQ ID NO: 1537
  CDS (62)..(1147)

SEQ ID NO: 34106 - protein, 361 aa, Stigmatella aurantiaca; identical to SEQ ID NO: 1538

SEQ ID NO: 34107 - DNA, 1083 bp, Amycolatopsis mediterranei; identical to SEQ ID NO: 1541
  CDS (1)..(1083)

SEQ ID NO: 34108 - protein, 360 aa, Amycolatopsis mediterranei; identical to SEQ ID NO: 1542

SEQ ID NO: 34109 - DNA, 1053 bp, Pasteurella multocida; identical to SEQ ID NO: 1543
  CDS (1)..(1053)

SEQ ID NO: 34110 - protein, 350 aa, Pasteurella multocida; identical to SEQ ID NO: 1544

SEQ ID NO: 34111 - DNA, 1086 bp, Pasteurella multocida; identical to SEQ ID NO: 1545
  CDS (1)..(1086)

SEQ ID NO: 34112 - protein, 361 aa, Pasteurella multocida; identical to SEQ ID NO: 1546

SEQ ID NO: 34113 - DNA, 1125 bp, Emericella nidulans; identical to SEQ ID NO: 1547
  CDS (1)..(1125)

SEQ ID NO: 34114 - protein, 374 aa, Emericella nidulans; identical to SEQ ID NO: 1548

SEQ ID NO: 34115 - DNA, 1089 bp, Emericella nidulans; identical to SEQ ID NO: 1549
  CDS (1)..(1089)

SEQ ID NO: 34116 - protein, 362 aa, Emericella nidulans; identical to SEQ ID NO: 1550

SEQ ID NO: 34117 - DNA, 1239 bp, Vibrio cholerae; identical to SEQ ID NO: 1551
  CDS (114)..(1175)

SEQ ID NO: 34118 - protein, 353 aa, Vibrio cholerae; identical to SEQ ID NO: 1552

SEQ ID NO: 34119 - DNA, 2184 bp, Candida albicans; identical to SEQ ID NO: 1553
  CDS (461)..(1573)

SEQ ID NO: 34120 - protein, 370 aa, Candida albicans; identical to SEQ ID NO: 1554

SEQ ID NO: 34121 - DNA, 1047 bp, Buchnera aphidicola; identical to SEQ ID NO: 1555
  CDS (1)..(1047)

SEQ ID NO: 34122 - protein, 348 aa, Buchnera aphidicola; identical to SEQ ID NO: 1556

SEQ ID NO: 34123 - DNA, 1047 bp, Buchnera aphidicola; identical to SEQ ID NO: 1557
  CDS (1)..(1047)

SEQ ID NO: 34124 - protein, 348 aa, Buchnera aphidicola; identical to SEQ ID NO: 1558

SEQ ID NO: 34125 - DNA, 1047 bp, Erwinia herbicola; identical to SEQ ID NO: 1559
  CDS (1)..(1047)

SEQ ID NO: 34126 - protein, 348 aa, Erwinia herbicola; identical to SEQ ID NO: 1560

SEQ ID NO: 34127 - DNA, 1047 bp, Salmonella typhimurium; identical to SEQ ID NO: 1561
  CDS (1)..(1047)

SEQ ID NO: 34128 - protein, 348 aa, Salmonella typhimurium; identical to SEQ ID NO: 1562

SEQ ID NO: 34129 - DNA, 1047 bp, Shigella flexneri; identical to SEQ ID NO: 2473
  CDS (1)..(1047)

SEQ ID NO: 34130 - protein, 348 aa, Shigella flexneri; identical to SEQ ID NO: 2474

SEQ ID NO: 34131 - DNA, 25 bp, Artificial sequence
  Primer sequence
atgttcattaaaaacgatcacgccg

SEQ ID NO: 34132 - DNA, 25 bp, Artificial sequence
  Primer sequence
ctattttttcaaggcctttcttctg

SEQ ID NO: 34133 - protein, 353 aa, Artificial sequence; identical to SEQ ID NO: 24922
  Consensus
  Variant (2)..(3): Xaa in position 2 to 3 is any amino acid
  Variant (5)..(11): Xaa in position 5 to 11 is any amino acid
  Variant (13)..(24): Xaa in position 13 to 24 is any amino acid
  Variant (26)..(30): Xaa in position 26 to 30 is any amino acid
  Variant (32)..(33): Xaa in position 32 to 33 is any amino acid
  Variant (35)..(35): Xaa in position 35 is any amino acid
  Variant (37)..(37): Xaa in position 37 is any amino acid
  Variant (39)..(46): Xaa in position 39 to 46 is any amino acid
  Variant (51)..(51): Xaa in position 51 is any amino acid
  Variant (54)..(56): Xaa in position 54 to 56 is any amino acid
  Variant (58)..(59): Xaa in position 58 to 59 is any amino acid
  Variant (62)..(63): Xaa in position 62 to 63 is any amino acid
  Variant (65)..(76): Xaa in position 65 to 76 is any amino acid
  Variant (78)..(80): Xaa in position 78 to 80 is any amino acid
  Variant (83)..(83): Xaa in position 83 is any amino acid
  Variant (85)..(85): Xaa in position 85 is any amino acid
  Variant (91)..(93): Xaa in position 91 to 93 is any amino acid
  Variant (100)..(100): Xaa in position 100 is any amino acid
  Variant (103)..(112): Xaa in position 103 to 112 is any amino acid
  Variant (115)..(117): Xaa in position 115 to 117 is any amino acid
  Variant (119)..(119): Xaa in position 119 is any amino acid
  Variant (121)..(130): Xaa in position 121 to 130 is any amino acid
  Variant (132)..(132): Xaa in position 132 is any amino acid
  Variant (134)..(134): Xaa in position 134 is any amino acid
  Variant (136)..(136): Xaa in position 136 is any amino acid
  Variant (139)..(142): Xaa in position 139 to 142 is any amino acid
  Variant (144)..(146): Xaa in position 144 to 146 is any amino acid
  Variant (148)..(152): Xaa in position 148 to 152 is any amino acid
  Variant (163)..(163): Xaa in position 163 is any amino acid
  Variant (166)..(168): Xaa in position 166 to 168 is any amino acid
  Variant (171)..(171): Xaa in position 171 is any amino acid
  Variant (174)..(174): Xaa in position 174 is any amino acid
  Variant (176)..(176): Xaa in position 176 is any amino acid
  Variant (181)..(181): Xaa in position 181 is any amino acid
  Variant (183)..(183): Xaa in position 183 is any amino acid
  Variant (185)..(188): Xaa in position 185 to 188 is any amino acid
  Variant (190)..(191): Xaa in position 190 to 191 is any amino acid
  Variant (193)..(195): Xaa in position 193 to 195 is any amino acid
  Variant (197)..(199): Xaa in position 197 to 199 is any amino acid
  Variant (201)..(201): Xaa in position 201 is any amino acid
  Variant (203)..(208): Xaa in position 203 to 208 is any amino acid
  Variant (210)..(215): Xaa in position 210 to 215 is any amino acid
  Variant (217)..(217): Xaa in position 217 is any amino acid
  Variant (220)..(222): Xaa in position 220 to 222 is any amino acid
  Variant (224)..(225): Xaa in position 224 to 225 is any amino acid
  Variant (230)..(238): Xaa in position 230 to 238 is any amino acid
  Variant (241)..(269): Xaa in position 241 to 269 is any amino acid
  Variant (271)..(271): Xaa in position 271 is any amino acid
  Variant (274)..(274): Xaa in position 274 is any amino acid
  Variant (277)..(277): Xaa in position 277 is any amino acid
  Variant (279)..(282): Xaa in position 279 to 282 is any amino acid
  Variant (284)..(285): Xaa in position 284 to 285 is any amino acid
  Variant (287)..(292): Xaa in position 287 to 292 is any amino acid
  Variant (294)..(296): Xaa in position 294 to 296 is any amino acid
  Variant (298)..(305): Xaa in position 298 to 305 is any amino acid
  Variant (307)..(307): Xaa in position 307 is any amino acid
  Variant (309)..(309): Xaa in position 309 is any amino acid
  Variant (312)..(315): Xaa in position 312 to 315 is any amino acid
  Variant (317)..(317): Xaa in position 317 is any amino acid
  Variant (319)..(334): Xaa in position 319 to 334 is any amino acid
  Variant (337)..(337): Xaa in position 337 is any amino acid
  Variant (339)..(339): Xaa in position 339 is any amino acid
  Variant (342)..(342): Xaa in position 342 is any amino acid
  Variant (344)..(345): Xaa in position 344 to 345 is any amino acid
  Variant (347)..(348): Xaa in position 347 to 348 is any amino acid
  Variant (350)..(352): Xaa in position 350 to 352 is any amino acid

SEQ ID NO: 34134 - protein, 72 aa, Artificial sequence; identical to SEQ ID NO: 2906
  Consensus
  Variant (5)..(5): Xaa in position 5 is Ile, Val, Ser or Leu
  Variant (6)..(6): Xaa in position 6 is His or Asp
  Variant (7)..(7): Xaa in position 7 is Asp or Asn
  Variant (8)..(10): Xaa in position 8 to 10 is any amino acid
  Variant (11)..(11): Xaa in position 11 is Ala, Val or Gly
  Variant (12)..(12): Xaa in position 12 is any amino acid
  Variant (13)..(13): Xaa in position 13 is Glu, Asp, Ala or Gln
  Variant (15)..(15): Xaa in position 15 is Ala, Gly or Cys
  Variant (16)..(17): Xaa in position 16 to 17 is any amino acid
  Variant (18)..(18): Xaa in position 18 is Leu, Ile or Phe
  Variant (19)..(28): Xaa in position 19 to 28 is any amino acid
  Variant (29)..(30): Xaa in position 29 to 30 is any or no amino acid
  Variant (31)..(31): Xaa in position 31 is Leu, Ile, Phe or Met
  Variant (32)..(32): Xaa in position 32 is any amino acid
  Variant (33)..(33): Xaa in position 33 is Ile, Val, Leu or Met
  Variant (34)..(34): Xaa in position 34 is Val, Ile or Leu
  Variant (37)..(37): Xaa in position 37 is Val, Ala or Thr
  Variant (39)..(39): Xaa in position 39 is Phe, Leu, Thr or Val
  Variant (40)..(40): Xaa in position 40 is Glu or Ala
  Variant (45)..(46): Xaa in position 45 to 46 is any amino acid
  Variant (47)..(47): Xaa in position 47 is any or no amino acid
  Variant (49)..(49): Xaa in position 49 is Trp or Tyr
  Variant (50)..(50): Xaa in position 50 is Lys or Arg
  Variant (52)..(52): Xaa in position 52 is Leu, Phe, Met or Tyr
  Variant (53)..(53): Xaa in position 53 is Ile, Val, Ala or Leu
  Variant (54)..(54): Xaa in position 54 is any amino acid
  Variant (55)..(55): Xaa in position 55 is Asp, Glu or Gln
  Variant (57)..(57): Xaa in position 57 is any amino acid
  Variant (58)..(58): Xaa in position 58 is Leu, Met, Ile, Val, Ala or Thr
  Variant (59)..(59): Xaa in position 59 is Asp, Asn or Ser
  Variant (60)..(63): Xaa in position 60 to 63 is any amino acid
  Variant (64)..(64): Xaa in position 64 is Ile, Val, Leu or Met
  Variant (65)..(66): Xaa in position 65 to 66 is any amino acid
  Variant (68)..(68): Xaa in position 68 is Leu, Ile, Met or Val
  Variant (69)..(70): Xaa in position 69 to 70 is any amino acid
  Variant (71)..(71): Xaa in position 71 is Ala, Ser, Gly, Val or Thr

SEQ ID NO: 34135 - protein, 76 aa, Artificial sequence; identical to SEQ ID NO: 2907
  Consensus
  Variant (1)..(1): Xaa in position 1 is Ala or Ser
  Variant (2)..(2): Xaa in position 2 is Ile or Val
  Variant (6)..(6): Xaa in position 6 is Thr, Ser or Asn
  Variant (7)..(7): Xaa in position 7 is Thr, Val, Ala, Ser or Ile
  Variant (8)..(8): Xaa in position 8 is Glu or Ala
  Variant (9)..(9): Xaa in position 9 is Ser, Asp or Asn
  Variant (11)..(11): Xaa in position 11 is any amino acid
  Variant (14)..(14): Xaa in position 14 is Glu, Gln, Phe or Met
  Variant (15)..(15): Xaa in position 15 is Leu, Met, Val, Phe or Ile
  Variant (16)..(16): Xaa in position 16 is Ala, Ser, Thr, Cys or Val
  Variant (18)..(18): Xaa in position 18 is Gly, Ala or Asn
  Variant (19)..(21): Xaa in position 19 to 21 is any amino acid
  Variant (22)..(22): Xaa in position 22 is Pro or Ala
  Variant (23)..(23): Xaa in position 23 is Val, Ile, Thr or Leu
  Variant (25)..(25): Xaa in position 25 is Phe, Met, Tyr or Ile
  Variant (28)..(28): Xaa in position 28 is any amino acid
  Variant (29)..(29): Xaa in position 29 is Thr, Ser or Arg
  Variant (30)..(30): Xaa in position 30 is any amino acid
  Variant (32)..(35): Xaa in position 32 to 35 is any amino acid
  Variant (36)..(36): Xaa in position 36 is Ala or Met
  Variant (37)..(37): Xaa in position 37 is any amino acid
  Variant (38)..(38): Xaa in position 38 is Asp, Asn or Glu
  Variant (39)..(39): Xaa in position 39 is Ala or Gly
  Variant (40)..(41): Xaa in position 40 to 41 is any amino acid
  Variant (42)..(42): Xaa in position 42 is Ala or Ser
  Variant (43)..(43): Xaa in position 43 is Ala, Ser, Val or Thr
  Variant (44)..(46): Xaa in position 44 to 46 is any amino acid
  Variant (47)..(47): Xaa in position 47 is His or Gln
  Variant (48)..(48): Xaa in position 48 is any amino acid
  Variant (49)..(49): Xaa in position 49 is Phe, Tyr, His or Val
  Variant (50)..(51): Xaa in position 50 to 51 is any amino acid
  Variant (52)..(55): Xaa in position 52 to 55 is any or no amino acid
  Variant (57)..(60): Xaa in position 57 to 60 is any amino acid
  Variant (61)..(62): Xaa in position 61 to 62 is any or no amino acid
  Variant (63)..(63): Xaa in position 63 is Thr or Ser
  Variant (64)..(64): Xaa in position 64 is any amino acid
  Variant (67)..(69): Xaa in position 67 to 69 is any amino acid
  Variant (70)..(70): Xaa in position 70 is His or Phe
  Variant (71)..(71): Xaa in position 71 is Val, Ile, Leu or Ala
  Variant (72)..(72): Xaa in position 72 is Ile or Val
  Variant (73)..(73): Xaa in position 73 is Leu or Met
  Variant (76)..(76): Xaa in position 76 is Gly, Ala or Ser

SEQ ID NO: 34136 - protein, 83 aa, Artificial sequence; identical to SEQ ID NO: 2908
  Consensus
  Variant (1)..(1): Xaa in position 1 is Leu, Ile or Val
  Variant (2)..(2): Xaa in position 2 is Met, Val, Ile or Leu
  Variant (3)..(3): Xaa in position 3 is Ile or Val
  Variant (5)..(5): Xaa in position 5 is Cys, Phe, Ala, Thr or Tyr
  Variant (6)..(6): Xaa in position 6 is Ser, Asn or Ala
  Variant (8)..(8): Xaa in position 8 is Gly, Ala or Asp
  Variant (10)..(10): Xaa in position 10 is Ser or Cys
  Variant (11)..(11): Xaa in position 11 is any amino acid
  Variant (13)..(15): Xaa in position 13 to 15 is any amino acid
  Variant (16)..(16): Xaa in position 16 is Arg, Asn, Lys, Leu or Glu
  Variant (18)..(19): Xaa in position 18 to 19 is any amino acid
  Variant (20)..(20): Xaa in position 20 is Val or Ile
  Variant (21)..(26): Xaa in position 21 to 26 is any amino acid
  Variant (27)..(27): Xaa in position 27 is Gln, Asn or Arg
  Variant (28)..(28): Xaa in position 28 is Ile, Leu, Val, Arg or Met
  Variant (29)..(30): Xaa in position 29 to 30 is any amino acid
  Variant (31)..(31): Xaa in position 31 is Gly, Asn or Asp
  Variant (32)..(32): Xaa in position 32 is any amino acid
  Variant (33)..(37): Xaa in position 33 to 37 is any or no amino acid
  Variant (38)..(38): Xaa in position 38 is Ile, Val or Leu
  Variant (39)..(39): Xaa in position 39 is any amino acid
  Variant (41)..(41): Xaa in position 41 is any amino acid
  Variant (43)..(43): Xaa in position 43 is Ile, Leu, Val, Ala or Met
  Variant (46)..(46): Xaa in position 46 is His, Phe, Asn or Tyr
  Variant (47)..(47): Xaa in position 47 is Leu or Ile
  Variant (48)..(49): Xaa in position 48 to 49 is any amino acid
  Variant (51)..(51): Xaa in position 51 is any amino acid
  Variant (53)..(57): Xaa in position 53 to 57 is any amino acid
  Variant (58)..(69): Xaa in position 58 to 69 is any or no amino acid
  Variant (71)..(71): Xaa in position 71 is any amino acid
  Variant (73)..(73): Xaa in position 73 is Ile or Val
  Variant (76)..(76): Xaa in position 76 is any amino acid
  Variant (78)..(78): Xaa in position 78 is Ile, Leu or Val
  Variant (79)..(79): Xaa in position 79 is any amino acid
  Variant (80)..(80): Xaa in position 80 is Trp, Ile, Leu or Phe
  Variant (81)..(82): Xaa in position 81 to 82 is any amino acid
  Variant (83)..(83): Xaa in position 83 is Thr or Ser

SEQ ID NO: 34137 - DNA, 2970 bp, Saccharomyces cerevisiae
  CDS (1)..(2970)
atgttgcggtttcagcgatttgcgtcctcgtatgcccaagcacaggccgttagaaaatatccagttggaggtatattccatggttatgaagtgagaagaattctaccggttccggagctgagactcactgcggtagatttggtgcactcccagacaggagccgagcatttgcatattgatagagacgacaagaataatgtgttcagcattgcttttaaaaccaaccctccagattccactggggtccctcatattctagagcatacaacgttgtgtgggtctgttaaatatccagttagggacccttttttcaaaatgctaaataaatctctagctaatttcatgaacgctatgacaggtccagattatacattttttcccttttccactacgaaccctcaagatttcgctaatttaagaggtgtttatttagactccaccttgaatccgctacttaaacaagaagattttgatcaggagggttggaggttggagcataaaaacatcacagacccggagagtaacattgttttcaaaggtgttgtctataacgaaatgaaaggtcaaatatcaaatgccaattactatttctggagtaaatttcaacagtctatttatccttccctgaataactccggcggagatcctatgaaaattacagacttgagatacggcgatctcttggatttccatcacaaaaattaccatccctccaatgcaaaaactttcacgtacggtaacttgccattggtggatacgttaaagcaattaaatgagcagttcagtggttacgggaagagagctcgaaaggataagttgttaatgcctattgatttaaaaaaagacatagatgtcaagttactgggtcaaatagatactatgcttccaccggagaagcagacaaaagcctcaatgacgtggatttgtggagcgccacaggacacatatgatacctttttgttaaaagtactggggaatttattaatggatggccattcttctgtaatgtatcaaaaattaatagaatcaggaattggtttggagttctccgtaaattcaggtgttgaaccaactacagcagtaaatttgctaactgttggtatacagggcgtgagtgatattgaaatatttaaagacactgtaaataatatttttcaaaacctgttggaaacagaacatccttttgaccgcaagcgtatcgatgccataattgaacaattggaattatctaagaaggatcaaaaggctgactttggacttcaattactctattctatactacctggttggacaaacaaaatcgatccttttgagagcttgttgtttgaggacgttttgcaaagatttagaggtgacttagaaacgaaaggtgatactttattccaagatttaatccgtaaatatatcgttcataaaccttgtttcacgttttccattcagggatctgaagagttctctaaatctttggatgatgaagaacaaacaagactgagagaaaaaattactgccttggatgaacaagacaagaaaaacatctttaaacgtggtatactgttacaggagaaacaaaatgaaaaagaagatttatcctgtttacctaccttacaaataaaagacatcccaagagctggtgataaatattcaatcgaacagaagaataatacaatgtctaggattactgataccaatggtatcacatatgtcagaggtaaacgtttactaaatgacataataccctttgaactcttcccatacttacctttatttgctgaatcgttaactaacctagggacaacaacagaatccttcagtgaaatagaagatcagataaaattacatacgggtggtatatcaacacatgtagaggttacatctgaccctaacaccacagagcctcgcctgattttcgggtttgacggatggtctttaaattcgaagaccgaccacatttttgaattctggtctaagatcttactagaaactgatttccataaaaacagcgataaattgaaagttcttatccgcttattagcatcttcaaacacatcttctgtagcagatgccggtcatgcatttgcaaggggctattctgccgcacattatagatcaagtggagctataaatgagaccctcaatggtattgagcaactacaatttataaatagattgcacagcttgttagacaatgaagaaactttccaaagagaagttgtcgacaagctaactgaattgcaaaagtacattgttgataccaataacatgaatttttttatcacctcagactctgatgttcaagcgaaaacagtagaaagccaaatttcaaaattcatggagagattacctcatggcagctgcttgcccaatggaccaaagacttcagattatcctcttattggatccaaatgtaaacatactttgataaaatttcctttccaggtccattacacatcccaagctttattgggtgtgccgtatacacataaggatggctctgcacttcaagttatgtcaaatatgctaacattcaaacatttgcacagagaagtcagagaaaagggtggtgcttatggtggtggtgcttcttatagcgccttagcgggtattttcagtttctattcctatagggatcctcagcctttgaagagtttagaaaccttcaagaatagcgggcgttatatactgaacgatgccaagtggggcgtcacagaccttgatgaagctaaattgacaatatttcaacaagtagacgcacctaaaagtcccaaaggagaaggcgtgacgtatttcatgagcggtgttacagacgatatgaaacaagcaagaagggaacaactcttagacgtatctctcctggacgttcatagagtcgccgaaaaatatctactaaacaaagaaggggtgagtacggtcattggacctggaatcgaggggaagactgtttcaccaaattgggaggtgaaggaactgtag

SEQ ID NO: 34138 - protein, 989 aa, Saccharomyces cerevisiae
MLRFQRFASSYAQAQAVRKYPVGGIFHGYEVRRILPVPELRLTAVDLVHSQTGAEHLHIDRDDKNNVFSIAFKTNPPDSTGVPHILEHTTLCGSVKYPVRDPFFKMLNKSLANFMNAMTGPDYTFFPFSTTNPQDFANLRGVYLDSTLNPLLKQEDFDQEGWRLEHKNITDPESNIVFKGVVYNEMKGQISNANYYFWSKFQQSIYPSLNNSGGDPMKITDLRYGDLLDFHHKNYHPSNAKTFTYGNLPLVDTLKQLNEQFSGYGKRARKDKLLMPIDLKKDIDVKLLGQIDTMLPPEKQTKASMTWICGAPQDTYDTFLLKVLGNLLMDGHSSVMYQKLIESGIGLEFSVNSGVEPTTAVNLLTVGIQGVSDIEIFKDTVNNIFQNLLETEHPFDRKRIDAIIEQLELSKKDQKADFGLQLLYSILPGWTNKIDPFESLLFEDVLQRFRGDLETKGDTLFQDLIRKYIVHKPCFTFSIQGSEEFSKSLDDEEQTRLREKITALDEQDKKNIFKRGILLQEKQNEKEDLSCLPTLQIKDIPRAGDKYSIEQKNNTMSRITDTNGITYVRGKRLLNDIIPFELFPYLPLFAESLTNLGTTTESFSEIEDQIKLHTGGISTHVEVTSDPNTTEPRLIFGFDGWSLNSKTDHIFEFWSKILLETDFHKNSDKLKVLIRLLASSNTSSVADAGHAFARGYSAAHYRSSGAINETLNGIEQLQFINRLHSLLDNEETFQREVVDKLTELQKYIVDTNNMNFFITSDSDVQAKTVESQISKFMERLPHGSCLPNGPKTSDYPLIGSKCKHTLIKFPFQVHYTSQALLGVPYTHKDGSALQVMSNMLTFKHLHREVREKGGAYGGGASYSALAGIFSFYSYRDPQPLKSLETFKNSGRYILNDAKWGVTDLDEAKLTIFQQVDAPKSPKGEGVTYFMSGVTDDMKQARREQLLDVSLLDVHRVAEKYLLNKEGVSTVIGPGIEGKTVSPNWEVKEL

SEQ ID NO: 34139 - DNA, 2973 bp, Eremothecium gossypii
  CDS (1)..(2973)
atgttgaggttccaacgaacagtgccacgagtggccataaggaggcttgcgaatgtatattcggagggagcagtactgcacgggtacaaggtgcggcgggcgcaagagattccagagatgcgaatggctgcggtggagctggagcacgagatgaccggggccagacacctacacctggagcgagaggaccagaacaacgttttcagtgtcgggttccggactccgccgcccgatgcgacgggggtgccgcacattcttgagcacacgacgctgtgcgggtcgcagaagtacccggtgcgggatccgttcttcaagatgctgaaccggtcgctggcgaacttcatgaatgcgatgacggcgcacgaccacacattctacccgtttgcaacgacgaaccaaaaggactttgcgaacctgcgggacctgtacctggacgcgacgcttcggccgctgctgcggcacgcggactttctgcaggaggggtggaggctggagcaccgggacgtcggggacgcgagcagcgagctggtcttcaagggcgtagtgtacaacgagatgaagggccaggtgtcgaacgcggactactacttttggatccggttccaggaggccatctatccggcgctgcacaactcgggcggcgacccggagcacatcaccgacctgagctacgaggatcttgtggcttttcaccagaaccactaccatccgtcgaacgcgaagacgttcacgtatgggaacttcccgcttcgcgatacgctgcgcaagctggacgacgaattccgcggcttcgggcgccgcgcgatcccgcagatgcacgagaagccgttgcagctgcgcgaggctgtgtcggtggaggagccctgccagatcgatcctatgctccccgcagataaacagtgccgcacatccatgacgtggatatgcggaaacccgaatgatgtatacgagacattcctgttgaagattctcgggtctctgttgtttgatggtcattcttcggccttttacaagaagctggtcgaggaaactggacttgcgtatgagctgtcagtgaacacgggtgtggaatcccagacggcggcaaacttcttgaccgtcggtgtgcaaggatgcaccaatgtaggcaaggtccataaggttattatggagaccttcacggcgcttttggcccagccctttgagaaacacagggtcgaagcaatcctgcaccaactagagctctccaaaaaggatcagaagtctgactttggcctccaactgctgtacggcatcctcccaggatgggtcaacaacacagatccgttcgatctcttatctttgaacagtgcactgcagagattcagggccgactgggacagagagggcgatggtttgttccagcgcctgctgaacaagtacgtaattggcaagcccagtttcacgtttaccatggtgggcagttcggactttaaccaggtgaaggaccaaaacgagcagtcgaaactaaaggcgaaggtgtcctcgttaaccgagagtgataaggaagtgatttacaagcgtggtttgcatcttcaggaactgcagaatagtgagcaggacctttcaaaactaccaacgttgaccacagcggacatccctcattcgagtgggcactattttgtttctcgcgacggaccgatcacaactcgtcaaactgacacgaacggtataacgtacattagaatgaagcgtccgctcaagggagccataccttacgatgcatatccctacatcccactttactccgacggactaatgaacatcggcaccctacttgaagatgcctctgcaattgaggagcagattcgtctgcacacaggtgggatctccgtgtccataggtgtccatccaaacgtcgaaactcgcctttctgagctgtatctggaaatcagtgcctgtgcattgaattctaaaacgcagtatgtgtttgacataataaacaaaattatgaacgagacagccctcagcgttaggtcggagaagatgaaggtcttgattagggccgctgcatcctccttcacgtcctacgcagctgaaaacggacatgatttggccaggctacataccggagcccatttttcgcagactcaggcaattatggagcagactgctggtattgagcaagtgcgccacatgaacaacctcatgagtataattgaaaaagaggcagagttcaacactgtcctccagaacttggaagccatgcatcgtaagatctttgtcgcggatggcttggaggtgatgatcacaactgacaaccggcaaacgtcggacgtcgtcaaagatcaggctttgaagttcattgctggtgtgcagcagtcagcaggcgcggaatcctggcttccggaaaagtattcccgccgcgcgctcgagaagccgtacccggcactgcttcagttcccattccaggtacactatactgcccagtccacccaaggtgtctcctacacccatccagatggcgcacatctccaggtcttggcgtcgctgcttacgtttaagcacctgcatcgcgaagtacgcgagaagggcggcgcgtacggcggaggcgctacgtacaacgccacagatggtatcttcaacttcttctcgtacagggatccgcagcccgttcgctctctcaacatcttcagaaacgcagggaaatacgtgctgaatgaggcccgttggacggcggacgacctcaatgaggccaaactgagtatctttcagcgcgtggacgccccgatcagccccagctcggaggggctgctccagttccggcataacatcagcgatgaacagcgcgacagacgtcgccagcagctgctaaaatcaacgcttgacgacgtccgtcgtgttgcagacatttatcttgtgcagccgtctccttcgcaacatatgagtgctgtggttggcccagaacttccccgcgaagtttggtcgagccaatggccagtgataaaagtctga

SEQ ID NO: 34140 - protein, 990 aa, Eremothecium gossypii
MLRFQRTVPRVAIRRLANVYSEGAVLHGYKVRRAQEIPEMRMAAVELEHEMTGARHLHLEREDQNNVFSVGFRTPPPDATGVPHILEHTTLCGSQKYPVRDPFFKMLNRSLANFMNAMTAHDHTFYPFATTNQKDFANLRDLYLDATLRPLLRHADFLQEGWRLEHRDVGDASSELVFKGVVYNEMKGQVSNADYYFWIRFQEAIYPALHNSGGDPEHITDLSYEDLVAFHQNHYHPSNAKTFTYGNFPLRDTLRKLDDEFRGFGRRAIPQMHEKPLQLREAVSVEEPCQIDPMLPADKQCRTSMTWICGNPNDVYETFLLKILGSLLFDGHSSAFYKKLVEETGLAYELSVNTGVESQTAANFLTVGVQGCTNVGKVHKVIMETFTALLAQPFEKHRVEAILHQLELSKKDQKSDFGLQLLYGILPGWVNNTDPFDLLSLNSALQRFRADWDREGDGLFQRLLNKYVIGKPSFTFTMVGSSDFNQVKDQNEQSKLKAKVSSLTESDKEVIYKRGLHLQELQNSEQDLSKLPTLTTADIPHSSGHYFVSRDGPITTRQTDTNGITYIRMKRPLKGAIPYDAYPYIPLYSDGLMNIGTLLEDASAIEEQIRLHTGGISVSIGVHPNVETRLSELYLEISACALNSKTQYVFDIINKIMNETALSVRSEKMKVLIRAAASSFTSYAAENGHDLARLHTGAHFSQTQAIMEQTAGIEQVRHMNNLMSIIEKEAEFNTVLQNLEAMHRKIFVADGLEVMITTDNRQTSDVVKDQALKFIAGVQQSAGAESWLPEKYSRRALEKPYPALLQFPFQVHYTAQSTQGVSYTHPDGAHLQVLASLLTFKHLHREVREKGGAYGGGATYNATDGIFNFFSYRDPQPVRSLNIFRNAGKYVLNEARWTADDLNEAKLSIFQRVDAPISPSSEGLLQFRHNISDEQRDRRRQQLLKSTLDDVRRVADIYLVQPSPSQHMSAVVGPELPREVWSSQWPVIKV

SEQ ID NO: 34141 - DNA, 3039 bp, Neurospora crassa
  CDS (1)..(3039)
atgctgcgcaacgcgaccaaaggtgcagcgcgccgcgccgtcaccgagctctcccagtacccgaaacccggcgagaaactccacggcttcacccttctccggtcaaagcatgtcccggagctggagttgactgctttgcacttgcaacacgacaagaccggagcagagcatttgcacattgcccgtgacgacagcaacaatgtcttctctatcggcttcaaaacgaatcccccggacgacaccggtgtcccacatatcctggagcacaccactctgtgtggcagccaaaaataccctatccgagaccccttcttcaagatgcttccgcgaacgctttcgaatttcatgaacgcctttacagcatcagatcacaccttttacccgttcgccaccaccaatgctcaggactttaagaacctcatgtctgtctaccttgacgcgactctgcatcctctcttgaaggagacggactttacacaggaaggatggcgtattggacccgagaatccccaggctcttgttgcggctgagggcaacgcaaagcccgaggacaggaagcttgtcttcaagggtgtcgtttataacgagatgaaggggcagatgtcggatgctgcctacctcttctggattcggttccaagaccacattttcccagacatccacaactctggtggtgatccccagaaaatcacagacttgacataccaacagctcaagaagttccatgctgatcactaccacccgagcaacgccaaagtctttacttatggcgatatgccactggcagatcacttgaaggaaatcggtgcccagctcgacgtatttgagaagatccgggctgatgtggcacaccatagccctatcgacctcagcagtggccccagggaagtcaagctctatggacctattgacccccttgtggacgccaataagcagttcaagacttccgtttcgtgggttctgggtgaaaccaacaatgtcgtcgagtccttttcgctggcgctgatttctgctctgctcatggatggttatggctcgcctctctacaagggattgattgaatccgggctaggaacggactggagccccaacaccggatatgacagttcgggcaagcttggtatcttctccattggcctcagcggtgttcaagaagaagatgtgcccaaggtcaaggccaaggtacaggagattcttcgcagcatgcgggacaagggttttgagagatcaaagattgatggctatctccaccagcttgagctcggccttaagcacaagactgccaactttggcatgtctttgctccaccgtttgaagccaaagtggtttgttggagtcgatccatttgactctcttgcctggaacgacacgattgctgcttttgagaccgagcttgccaaaggtggttatcttgagggcttgattgataagtatctgatcaacgacaatactctctccttcacgatggcgccttcgccaacctttagccaggagctggcccaagaggaggaaactcgcttaagcaccaagatttcggaagttgtcaaagctgctggtagcgaagaggaagctcgtgctgctctcgaagctcgggaactcaaattgttggccgagcaaagcaagaccaacaccgaagatcttggctgccttcctagcgtgcatgtcaaggacattccccgccagaaggactcggttatcttgagacacgataacacagcaagagtcaagacacagtggcacgaggctcccacgaacgggctgacctacttccgtgctatcaatcagctggagaacctgcccgatgagctccgaagcctgatccccctcttcactgactccatcatgcgtttgggtacgaaggacatgacaatggagcagcttgaggatttgatcaagctcaaaactggaggtgtctcggtcggctaccattcggcttctcatccaactgacttcactcgggccacagaaggtctgatgttctcgggcatggcattggatcgtcatgtgccaacgatgtttgaccttttgcgcaagctggtcgtagagactgacttcgacagtcctcaagcagctcaacagatccgtcagctgttgcaagcatctgctgatggcgtcgtgaacgacattgcttcatcgggacacgcttacgctcggagagccgccgaatctggccttacgtgggattccttcctcaaggagcaggttagcggtctctcgcaggtaaagctggtgactagcttggcaagccggcccgagtcagacccgttggaggatgttattgcaaagctgaagcaaatccaacagttcgcactggctggcaatctccgtaccgccatcacctgcgacagcggaagtgtctctgacaacgcaaaggcgctcttaaattttgtcaactcgctgccttcggaagcggtgaccttcccaagccggggaccccctaactttacccgtgatatcaagacgttttatcccttgccttatcaggtttactatggtgctttagcccttcctacggcttcttacacggcttccgtgaatgcccctctccagattctctcgcagctcttgacccacaagcacttgcatcacgagattcgtgagaagggtggcgcctacggcggcggatcttacgcccgccccctcgacggtatcttcggcttctactcgtaccgcgaccctaatcctgtgaacacgctcaaaatcatgcggaacgctggccagtgggcggttgacaaggagtggactgatcgtgatcttgaggatgccaagatctctgtcttccaaggcgttgacgcacccaaggctgttaatgaagaaggcatggcccaattcctctacggcattaccgacgagatgaaacagaagcgccgcgaagagctcttggatgtcaccaaggatcaggtccgggaagtggcgcaggagtatgttgtcaaggcccttaacaacggctctgagcgtgtcgtcttccttggcgagaagcgcgactgggtcgacaagtcttgggcggtcaaagagatggacatcaacggttccacttag

SEQ ID NO: 34142 - protein, 1012 aa, Neurospora crassa
MLRNATKGAARRAVTELSQYPKPGEKLHGFTLLRSKHVPELELTALHLQHDKTGAEHLHIARDDSNNVFSIGFKTNPPDDTGVPHILEHTTLCGSQKYPIRDPFFKMLPRTLSNFMNAFTASDHTFYPFATTNAQDFKNLMSVYLDATLHPLLKETDFTQEGWRIGPENPQALVAAEGNAKPEDRKLVFKGVVYNEMKGQMSDAAYLFWIRFQDHIFPDIHNSGGDPQKITDLTYQQLKKFHADHYHPSNAKVFTYGDMPLADHLKEIGAQLDVFEKIRADVAHHSPIDLSSGPREVKLYGPIDPLVDANKQFKTSVSWVLGETNNVVESFSLALISALLMDGYGSPLYKGLIESGLGTDWSPNTGYDSSGKLGIFSIGLSGVQEEDVPKVKAKVQEILRSMRDKGFERSKIDGYLHQLELGLKHKTANFGMSLLHRLKPKWFVGVDPFDSLAWNDTIAAFETELAKGGYLEGLIDKYLINDNTLSFTMAPSPTFSQELAQEEETRLSTKISEVVKAAGSEEEARAALEARELKLLAEQSKTNTEDLGCLPSVHVKDIPRQKDSVILRHDNTARVKTQWHEAPTNGLTYFRAINQLENLPDELRSLIPLFTDSIMRLGTKDMTMEQLEDLIKLKTGGVSVGYHSASHPTDFTRATEGLMFSGMALDRHVPTMFDLLRKLVVETDFDSPQAAQQIRQLLQASADGVVNDIASSGHAYARRAAESGLTWDSFLKEQVSGLSQVKLVTSLASRPESDPLEDVIAKLKQIQQFALAGNLRTAITCDSGSVSDNAKALLNFVNSLPSEAVTFPSRGPPNFTRDIKTFYPLPYQVYYGALALPTASYTASVNAPLQILSQLLTHKHLHHEIREKGGAYGGGSYARPLDGIFGFYSYRDPNPVNTLKIMRNAGQWAVDKEWTDRDLEDAKISVFQGVDAPKAVNEEGMAQFLYGITDEMKQKRREELLDVTKDQVREVAQEYVVKALNNGSERVVFLGEKRDWVDKSWAVKEMDINGST

SEQ ID NO: 34143 - DNA, 2967 bp, Magnaporthe grisea 70-15
  CDS (1)..(2967)
atgctgcggcgcgcagcactaggcgcgaggggcgccggcaggtcttatgcaaccgtcacccagcagtttccgcagccaggcgaacgcctccatggcttcacaatgaagcgcatcaagcacgttcccgagctcaaactcacggccttggagcttcaacacgacaaaacaggtgccgaacacttgcacatcgctaggaacgacagcaataatgtcttttctattggtttcaagacaaatcccccggatgacacgggtttgcctcatatcctcgagcataccactctttgtggaagcgaaaaatatcccatacgagatccgttcttcaagatgctcccaaggacgttgtccaactttatgaacgccttcacagcgtctgaccataccttttaccccttcgcaactaccaatgccaaagactttcagaacctcatgtccgtatacatggacgccacactcaacccattattgaaaaagaccgacttttggcaagagggatggagggttggaccagaaaaccccgaggccctagctgctgcgggcgcagaagccacaccggaagacaagcgcctggtcttcaagggagtcgtatacaacgagatgaagggtcaaatgtcggatgcttcctatctgttctacatccgcttccaggaccacatctttcccgatataaacaactctggtggcgacccccaaaagatcacagacctgacttacgagcagctcaagcgcttccacgcggaccactaccacccaagcaacgccaaactcttcacatacggtgacatgccgcttgctgatcatttgcaggaaatcgatgcccagttgagcgcctttaacaaactctcgtcggaagacgtggccaagtcgtctgtatcctgggtattgggtgatacgggagacattgtggagtcgttttcactgtccctgatttcggctctacttatggacggttacggttctcccatgtacaagggtctcattgagtctggtctcggcatagcttggactcccaactctggctatgacaattcggcgaaagacggcatattctccattggtttgactggccttcaggagcaggatgtgcctaaagtcaagaccgaggtccaaagaatactccgggaggcttgtgaacaaggcttcaagaggtccaagattgatggctacttgcatcagatcgagctgggacttaagcacaagactgccaactttggaatgtctttattgcagcgggtcaagccaaagtggttcaacggtgtcgatgtgtttgacacgcttgcctggaacgaaaccattgaagcatttgagaacaaaatggccgagggaggttatctcgagggattgatggaccgctacctcctcaacgataacactttgaccttcaccatgacaccttctgccgactttggcgcagaactgggcaaggaggaagagaccaggctggcggccaaaatttctgaagtccgagaaagcttgggcggtgaagcagaggcacaaaaggcactcgaagaacgagagctccaactacttgccgaacagagcaagtcaacttccgaagacctcagctgcctccctaccgtgcgcgtatctgacatacccagacggaaagagccggcagtcgtgagacacgacgagactgacggcttcaggaccatgtggcacgaggcgccaactaatggcttgacttacttccgttccatcaacacgttcgagaacctcccacaagacttgcgcgagatgattcctttgttcacagatgcgataaatcgtcttggaaccaaggatctaacgatggaagagctggaagaccgtataaaactactcactggtggcaacctgtcagttggttaccacgccgcgtcgtctccaaacgattttacgcaggcatctgaaggccttacattcagcgggatggtcttggaccgaaatgttcaagaaatgtacgagcttctgcggctgttggttctggaaacgaactttgacagcccggatgccgtctctcacatccggcaattgttgaaggcgtctacggaggaagcgataaaccagatcgccgactcaggccattcgtacgcacgatcggctgccgaggctggtttgagtaccaagaatcattacaacgagcaagttggtggattgtcacagatcaagcttctcacatctctggccggtagaccggagtcagatcagctggaagacgttattggaaaactcaagaccattcagcgtctggcattcaacgccgacagcatgcgcacctttatcacgtgcggtagcgaaagtgtccagcagaaccagacagcgctttccaaattcataggtactctgcccaggaataacagtgtcaacttgtcgtccactggacagaccgcccaaagctttgcaagggatgtcaaggctttttacccattgccttaccaggtctactacggcgcacttgccgtccccacgtcttcgtatacctcgaaagacagcgcgccgctgctcatcctgtcgcagatgctcacgcacaggcacctgcaccacgagattcgtgagaaaggtggtgcctatggtggtggtgcatacgcacgctcgctggaaggcatcttcggcttctattcgtaccgggacccgaacccagtaaataccctcaagatcatgcgcaatgccggccgttgggccgttgacaagcagtggacagatcgtgatcttgaggaggccaagatctctgtgttcaagagcgttgacgcacccaaggacatcaacgcggagggcatgggtcagttcctttacggcgtcaccgaagagatggctcatgaacgccgggctcgtctcctcgatgtcacacgcgaacagatacaagaggtggcaaacaagtatgtcgtcgaatcgcttgacaaacaggccgagagggtcgccttcctcggtcagaaggcggactgggtcgacggttcttgggccacaaaagagatgaacgtcgactag

SEQ ID NO: 34144 - protein, 988 aa, Magnaporthe grisea 70-15
MLRRAALGARGAGRSYATVTQQFPQPGERLHGFTMKRIKHVPELKLTALELQHDKTGAEHLHIARNDSNNVFSIGFKTNPPDDTGLPHILEHTTLCGSEKYPIRDPFFKMLPRTLSNFMNAFTASDHTFYPFATTNAKDFQNLMSVYMDATLNPLLKKTDFWQEGWRVGPENPEALAAAGAEATPEDKRLVFKGVVYNEMKGQMSDASYLFYIRFQDHIFPDINNSGGDPQKITDLTYEQLKRFHADHYHPSNAKLFTYGDMPLADHLQEIDAQLSAFNKLSSEDVAKSSVSWVLGDTGDIVESFSLSLISALLMDGYGSPMYKGLIESGLGIAWTPNSGYDNSAKDGIFSIGLTGLQEQDVPKVKTEVQRILREACEQGFKRSKIDGYLHQIELGLKHKTANFGMSLLQRVKPKWFNGVDVFDTLAWNETIEAFENKMAEGGYLEGLMDRYLLNDNTLTFTMTPSADFGAELGKEEETRLAAKISEVRESLGGEAEAQKALEERELQLLAEQSKSTSEDLSCLPTVRVSDIPRRKEPAVVRHDETDGFRTMWHEAPTNGLTYFRSINTFENLPQDLREMIPLFTDAINRLGTKDLTMEELEDRIKLLTGGNLSVGYHAASSPNDFTQASEGLTFSGMVLDRNVQEMYELLRLLVLETNFDSPDAVSHIRQLLKASTEEAINQIADSGHSYARSAAEAGLSTKNHYNEQVGGLSQIKLLTSLAGRPESDQLEDVIGKLKTIQRLAFNADSMRTFITCGSESVQQNQTALSKFIGTLPRNNSVNLSSTGQTAQSFARDVKAFYPLPYQVYYGALAVPTSSYTSKDSAPLLILSQMLTHRHLHHEIREKGGAYGGGAYARSLEGIFGFYSYRDPNPVNTLKIMRNAGRWAVDKQWTDRDLEEAKISVFKSVDAPKDINAEGMGQFLYGVTEEMAHERRARLLDVTREQIQEVANKYVVESLDKQAERVAFLGQKADWVDGSWATKEMNVD

SEQ ID NO: 34145 - DNA, 3015 bp, Gibberella zeae PH-1
  CDS (1)..(3015)
atgcttcgcaacgccgctgctggcgctcgcaaggccgtgacggagctgtcacaattcccaaaacctggcgagaagctccacggtttcacccttgttcgatccaagcacgtcccggagctcgagttgacggctctacaccttcaacacgacaagaccggcgccgactatctccatatcgctcgtgatgacagcaacaatgtcttctcaatcggtttcaagacgaaccctccggatgataccggtattcctcatatcctcgagcacaccacgctgtgcggtagcgaaaaataccccattagagatccctttttcaagatgttgccacgaacgctatcgaacttcatgaacgccttcacagcctcggatcacaccttctaccccttcgcaacaaccaacgcgcaagatttcaagaacctcatgtctgtgtatctggactcaacgttgcatccgctgctcaaaaagtccgactttacccaggagggctggagaattgggccggagaacccccttgctgaggacgaggcgagcaagaagcttgtgttcaagggtgttgtgtacaacgagatgaagggccaaatgtcggacgctggctacctatactatatccgatttcacgatcatattttccccgatatcaacaactctggtggcgatccccagaagatcaccgacctcacatacgagcaactgcaaaagttccatgcggaacactaccaccctagcaacgccaaggtcttcacctatggtgatatgcccctgatcgaccacctcaagcaggttgacacgcagctccaagctttcgagaagattcaaggcgataagcaggttcatgagccagttactctcaatggccccaaggaagtgaccctctacggtcccctcgacccccttgttgatcaagatcgccagtacaagacgtccgtctcatggattatgggcgataccactgatgttctcgaatcattttctctggctcttctttccactcttttgatggatggttacggttcccccctataccgtggtcttatcgaggctggtatgggagctgattggagccctaacgccggctatgacagttctgccaagaagggcatcttctccattggcttgactggtgtccaggagggtgatgtgcccaagctcaaggagaaagttcagcaaatcttgcgagatgcgcgcaacaagggtttcgacaagaccaagattgacggctccctgcaccaattggagctgtcgctgaagcataagactgccaactttggtttctctatgctgaaccgtcttaagccaaagtggttcaacggtgtcgaccctttcgactcattggcatggaatgacaccatcaatggcttccaggccaagatggccgagggcaactacttggagggtcttattgacaagtacctcctcaacgataatactctgactttcactatggccccttcaacaacttatggtgaggacttggtaaaggaggagcaggagaggctttcaactagaatccaggcggcgatcaaggaggctggaagcgaggagaaggcgcgaaagcacttcgagaagcaagagcaagaattgttggtcgagcaaaacaagacaaacaccgaagatcttggttgcttgccaactgtccatgtcaaggatattccccgaagcaaagaggctgttgttgttcgagacgagaacgccaacggaacaaagatccaatggcacgaggcacccaccaacggcttgacatacttccgtgctatcaacacgctggagaacttgccagatgagcttcgtgagttggttcctctgttcactgacagcatcatgcgcctcggtaccaaggacttgaacatggaacagcttgaggatttgatcaagcttaagactggcggcgtttcggttggataccactgcacaccatctcccacagatttccatgctgccagtgagggcatcatctttactggtatggcattggaccacaacgttcctgttatgtttgacatcatccagaaactcgttttgggaaccgacttcgatagtcctgaagctgcccttagaattcgccagcttctccaggcttctgctgacggtgttgttaatgacattgcatcaaccggacacagatttgccatgggaagcgcagagtctggtctcacccgatctgcgtggttgcgacagcaagtgtctggtctttcacaagtgcagctggtgacttcgctggccagccgccctgagactgataagcttgaggacgtcatctctaagctaaagcagattcagaaccttgcacttgtcggtggaaatctccgcaccgcgatcacttgtggctcggagagcgttgcggcaaacggggcttcgctgcagaactttgtgggcaacctttctcgtgaccccttgaacttgaagaacccttcgccccgacagcttcccaaggatagcaagaccttctaccctctaccttaccaagtctactatggtggattatcactaccgaccacctcatacacatcggcagagggtgcacctcttcaaattctgtcccagctcctcacacacaagcatcttcatcatgagatccgtgagaagggtggcgcatacggtggcggtgcttactctcgagccttggacggcctcttcggcttctactcttaccgggatcccaacccccagaacaccctcagcatcatgcgaaatgctggccaatgggctgtcgataagaagtggtcagaccgcgatttggaggaggccaagatctctgtgttccaaggagtcgatgcgcccaagtctgtgaaccaggagggcatgggccgtttcctctcgggcatcaccgaagagatgaagcagaagaagcgagagcagtttctggatgttaccaaggatcaggttcgcgaggctgcgcagcgttaccttgttgacggactggccaagggtgaaggccgagtggctttccttggagagaagcaggcgtgggttgacggcgagtggcagatccgcgagatggatgtcaagggcgctgagtaa

SEQ ID NO: 34146 - protein, 1004 aa, Gibberella zeae PH-1
MLRNAAAGARKAVTELSQFPKPGEKLHGFTLVRSKHVPELELTALHLQHDKTGADYLHIARDDSNNVFSIGFKTNPPDDTGIPHILEHTTLCGSEKYPIRDPFFKMLPRTLSNFMNAFTASDHTFYPFATTNAQDFKNLMSVYLDSTLHPLLKKSDFTQEGWRIGPENPLAEDEASKKLVFKGVVYNEMKGQMSDAGYLYYIRFHDHIFPDINNSGGDPQKITDLTYEQLQKFHAEHYHPSNAKVFTYGDMPLIDHLKQVDTQLQAFEKIQGDKQVHEPVTLNGPKEVTLYGPLDPLVDQDRQYKTSVSWIMGDTTDVLESFSLALLSTLLMDGYGSPLYRGLIEAGMGADWSPNAGYDSSAKKGIFSIGLTGVQEGDVPKLKEKVQQILRDARNKGFDKTKIDGSLHQLELSLKHKTANFGFSMLNRLKPKWFNGVDPFDSLAWNDTINGFQAKMAEGNYLEGLIDKYLLNDNTLTFTMAPSTTYGEDLVKEEQERLSTRIQAAIKEAGSEEKARKHFEKQEQELLVEQNKTNTEDLGCLPTVHVKDIPRSKEAVVVRDENANGTKIQWHEAPTNGLTYFRAINTLENLPDELRELVPLFTDSIMRLGTKDLNMEQLEDLIKLKTGGVSVGYHCTPSPTDFHAASEGIIFTGMALDHNVPVMFDIIQKLVLGTDFDSPEAALRIRQLLQASADGVVNDIASTGHRFAMGSAESGLTRSAWLRQQVSGLSQVQLVTSLASRPETDKLEDVISKLKQIQNLALVGGNLRTAITCGSESVAANGASLQNFVGNLSRDPLNLKNPSPRQLPKDSKTFYPLPYQVYYGGLSLPTTSYTSAEGAPLQILSQLLTHKHLHHEIREKGGAYGGGAYSRALDGLFGFYSYRDPNPQNTLSIMRNAGQWAVDKKWSDRDLEEAKISVFQGVDAPKSVNQEGMGRFLSGITEEMKQKKREQFLDVTKDQVREAAQRYLVDGLAKGEGRVAFLGEKQAWVDGEWQIREMDVKGAE

SEQ ID NO: 34147 - DNA, 2973 bp, Candida glabrata CBS138
  CDS (1)..(2973)
atgttacggtttcagagatttgcgtcgacgtataatcagcgtgcggtgttgcgtaagtaccctgtcggagggattatacatgggtttcaagttcggagagcggtaccagtacctgagttgaaacttactgcggtggatttgatacatgaacagactggtgctgagcatctacatatcgacagagatgataagaacaatgtgttcagcattgcgttcaggactttgccacctgatgctacaggtgtcccgcatatattggagcatactacgctatgtggttccgagaagtatccagtgcgtgatcctttctttaagatgctaaataagtcgctagcaaactttatgaatgccatgactgggcctgactatacattctttcccttcgctactaccaacgcacgtgactttgtgaacttaagagatgtataccttaactcgacgcttagaccgcttttgaaggagcaggatttctaccaagaaggttggagacttgagcattcggaagtcaccaatccaaaaagtgatataatcttcaaaggtgtggttttcaatgagatgaagggtcaagtatctaatgctgattatcatttctggtcacagttccaacaaaatatctacccatcgctaaataactctggaggcgatccccaaaagattacagatcttcactatcaggacttagttgactttcatcacgcaaattatcacccttcaaatgcacgtacttttacttatggttcgttccctcttgaagacactttgaaaaaggtaaacgaagaattcagggcatatggcaaacgaattattaataagaagcttcctaaacctttggaattaattgagacaaaggagttaacgcttgaaggacagatagacccaatgttaccagccgaaaagcagacgaagacatccttaacctggaaatgtggtgagcctactgatctttacgagacatttctactgaaaatattaggtaatctattactggatggacatgattccataatgtataagggattgattgaatctggactaggacatgactttagtgttaacactggtgtcgaatcaatgactgctgcaaacttcctaactgttggtattcaaggctctcagaatgtagaagagtttaagtctaaagtttttgatctgtttaaagaatttattgaaaatgatgttgactcgaataaagttgatgctattatacatcaattggaattatcaaagaaagaccaaaaagcagatttcgggcttcaaattttatactcaattcttcccggatggaccaacggtatcgacccaattgaaggacttgaattcgatgaattgatagggagactcaaatcagatttcaaagagaatggaacgaagatcttcaaaaacatattagataagtacataatagaccaaccatatttccatttcacgatgaaaggttcggaagagttcagttctaagttagcagcggaagaatccaccaaattggacaaaaagttgaaagagctagacgagaccgaccggaaagctatttttgagcgtggattattgctagaggcagctcaaaatcacaaggaggatctgtcttgccttccaactttaggtgttgcagatatatcaagaaaggtagatacttatgacttgaacacaaatgctaacatcacggtcagaaatacggcaaccaatggaataagttatattagaggcaagaagttaatcaatgatatgattccattggaattatacccgtttttaagcttgtttgcagcctcgttgacccatctgggcaccaaaacaacaccatatggtgcaattgacaacgaaataaaactacacactggcggtatatcaacaaatatttctgttaatgctgatcctaccacattgcagcctaatctgtactttgatatgagcgggttttctctgaacgaaaaatcggactacatattcaattttttaaaaacaattttaatggaaactgactttagcactcacaaggataagctaaaagtgttgataaattctattgcatcttcgaatacatcgcatatagctgattctggtcacactgttgctagatcgtttgccagtggtcatttgagtacggttgctgcaattcaagagcatatctcaggtgtcgaacattacaaactgatttctagactatgttccattatgaatgacgataaattatttcaatcagaggttatagataaactagtgatgctacaaagaataatagttaattctcagaatatggaattttttgcgtctgttgactgtcaagcacaagagaataaaatcagaaaagaggttgactattttgtaagcactttacctaatacaagctccgatatctcaggggctattcagactgcgtgtgtgcctagatattcagactcccaagttttaaacttgataaaatttcctttccaagtccattacacagctcaagcatataatggggtttcatacacccataaagatggtgctgcactacaagttcttgctaatatgctgacatttaagcacttgcataaagaaattagagaaaaaggtggtgcatatggtggtggagccactttcagtgccttgtctggtatttttagttattattcttatagagatccaaacccgttggcaagtatccaaacatttgaaaaatctgcctcatatgtcttaaatgatgcaaagtggacacagtctgacttagatgagtcaaaactttctattttccaacaagtcgacgctcctattagtcctaagagcgagggatccacattcttcaacttaggagttactgatgaaatgagacaagtaagacgggagcagctgttggacacttcgttgctggatattcatagagttgcagagaggtatattctaccgaacaaatctatcgctacagtcgtcggaccaggtattgatggggagactgtatctccaaaatggcatatcgaagatataaaggtatga

SEQ ID NO: 34148 - protein, 990 aa, Candida glabrata CBS138
MLRFQRFASTYNQRAVLRKYPVGGIIHGFQVRRAVPVPELKLTAVDLIHEQTGAEHLHIDRDDKNNVFSIAFRTLPPDATGVPHILEHTTLCGSEKYPVRDPFFKMLNKSLANFMNAMTGPDYTFFPFATTNARDFVNLRDVYLNSTLRPLLKEQDFYQEGWRLEHSEVTNPKSDIIFKGVVFNEMKGQVSNADYHFWSQFQQNIYPSLNNSGGDPQKITDLHYQDLVDFHHANYHPSNARTFTYGSFPLEDTLKKVNEEFRAYGKRIINKKLPKPLELIETKELTLEGQIDPMLPAEKQTKTSLTWKCGEPTDLYETFLLKILGNLLLDGHDSIMYKGLIESGLGHDFSVNTGVESMTAANFLTVGIQGSQNVEEFKSKVFDLFKEFIENDVDSNKVDAIIHQLELSKKDQKADFGLQILYSILPGWTNGIDPIEGLEFDELIGRLKSDFKENGTKIFKNILDKYIIDQPYFHFTMKGSEEFSSKLAAEESTKLDKKLKELDETDRKAIFERGLLLEAAQNHKEDLSCLPTLGVADISRKVDTYDLNTNANITVRNTATNGISYIRGKKLINDMIPLELYPFLSLFAASLTHLGTKTTPYGAIDNEIKLHTGGISTNISVNADPTTLQPNLYFDMSGFSLNEKSDYIFNFLKTILMETDFSTHKDKLKVLINSIASSNTSHIADSGHTVARSFASGHLSTVAAIQEHISGVEHYKLISRLCSIMNDDKLFQSEVIDKLVMLQRIIVNSQNMEFFASVDCQAQENKIRKEVDYFVSTLPNTSSDISGAIQTACVPRYSDSQVLNLIKFPFQVHYTAQAYNGVSYTHKDGAALQVLANMLTFKHLHKEIREKGGAYGGGATFSALSGIFSYYSYRDPNPLASIQTFEKSASYVLNDAKWTQSDLDESKLSIFQQVDAPISPKSEGSTFFNLGVTDEMRQVRREQLLDTSLLDIHRVAERYILPNKSIATVVGPGIDGETVSPKWHIEDIKV

SEQ ID NO: 34149 - DNA, 2949 bp, Kluyveromyces lactis NRRL Y-1140
  CDS (1)..(2949)
atgtttcaaattcgtaactatgccacaaaatatgcacagtctcgggcgctgaggaagtacccagtaggtggcgtttttcacggatatgaagtgaaacgattacttcctgtccctgaactaaagctaacagccgtggatttattgcataaccaaaccggttcacaacatttacatattgatagagatgataacaacaacgtgttcagtatcggattcaaaaccaatcccccggattcaactggtgtgccacatattttggaacacacaactctttgcggttctcataagtatcctgttcgcgatccgttcttcaagatgttaaacagatcgttggcaaacttcatgaacgctatgactggtcatgactatactttttacccgtttgctaccactaatgagacggattttgctaatctaagagacgtttaccttgatgcaactctaaatccattgttgaatcagcaagatttcctacaagaaggttggaggcttgaacacactaaggttgatgatccaaacagcgatataggtttcaaaggtgttgtatacaatgaaatgaagggtcaagtatccaatgctaactattatttctggattaagtttcaagaaagctattatccatccttgaataactctggtggtgacccaactaaaatgactgatcttcaatatgaagatttaatcagtttccacagaaataattaccatccttctaatgctaagacgtttacatacgggaacttcgatttgaacaataccttacagaggttgaataaagaatatcaaggttatggtagaaggggttctaagaagagggaactattaccaatccaaatgaaagaagatgtttctgtagaaaccgaaggacaggttgatcctatgttaccaccggataaacagatcaagacctctgtgacttggatttgtggtaaacctgaagacacgtaccaaacatttctattgaagatcttgggtaatttattattagacggacattcctctcctttctatcaaaaactaattgaaagtgggctggcgtacgacttttcagttaacactggtgtagagtcgcagactgctgcaaactttatcactattggtgttcaaggatgtgatgaagtggattcgatatatgaagttattaacaaagtatgggaagaagtattacagaatccgtttgaggagtctaggatccaagcaatcattcaacaattagagttatctaagaaagaccaaagggcagatttcggtttacaattactgtactcggttttaccaggatgggttaacaagactgatccatttgattctttattgttcgatgagacactagaaagattccaagaagattgggccactaagggtgataatttattcaaagacttaatcaaagaattcgtgatttcaaaacctgtattcaaattcaccatgaagggctcagaaacgttctctcagaaacttgatgctgaggaacaagaacgtttggagagaaagttaaagctccttgacgaagaagacaaaaaggtcattttcgaacgtggtaaacaattgcaagaactacaggacctcaaagaggatttgagttgccttccttcattgcaaattagtgcaattccaagagtttcaaagacatacccattgttagagaaggataatgttttaaatcgtattaccgataccaatggtattacatacgtcagaggtaagcgtttactaaaccaccatattccaagagaactttatcctttcctaccattatacgcagactcattgacgaaccttggtacttcaactgaagagttttccaccattgaagaacaaatcaaattgcacactggcggtgtctcaactcgcgtatctgtaaatccagatgcacagactggtaagcctatgctgctattccaagttgatggatgggctttgaacagcaaaaccgatcacatcttcaagttttggaagaaacttttatgtgaaactgatttccataagcacaaagaaaagctaaaggtcttaataagatcattagcatcttcaaacacagcgtctgtggctgagactggtcatgcttttgcccggaacttcggtgctgctcatttaagtgtaactaaagccatcaacgaaagtttaaacggtatcgaacagttacagttaatcaataagttatctcaatgtttggatgatgaagcactatttgagaaagaagtggtttcaaaattggttgagcttcaatcatatataaatggcagttcagacatgaaattcatgatcaccagtgattctcaagttcaaatcgatgcagttcaccaacaaatcacgggctttttgagctccttacccaaggattcaaaaccatgtgacttctactctgagaattactcaatgttggaaaacccaggtaaaccaaccctactccagttcccatttcaggttcattacaccgccaagtgttacccaggcgtttcctatacccatcctgatggcgctaagctacaaatcctttctaacatgttgacacacaaatatttgcaccgtgaaattcgtgaaaaaggtggcgcatatggtggtggtgctacttacagcgctttggatggtactttcagtttctattcttacagggatcctcacgctttaaattctttgtccacattcgatagcgttccagaattcatattgaacaagtcttcgtggggtgaaccagacttgaatgaagcgaaattgagtgtcttccaacaagtagactccccaatgagcgccaaaaacgaaggtaccattttattccattacgacgtaacagacgaaatgaaacaacgtcgtagagagcaacttttagacgtcaacttgaatgatatacatcaagtggcagaggaatacctcaagcaagataaatccattgcctccatagttggtccggaaatcccaaattttgatgccttagttcaaaccgtgtaa

SEQ ID NO: 34150 - protein, 982 aa, Kluyveromyces lactis NRRL Y-1140
MFQIRNYATKYAQSRALRKYPVGGVFHGYEVKRLLPVPELKLTAVDLLHNQTGSQHLHIDRDDNNNVFSIGFKTNPPDSTGVPHILEHTTLCGSHKYPVRDPFFKMLNRSLANFMNAMTGHDYTFYPFATTNETDFANLRDVYLDATLNPLLNQQDFLQEGWRLEHTKVDDPNSDIGFKGVVYNEMKGQVSNANYYFWIKFQESYYPSLNNSGGDPTKMTDLQYEDLISFHRNNYHPSNAKTFTYGNFDLNNTLQRLNKEYQGYGRRGSKKRELLPIQMKEDVSVETEGQVDPMLPPDKQIKTSVTWICGKPEDTYQTFLLKILGNLLLDGHSSPFYQKLIESGLAYDFSVNTGVESQTAANFITIGVQGCDEVDSIYEVINKVWEEVLQNPFEESRIQAIIQQLELSKKDQRADFGLQLLYSVLPGWVNKTDPFDSLLFDETLERFQEDWATKGDNLFKDLIKEFVISKPVFKFTMKGSETFSQKLDAEEQERLERKLKLLDEEDKKVIFERGKQLQELQDLKEDLSCLPSLQISAIPRVSKTYPLLEKDNVLNRITDTNGITYVRGKRLLNHHIPRELYPFLPLYADSLTNLGTSTEEFSTIEEQIKLHTGGVSTRVSVNPDAQTGKPMLLFQVDGWALNSKTDHIFKFWKKLLCETDFHKHKEKLKVLIRSLASSNTASVAETGHAFARNFGAAHLSVTKAINESLNGIEQLQLINKLSQCLDDEALFEKEVVSKLVELQSYINGSSDMKFMITSDSQVQIDAVHQQITGFLSSLPKDSKPCDFYSENYSMLENPGKPTLLQFPFQVHYTAKCYPGVSYTHPDGAKLQILSNMLTHKYLHREIREKGGAYGGGATYSALDGTFSFYSYRDPHALNSLSTFDSVPEFILNKSSWGEPDLNEAKLSVFQQVDSPMSAKNEGTILFHYDVTDEMKQRRREQLLDVNLNDIHQVAEEYLKQDKSIASIVGPEIPNFDALVQTV

SEQ ID NO: 34151 - DNA, 3192 bp, Debaryomyces hansenii CBS767
  CDS (1)..(3192)
atgttaaggttggctaatagagtttccagaaaggacagtgggaacttggggatagcccaattgaagaagagactcttggccacttcaggtgtgtcacaaggtgagattttgagtaaatatcctatcggtcttaatatgcatgggtatgtgattgaacaagttcaacctataccagaattttcacttgtagcagtcaaattgaaacattctagaactggatcagaacacttacatttggatacacctaatgataaaaataatgtattcctggtagcgtttaagacgaatgctcctgacgccactggggttcctcacatattggaacatacaacgctttgtgggtcattcaaataccctgttagagacccgtttttcaagatgcttaatagatcgttgagtaattttatgaatgctatgacgggacatgattacacatattatccgtttgctactactaatgcgaaggactttgaaaacttgatggatgtatatttatcgtcagttttcgagccgctccttactcatgagagttttatgcaagaaggatggagattagagaattcagatctttccgatcctaaaagtcctataatctttaaaggggttgtttataatgagatgaaaggtcaatattctaactcggcatattattattggatcaaattccaagaagccatatacgggtcgttaaataattctgggggaaatccaaatgaaattactgatttaaggtatgaagatttagttgatttccactcttcaaattaccatccatccaatgcaaaaacctttacttacggtaatattgaattggttaatcatttgaacaaactaaatgagttttttgaatcttttggtagccgtggaataaggacaaatgttagaaaaccaataactgaacttaatccaaattatgaatcagacgtcactgttaagggtccccttgatacgatgtcaagtaggccaatcgaagaacaatacaaatcttcgattacttgggtgattgggaacccattagatgaatccaaattgtatgacgtatttaagtggaaagttttgagttctttgttatgtgatggtcataactcgccgttctatcaggaattaattgaaaaagaatatggagaggacttcgctgtcaattatggtttagatgctaccacagctttattatcttttacaattggcttaaataacttatctttagaaaaagctaaaaatttagaggataaagtacgtggaattttcgttgagaagatcatccctgaacttcaaaaggggaaagaaagtggcttcaacgatagaattgaagcaattttacatcaaattgaattgaacttcaaaaatcataaaccagaatttggtataggtctattaagttcagtcgtttctacttgggttaatggattaaatcctgttaagtcactacaaattgaccatattttaaacaggttcaaagaagactataaactcaatggcttaaagatgtttcaagatttgcttgatgaatcagttttaaaggatgatactccaaagtttaagttcacaatggaacccgatgaaagttttggaaaaaacttgacatctcaagaaactgaaagattgaataagaaaattgaggccttaaccgaagaagataaagagataatctacaaaagaagcatagagttggctgagaagcagaagaaagaggaagatgtatcagccttaccgactttgacggttaaagacattccacgagaaggcgatttttatcctcttgattttgcagacataaattctaaaaaacttcaaaaaagaattgttgatacgaacgggttaatttacatgaacgctactaaggatatttcatatttaccttctaaatactatgaatacttaccattattcgactgttgtcttactaatttagccggtacaagtaagacaccaataactgaattggagataaaaatccaaaagttgacaggtggtgttacattcaatgtttcggctaagactgatccatttgatatctccaagactaatatgaaatttatgttatcgggtatggctttgaaagacaaatctcagaacgtgtatgacttatggtttgaaattttaactcaaacgaaattcgattccgaggatgagcaagttgttgataaattattcactttggttaaaaacttaggacaaaatcaaatgaatacaatcgccgattcaggtcattcttatgcaaattcttacagtaattctcaacttacacctacaaagtatattcataatttaattggtggaataggccaagtttcgtttattctggatttgaatagaaaattagaaacagaaggcagagactttttaaagaaagagcttttgccagtgttaaaggatattcaacgccatttggttaatggtttcactgatggaaatcattcaggattcgaatacagcttagttggtgatagtgaatctgttattaaaaatgaaaaaatgattaaagaatttgacgatttattgacagcaaattctaatcgagtagctggcaccaatgaattatcttccttgatttctcaattcaatagcaacaaattgggtttaaataacaatggtcgtagtacgttgatcgacttgcctttccaagtcggatatgcttcgttagctaagttaggagctgcatatactagtaaagatggagctgcattgcgtgttttatcacaattattaaccttcaaacacttacattctgttattagagaagcaaatggggcatatggtggaggattactgtttgatggtttaggtggatgtttgaatttctactcatatagagaccctaatccacttacatcagttcagtcttttaaggattcgacttcagttgcattaggtaaaatgataaattctgagaataatggttggagtccaaaagatttgcaagaagcaaaattaaccatattccaaggcgtggatgcacctagccatatttctctgcagggatccttagatttccttgagcatatcacggacgagatgaggcaagaaagaagagaacggtttttggatgttacttatgaagacttgaagaatgttactgagaagtacttgttaaatggttcacaggatattgttacggtgattggagataatgaaactctcaaaattgattctagcgatgctcagtggaacattaagaaattaactgcctaa

SEQ ID NO: 34152 - protein, 1063 aa, Debaryomyces hansenii CBS767
MLRLANRVSRKDSGNLGIAQLKKRLLATSGVSQGEILSKYPIGLNMHGYVIEQVQPIPEFSLVAVKLKHSRTGSEHLHLDTPNDKNNVFLVAFKTNAPDATGVPHILEHTTLCGSFKYPVRDPFFKMLNRSLSNFMNAMTGHDYTYYPFATTNAKDFENLMDVYLSSVFEPLLTHESFMQEGWRLENSDLSDPKSPIIFKGVVYNEMKGQYSNSAYYYWIKFQEAIYGSLNNSGGNPNEITDLRYEDLVDFHSSNYHPSNAKTFTYGNIELVNHLNKLNEFFESFGSRGIRTNVRKPITELNPNYESDVTVKGPLDTMSSRPIEEQYKSSITWVIGNPLDESKLYDVFKWKVLSSLLCDGHNSPFYQELIEKEYGEDFAVNYGLDATTALLSFTIGLNNLSLEKAKNLEDKVRGIFVEKIIPELQKGKESGFNDRIEAILHQIELNFKNHKPEFGIGLLSSVVSTWVNGLNPVKSLQIDHILNRFKEDYKLNGLKMFQDLLDESVLKDDTPKFKFTMEPDESFGKNLTSQETERLNKKIEALTEEDKEIIYKRSIELAEKQKKEEDVSALPTLTVKDIPREGDFYPLDFADINSKKLQKRIVDTNGLIYMNATKDISYLPSKYYEYLPLFDCCLTNLAGTSKTPITELEIKIQKLTGGVTFNVSAKTDPFDISKTNMKFMLSGMALKDKSQNVYDLWFEILTQTKFDSEDEQVVDKLFTLVKNLGQNQMNTIADSGHSYANSYSNSQLTPTKYIHNLIGGIGQVSFILDLNRKLETEGRDFLKKELLPVLKDIQRHLVNGFTDGNHSGFEYSLVGDSESVIKNEKMIKEFDDLLTANSNRVAGTNELSSLISQFNSNKLGLNNNGRSTLIDLPFQVGYASLAKLGAAYTSKDGAALRVLSQLLTFKHLHSVIREANGAYGGGLLFDGLGGCLNFYSYRDPNPLTSVQSFKDSTSVALGKMINSENNGWSPKDLQEAKLTIFQGVDAPSHISLQGSLDFLEHITDEMRQERRERFLDVTYEDLKNVTEKYLLNGSQDIVTVIGDNETLKIDSSDAQWNIKKLTA

SEQ ID NO: 34153 - DNA, 2973 bp, Yarrowia lipolytica CLIB99
  CDS (1)..(2973)
atgttacgtctaaagtcgctcaaaaaaccggtccaggccgtggttcgacgtttcgccaccacctccgcacccactctctctgtcggcgacaatatccatggcttcaatgttctcagaaccaaagagatccccgagtttgatctgcaggctaccctgctagagcactccactggagcccagcatctgcacattgctcgagatgactccaacaacgtcttttccatcggcttcaagactaatcctcccgatcgaaccggagttccccatattctggagcatacaacgttgtgtggatcggaaaagtaccaagtccgagatcccttcttcaagatgcttaaccgatctcttgccaacttcatgaacgcgatgaccgcccaggactacaccttttacccctttgctaccaccaacgctaccgacatgaagaatctgcgagatgtgtacctcgatgctaccctgaagcctctgcttcgagagctggacttttctcaggaaggctggagactggaaaacgaggactccaaggacaagaccagtcccatcatcctcaagggtgtcgttttcaacgagatgaaaggtcaaatgtccaatgctgcttacgctttctacattcggtacctggagaagatctaccccagtttgaacaactctggaggagaccctcttgttattcccgaactcacctacgagggtctcaagaagtttcatgctgatcactacaaccccagcaacgccaagacgttttcttatggagatatctctgttgctgaccatttggaggctctgaacgccaaatttgagaattgtgagatctccaaaactcccggaaacaccgagagattgcctctcgaattttcttctgccgctgagaacacccgtatcgttgaagagggtcctattgacactcttctggatacgtctaagcagcacaagatgtccatgtcgtggttgatgggttctcccaaggacatttacgagtctttctgcgtcaagatcatctcttctctactcattgacggtcattcttccccccttcatcagaagctgattgattccggtcttggatcttcctactctcccaacactggccttgacagtgctcctggagctaacattttctctgttggtcttcagggagtgaccgagagcgatcttacaaaggtcgagactgttattctcgacaccatcaagactaccgttgctgagggcttcgacaagggccgaatcgacggtcttttgcatcagactgagcttgctcgaaaggaccagaacgccaagttcggtatggctcttatgaacggtgttcttcctggctggtttaaccaggtcgaccccctggaggctctggagtggaattctgtgctcgatcggttcaacaaagacatggaggccgaccctgagttcctgcagaaggtgatgaagaagtacttgctcgacaacaagtacttccactttcagatgaaccccaatcccgactatgagaagaatgtgcaggaaaaggaggacgagattctgaccgacaagctggccaaactgactgaatctgataaggaggaaatcttcgagaccggggccaacctggaaaagatgcaggaagagcctgagaaccttgactgtctgcccactcttcacgtctcagacatccccagaagcaagcctcgagttgccttggagcataccaagaatccctatcccatccagtggcgacttgcccccaccaacggtctgacttacttccactccatctcttctctagagggtcttccccacgagtactaccccttccttcctctgttcacctcgtccctaacctttttgggaaccaaggacaagactatgggccaactggaagacgaaatcaaactcaacactggtggtcttgatttctctgtctcctgctcttcttctcctctttctctgccgtcgtcccagctcaactttgctatggatggtgtggctttggacaaaaatgtggagaccatgtttggcctgtttcaggagctgcttcgaaacactgatttcaccaacgttgagaagcttaagaccatgattgcagcctccaccgctaacctgtccaacgcgttggctcagtctggacactcgttcgccatgcttcgagctgcttccgatatttcccctgtcaagaagattgacgacattctggggggtgtggcccaggtgcgcttcctgtctgagctggctgccaagtccgagcagcagcttgtcgacgaggtcatccccaagctccaggagattgccaagtttgctctgacccgtgagcagcgatttgccgtcacttgtggccaggacatgcagaccaagaacgacgagttggtgcgaaagttcgctgagtccttcgagaccaatgagtcgcccttcaatatctcgtcgttgtctatccccatgaccactcccacaagcaccttgttcaagttaccgttccaggtcaactacgctggtattgccatccccggagtgccctacactcatgctgacggagctcccctgcaggtactcgccaacatgctgacccacaagcatctgcatcgagaaatccgagaaaagggaggcgcttacggtggaggagcctcttataaccccactgacggcttcttctcatattattcataccgagaccccaacttggaacgaaccctgcagacctgccaggaggctggagagtggtctgtcaagaaggactggagctcttccgatctgcaggaggccaagctgtcccttttccagcgaatcgatgcccccatctccgtcaagtcagagggaatggctctctatgccaacggacttacctacgagcagcgagagaagcgacgacggcagctgcttgatgtggctgttgatgacgtcaagcgggttgccaagcagtatctcgtcaacccctccgggtactcagtggccgctctcggccccggatacgaaaccatggacaaaaagaagtggactgtgctggagtag

SEQ ID NO: 34154 - protein, 990 aa, Yarrowia lipolytica CLIB99
MLRLKSLKKPVQAVVRRFATTSAPTLSVGDNIHGFNVLRTKEIPEFDLQATLLEHSTGAQHLHIARDDSNNVFSIGFKTNPPDRTGVPHILEHTTLCGSEKYQVRDPFFKMLNRSLANFMNAMTAQDYTFYPFATTNATDMKNLRDVYLDATLKPLLRELDFSQEGWRLENEDSKDKTSPIILKGVVFNEMKGQMSNAAYAFYIRYLEKIYPSLNNSGGDPLVIPELTYEGLKKFHADHYNPSNAKTFSYGDISVADHLEALNAKFENCEISKTPGNTERLPLEFSSAAENTRIVEEGPIDTLLDTSKQHKMSMSWLMGSPKDIYESFCVKIISSLLIDGHSSPLHQKLIDSGLGSSYSPNTGLDSAPGANIFSVGLQGVTESDLTKVETVILDTIKTTVAEGFDKGRIDGLLHQTELARKDQNAKFGMALMNGVLPGWFNQVDPLEALEWNSVLDRFNKDMEADPEFLQKVMKKYLLDNKYFHFQMNPNPDYEKNVQEKEDEILTDKLAKLTESDKEEIFETGANLEKMQEEPENLDCLPTLHVSDIPRSKPRVALEHTKNPYPIQWRLAPTNGLTYFHSISSLEGLPHEYYPFLPLFTSSLTFLGTKDKTMGQLEDEIKLNTGGLDFSVSCSSSPLSLPSSQLNFAMDGVALDKNVETMFGLFQELLRNTDFTNVEKLKTMIAASTANLSNALAQSGHSFAMLRAASDISPVKKIDDILGGVAQVRFLSELAAKSEQQLVDEVIPKLQEIAKFALTREQRFAVTCGQDMQTKNDELVRKFAESFETNESPFNISSLSIPMTTPTSTLFKLPFQVNYAGIAIPGVPYTHADGAPLQVLANMLTHKHLHREIREKGGAYGGGASYNPTDGFFSYYSYRDPNLERTLQTCQEAGEWSVKKDWSSSDLQEAKLSLFQRIDAPISVKSEGMALYANGLTYEQREKRRRQLLDVAVDDVKRVAKQYLVNPSGYSVAALGPGYETMDKKKWTVLE

SEQ ID NO: 34155 - DNA, 3150 bp, Aspergillus nidulans FGSC A4
  CDS (1)..(3150)
atgctccggtcatacttgcacctaggcaggcatcgaacgccggcttttcgccagccactcggacgattgctaagaccaaccgcgtcgatactgcagtatgctcagtctcggacgctcgcttcagtatctagcttggagagcttgccggaggtgggagaccagctccatgggtttacagttcaggaaaagaaacaagtgccggaattgcaccttacagctatccgtttaaggcatgacaaaacccacgcggattacctgcatatcgcacgagaagacaagaacaatgttttcggcatcggtttcaagacaaaccctccggacgccacaggtgtgccccatattctggagcataccactctctgcggcagcgagaaatatcctatccgcgatccgtttttcaaaatgttaccgcggtccctctcaaatttcatgaacgcttttacttcgtccgaccacactatgtatccgtttgccacaacgaatcaacaagattttcagaacctcttgtcggtctacctagacgccactatgcatcctctgcttaaagaggaagactttaggcaggaaggatggcgtttgggacctgaggatccccgtgcaatccaaactcaggagggaaatctgaagcctgaagacattctgtttaagggtgttgtgtacaacgaaatgaagggtcagatgtcagatgcgaactacttatattggattaggttccaggaaagcatctttccggccatcaataactccggaggagacccccaacatatcacggatctgacgcacaagcaactcgtggagttttccaagaagaactacaatcccagtaatgctaagatcatcacttacggcgacatgcctttggccgatcatctgaagcaggtcggtggcgtcctaaacgacttttcgaaaggggctgtcgacacaacggtgaagttgcccattgagctccgaggccccataaatgtgactgtcccgggaccaatcgacactttcgtaagtgaagacagacaattcaaaacatccacttcttggtacatgggcgatatcacggatactgtcgagaccttttcggccggcatcctctcgtcccttttgttagatggttatgggtctcccatgtacaaagctctgattgaaagtggcttgggctcctcgttcactcctaacacgggactcgacacttctggtaaaatccctattttttcgattggagttacaggtgtgagcgaggagcaagctcctcgggtcaaagaagagattcagcgagtccttcaggaaactcttcagaggggcttcaacgatgaaaaggtccaaggatttctccaccagctggagcttgctctgcgtcataagacagcgaactttggcctcggtgttattcagaaaaccttcacctcttggttcaacggctccgatcctatgaaggagcttgcatggaacgaggttatcaatgccttcaaaagtaggtacgaaaaaggaggctacttagaggcgttgatgcaaaagtacctcatcaacgataactgcctgacttttacgatggttggtaccccttcatttaacaaggaattggatgataaggaaatggcgcggaaggagaaaaagtttgagcaattaactcagcaacatggttctgttgagaaggctgtgactgagcttgctaaagcagagctgcagctgcttgaagttcaggaaaaggcccagcatgctgacctgagctgtttgccgtctttgcgtgtggaggatatttcacggcagaaagagcacaagccagtccgcgaatctaaggtcgaaggcacagatattgtttggcgcgaagctccaaccaatggactgacctattttcaagctgtgaatgccttcgccgatcttcctgatgatctccgcctgctcctgccacttttcaacgatgcaatcatgcggcttggaacaccaactaggaccatggagcagtgggaagacctgataaaactcaaaacgggtggtgtctcgacctcgaatttccatactacatcgccaacagagatgggcaaatacactgagggacttcaattttctggtttcgctctggacaaaaatgtccccgacatgttggaaattctcacagctctcgttactgagacagacttcaccagcccttctgctccggccatgatccaggagcttttgcggctgactaccaacggggcattggatgctgttgcaggaactggtcaccgatacgctctaaacgcagctgctgccggtctttctcgtagcttctgggcacaagagcagacctcaggtctagcacagctgcaagctacggcgaatctcctgcgtgatgccgaaacttctccagaacgcctagccgagctgatcgaaaagcttcgtctcattcaatcattcgctatctcgaagacatctggtcttcgtgttcgcctcgtctgcgaaccggccagctcgacccagaatgaatctgttctgcaaaggtgggttactggactgcctaaggtcccgtcgcccacgtcccaacctcaaaggtttgacttgagcacaccttccaagaaggcgttctatgatctaccttacaaggtttactattctggtctggctttgcctaccgtgccatttacacactcatccagcgcgactctgagcgtcctttctcagcttctgacgcacaattacctccatcctgagatcagagagaaaggtggcgcctatggtgcaggagcaagcaacggtccggtcaagggattattcgcattcaccagctaccgcgaccccaaccctgccaacaccctcaaggtcttcaagaacagtggggtcttcgcgcgtgaccgggcttggtcagaccgtgaaatcaacgaggctaagcttggtatcttccaaggactcgatgcccccgttagcgttgatgaggaaggatctagatacttcctgaatggtatcacgcatgagatggaccagcgctggagagaacaggtcctagacgtcaccgccaaggacgtcaacgaggttgcgcagaccttcctggtagatggcacccggcggtctgtctgtctcctcggtgagaagaaggactgggccgaatctgagggctgggaggtccgcaagctctctatgaatcccaatggttccaacattccctccggtgatgccgcataa

SEQ ID NO: 34156 - protein, 1049 aa, Aspergillus nidulans FGSC A4
MLRSYLHLGRHRTPAFRQPLGRLLRPTASILQYAQSRTLASVSSLESLPEVGDQLHGFTVQEKKQVPELHLTAIRLRHDKTHADYLHIAREDKNNVFGIGFKTNPPDATGVPHILEHTTLCGSEKYPIRDPFFKMLPRSLSNFMNAFTSSDHTMYPFATTNQQDFQNLLSVYLDATMHPLLKEEDFRQEGWRLGPEDPRAIQTQEGNLKPEDILFKGVVYNEMKGQMSDANYLYWIRFQESIFPAINNSGGDPQHITDLTHKQLVEFSKKNYNPSNAKIITYGDMPLADHLKQVGGVLNDFSKGAVDTTVKLPIELRGPINVTVPGPIDTFVSEDRQFKTSTSWYMGDITDTVETFSAGILSSLLLDGYGSPMYKALIESGLGSSFTPNTGLDTSGKIPIFSIGVTGVSEEQAPRVKEEIQRVLQETLQRGFNDEKVQGFLHQLELALRHKTANFGLGVIQKTFTSWFNGSDPMKELAWNEVINAFKSRYEKGGYLEALMQKYLINDNCLTFTMVGTPSFNKELDDKEMARKEKKFEQLTQQHGSVEKAVTELAKAELQLLEVQEKAQHADLSCLPSLRVEDISRQKEHKPVRESKVEGTDIVWREAPTNGLTYFQAVNAFADLPDDLRLLLPLFNDAIMRLGTPTRTMEQWEDLIKLKTGGVSTSNFHTTSPTEMGKYTEGLQFSGFALDKNVPDMLEILTALVTETDFTSPSAPAMIQELLRLTTNGALDAVAGTGHRYALNAAAAGLSRSFWAQEQTSGLAQLQATANLLRDAETSPERLAELIEKLRLIQSFAISKTSGLRVRLVCEPASSTQNESVLQRWVTGLPKVPSPTSQPQRFDLSTPSKKAFYDLPYKVYYSGLALPTVPFTHSSSATLSVLSQLLTHNYLHPEIREKGGAYGAGASNGPVKGLFAFTSYRDPNPANTLKVFKNSGVFARDRAWSDREINEAKLGIFQGLDAPVSVDEEGSRYFLNGITHEMDQRWREQVLDVTAKDVNEVAQTFLVDGTRRSVCLLGEKKDWAESEGWEVRKLSMNPNGSNIPSGDAA

SEQ ID NO: 34157 - DNA, 3105 bp, Candida albicans SC5314
  CDS (1)..(3105): transl_table=12
atgttgaaaactagattaaaacaaagcagggccataagtcgggttgtaagaagatatgcatgctcacaccccatttctcccaatcttgataagtacccagttggtctaaaattgcatggttacgaagttacccaaacatcacctatcccagaattttccctcactgctgtatcattaaaacacacagagagtggtgcaactcacttacatttggattcccctaatgacagtaataatgtatttctgattgccttcaaaacaaatcctccagataatactggggttccccatattttagaacatacaactttgtgtggtagtaaaaagtttccggtccgtgatccattttttaaaatgaccaacaggtcgttgagtaactttatgaatgcaatgacaggccatgattacacattttatccatttgctaccaccaattcaaaggattttgaaaacctaatggatgtgtatttatcgtcagtgtttgaaccgcaattaaaccataccgatttcttgcaagaaggatggagaatagaaaatcaaaatgttcatgacatatcgtccaagcttgaattcaagggagttgtatataatgaaatgaagggccagtattcgaactctgcatactacttttatatcaagttccttgagagtatatatccatccttgaataattcagggggtgatcccaagaaaattgttgatttgctgtacgagggtttactagagtttcacctgaaaaattatcatccatcaaatgcaaaaacatttacttatggaaaattaccattggaagacagtttaagtaaaataagcaaatactatgaatcattcgaaaaaaaggtgtcttcagttgacgtcaaacaacctatattttctacagataaatcagaaatctttgatgtcaccatcccgggtccagttgatacaatgaatggtaaagagacttcagaacagtactgcacatctatcacctggaacttgggtaatccattggatccaaacatgcagtatgatatttttaaatggaaaatattgagctcattattgtttgatggacacaactctcctttctatcaagagttaattgaaagtggatacggtgacgatttttctgcaaatactgggttggactcaaccaccgcgttgctttcgtttactgttggtctcaactacttaaccaagcaaaaagttgataattttaatgaaaaagttatggaaatcattaataataaaatcattcccgaattaagtaacgaagagtcctcttcatatcatggtagaattgatgctatattgcatcaaatagaaataggattcaaaagacacaagcccgattttggatttggattattgagctctattgttccgtcatgggtgaatggagttgatccaattgacaccttgcaagtggaaaagatattgtcgcattttaaagaagattataaacaaaatggtttaaggatctttaaagaattattagaaaagacattgtgtaaccctcattcgcaaaaatttaaattcaccatggagccaagagaagattttaccaaacaattggtaaaagatgagaatttgatgatcgagaaaagagtaagtgaactcacagaagataacaagaaggcaatctatgagcaaaacttggaattagctaaattacaattggaggatcaaaatacagaagttttacccacattgactattgatgacattccaaagagaggtgatttttatgccattgatttgggccaagtaaataagaaagttgtacatgaaagggtagttgataccaatggcttggtttatgccaacgctttaaaagatatttcctatttacccaccaaactttacaagtaccttccattgtttaacaactgtttgacgaaccttgctggaacagaaaacacacccattacggagttggaaactaaaatacaaatgttaactggcgggataacatttagttctaaaatatcgactgacccctataatattgagcaactaaaattacagtatgtgttaagtggaatggctttgaaagaaaagtcatcctcagtttatgatttatggttggagattttaactactaccaaattcgacaccagtgatgaggtattagaaaagttgtcagttttgattaaaaacatgggacaaaaccaaatcaataatattgctgatcgcggtcattcttatgcggctgctgtgagctcactgaaattgacaccgctgaaatacatcagtgacatcgtttcaggtttgagtcaagttcaatttgtaatggagttgaactccaaattagaatcagaagggaaagagtacttggccaaagagattattccgatattgcaagaaatacaaaagtatgtattgcaaggtgaattcaggtatagactagttggaaatcaagagattattgttgaaaacgaaaagcttattgagaaatttgataaggatatttcttcgaacagaccaactttatcgttaacagtaacagatggtttactggcattgttgaactcattcaattacaatcatacaagtgaaaatgtcttagttaacttaccatttcaagtgggatactcttcattaggtaagattggctcttcgtattcatcaaaggatggtgcttctttacaaatattatctcagttatattcctttaaaaatctacattccaaaataagagaaagcaatggtgcatatggaggtggtttgacatatgatgggttgaacgggacattaaacttttattcgtatcgtgatcctaatcctgttaagtcgattcaaacttttagagattccttactgtatggacttgatgctaattggaacgataaggatttacaagaggctaagttgcgggttttccaaagcgtcgatgctccaattaatatctcttctcagggtgctagtgccttctttgaaaatatagatgattacttgagacaggaaagaagagaaaactttttgggtaccactttaaaggatctcagagatgtgactgaaaagtatcttgttgataaccaaaacaaccttgtcactgttattggtgacaatgaaattttaaatgtcgataataaatggcaaattagaaattttcaagtatag

SEQ ID NO: 34158 - protein, 1034 aa, Candida albicans SC5314
MLKTRLKQSRAISRVVRRYACSHPISPNLDKYPVGLKLHGYEVTQTSPIPEFSLTAVSLKHTESGATHLHLDSPNDSNNVFSIAFKTNPPDNTGVPHILEHTTLCGSKKFPVRDPFFKMTNRSLSNFMNAMTGHDYTFYPFATTNSKDFENLMDVYLSSVFEPQLNHTDFLQEGWRIENQNVHDISSKLEFKGVVYNEMKGQYSNSAYYFYIKFLESIYPSLNNSGGDPKKIVDLSYEGLLEFHSKNYHPSNAKTFTYGKLPLEDSLSKISKYYESFEKKVSSVDVKQPIFSTDKSEIFDVTIPGPVDTMNGKETSEQYCTSITWNLGNPLDPNMQYDIFKWKILSSLLFDGHNSPFYQELIESGYGDDFSANTGLDSTTALLSFTVGLNYLTKQKVDNFNEKVMEIINNKIIPELSNEESSSYHGRIDAILHQIEIGFKRHKPDFGFGLLSSIVPSWVNGVDPIDTLQVEKILSHFKEDYKQNGLRIFKELLEKTLCNPHSQKFKFTMEPREDFTKQLVKDENLMIEKRVSELTEDNKKAIYEQNLELAKLQLEDQNTEVLPTLTIDDIPKRGDFYAIDLGQVNKKVVHERVVDTNGLVYANALKDISYLPTKLYKYLPLFNNCLTNLAGTENTPITELETKIQMLTGGITFSSKISTDPYNIEQLKLQYVLSGMALKEKSSSVYDLWLEILTTTKFDTSDEVLEKLSVLIKNMGQNQINNIADRGHSYAAAVSSSKLTPSKYISDIVSGLSQVQFVMELNSKLESEGKEYLAKEIIPILQEIQKYVLQGEFRYRLVGNQEIIVENEKLIEKFDKDISSNRPTLSLTVTDGLSALLNSFNYNHTSENVLVNLPFQVGYSSLGKIGSSYSSKDGASLQILSQLYSFKNLHSKIRESNGAYGGGLTYDGLNGTLNFYSYRDPNPVKSIQTFRDSLSYGLDANWNDKDLQEAKLRVFQSVDAPINISSQGASAFFENIDDYLRQERRENFLGTTLKDLRDVTEKYLVDNQNNLVTVIGDNEILNVDNKWQIRNFQV

SEQ ID NO: 34159 - DNA, 3198 bp, Aspergillus fumigatus Af293
  CDS (1)..(3198)
atgttgcgctctttctcaggggcaggtaaatgcaagtgccgaataccggtctcgaggcagccagtctgtggtcggtcgctgagaatcagcagcacactcactccatggaatcaatctcggagagctgcgtcgaccgtcactagcttggacagttttccgaatgtcggggagaaacttcatgggtttacagtccaggagaagaaacatgtgccagagttgcaccttacagcagtacggttaaagcacgacaagacagacgcagattaccttcatgtcgctagggaggataagaacaatgtctttggtattgggtttaagacgaaccccccagatgcgactggtgtaccacatattttggagcacaccacgttgtgtggaagtgaaaaatacccaattcgcgacccgttcttcaagatgcttccgcggtcattgtcgaattttatgaatgctttcacctccgccgaccacactacgtacccattcgccacaacaaatcggcaggactttcaaaacctactatcagtatatttggacgctaccctacacccattgctgaaagaagaagacttcagacaggagggttggcggctgggaccagaggaccctcgttctattctaacccagggagagcaatccaagggaaacctgcagtcagaagatgtggttttcaaaggtgtcgtctacaacgaaatgaagggacagatatcagatgccaattatctctactacatcaaataccgtgaaagtatctgcccgtcgctgaataactctggcggagaccctcagtacatcaccgatttgacgcaccagcagctggtagacttctccaagcggaattaccatcccagtaacgccaagatcttgacatacggagacatgcctctgagcgtacacttgaaacagatcggtgaggtactggatggttttgaaaagggacaggccgatacagatgtcaagctgcccttggacctgagtcgcgggcccctgaatgtcactgttcccggacccatcgacacattcgccagtgaggacaagcagtacaagacctccacctcttggtacatgggcgacactaccgacgtcgtcgagacgttctcggtcggaattctgtcttccttgctcctcgatggctatggttcgccaatgtatcgtgcgttgatcgagggtgggttagggtcttcttttactcccaacacgggccttgattcctctggtagagtgccaatcttttcagtcggtcttactggcgtgagcgaagcggacgcaccaaaggtcaagtcgactatcaaaagggttttcgaggagtctctttcctccgggttcaatgatgagaaagtccaaggcttccttcatcaacttgaactcgcgttgagacacaagacggctaattttggtattggtgtcatggagaaaaccctttcatcatggttcaatggttcgaaccctatgaaggagttgtcttggaatgaagtcatcgatgagttcaagaaaaaatatgaacaaggaggctaccttgagtcattaatgcaaaaatatcttatgaacgataactgcctgacatttacgatggtgggaactccctcgtataacaaagatctcgatgatcaggaaatggtgcgcaaggaaaagaaactaagtgagctcgttgaacgccatggctcagttgagcaggctgtctctgcgcttgctgaagaagagcttcagttgctcaagattcaagaagaggcgcaaaacgccgatttgagctgcttaccctctctacgcgttgaggatatctccagggagaaggaacgcaaacccgtgcgggagtccaagatggacgatatagacgtcgtctggcgcgaagccccaacaaatgggctcacatatttccaagcattgaattctttcgaggagctcccggatgacctgcgattgctattgccgctgttcaacgattgtatcatgcgactaggcactggagacaaaaccatggaacagtgggaagatctgataaagttgaagaccggcggaatcacaacatccactctccacacatcttctcctacggagttgggtaaattcagggagggcctgcagttctcaggatatgctctggacaacaacattccggatatgctgcagattcttactacactcgtcactgagacagatttcaccagcccgcatgcgcccgccatgatccaggaattactgcgcatgaccaccaacggcgcgttggacgctgttgccgggtcaggccatcgttacgccctgaatgcggcagcggctggtttgtctcggagtttttgggttcaggaacagcagtcaggcctggcgcaattgcaagctacggcgaacctcctccgcgacgcggagagttctccagaacgtcttgctgagctgatcgataagctccggctgatccagtcatttgctatttccaaaggctcaggcctccgtgttcgcatggtttgtgagcccagcagtgcatcgcagaacgagattgtgctccagaaatggctggcaggactacctcgtaataggtctcccacttcgccacttgatcataccagcgtgaattcagtagctaatcgggtgttctatgacctgccttacaaggtttactactctggacttgctatgcagacggtccctttcattgatccctctagtgcacctctcagcgtcctttctcaacttctgacacacaaatacctgcaccctgaaatccgagagaagggaggtgcgtatggcgcgggggccagcaacggccctatcaagggattcttcgcctttaccagctaccgggatcccaatccagtgaacagtctcaaagtcttccagaacagtgggatctttgctcgggatcgtgcctggtcagaccgcgaacttgctgaggccaagctgggcatcttccagggacttgatgctcctatgagtgtcgatgaggagggtgccaggtatttcatgagtggtgttacccatgaaatggaccaacgttggcgagagcaagtgctcgatgtgactgcaaaggatgtcaacgaggtcgctcagaagttcttggttgaaggctctcggcaatccatctgtctgctcggcgagaagaaggattgggctgattccgacgactgggaagttcggaagctctctatgaatgcctcaggcgagccggtaatcgatcccctgagccaagatggcgccgtggcgtcggcttaa

SEQ ID NO: 34160 - protein, 1065 aa, Aspergillus fumigatus Af293
MLRSFSGAGKCKCRIPVSRQPVCGRSLRISSTLTPWNQSRRAASTVTSLDSFPNVGEKLHGFTVQEKKHVPELHLTAVRLKHDKTDADYLHVAREDKNNVFGIGFKTNPPDATGVPHILEHTTLCGSEKYPIRDPFFKMLPRSLSNFMNAFTSADHTTYPFATTNRQDFQNLLSVYLDATLHPLLKEEDFRQEGWRLGPEDPRSILTQGEQSKGNLQSEDVVFKGVVYNEMKGQISDANYLYYIKYRESICPSLNNSGGDPQYITDLTHQQLVDFSKRNYHPSNAKILTYGDMPLSVHLKQIGEVLDGFEKGQADTDVKLPLDLSRGPLNVTVPGPIDTFASEDKQYKTSTSWYMGDTTDVVETFSVGILSSLLLDGYGSPMYRALIEGGLGSSFTPNTGLDSSGRVPIFSVGLTGVSEADAPKVKSTIKRVFEESLSSGFNDEKVQGFLHQLELALRHKTANFGIGVMEKTLSSWFNGSNPMKELSWNEVIDEFKKKYEQGGYLESLMQKYLMNDNCLTFTMVGTPSYNKDLDDQEMVRKEKKLSELVERHGSVEQAVSALAEEELQLLKIQEEAQNADLSCLPSLRVEDISREKERKPVRESKMDDIDVVWREAPTNGLTYFQALNSFEELPDDLRLLLPLFNDCIMRLGTGDKTMEQWEDLIKLKTGGITTSTLHTSSPTELGKFREGLQFSGYALDNNIPDMLQILTTLVTETDFTSPHAPAMIQELLRMTTNGALDAVAGSGHRYALNAAAAGLSRSFWVQEQQSGLAQLQATANLLRDAESSPERLAELIDKLRLIQSFAISKGSGLRVRMVCEPSSASQNEIVLQKWLAGLPRNRSPTSPLDHTSVNSVANRVFYDLPYKVYYSGLAMQTVPFIDPSSAPLSVLSQLLTHKYLHPEIREKGGAYGAGASNGPIKGFFAFTSYRDPNPVNSLKVFQNSGIFARDRAWSDRELAEAKLGIFQGLDAPMSVDEEGARYFMSGVTHEMDQRWREQVLDVTAKDVNEVAQKFLVEGSRQSICLLGEKKDWADSDDWEVRKLSMNASGEPVIDPLSQDGAVASA

SEQ ID NO: 34161 - DNA, 23 bp, Artificial sequence
  Primer sequence
atgttgcggtttcagcgatttgc

SEQ ID NO: 34162 - DNA, 24 bp, Artificial sequence
  Primer sequence
ctacagttccttcacctcccaatt

SEQ ID NO: 34163 - protein, 1038 aa, Artificial sequence
  Consensus
  Variant (2)..(3): Xaa in position 2 to 3 is any amino acid
  Variant (8)..(8): Xaa in position 8 is any amino acid
  Variant (10)..(14): Xaa in position 10 to 14 is any amino acid
  Variant (18)..(19): Xaa in position 18 to 19 is any amino acid
  Variant (21)..(21): Xaa in position 21 is any amino acid
  Variant (24)..(24): Xaa in position 24 is any amino acid
  Variant (26)..(26): Xaa in position 26 is any amino acid
  Variant (28)..(28): Xaa in position 28 is any amino acid
  Variant (29)..(29): Xaa in position 29 is any or no amino acid
  Variant (33)..(33): Xaa in position 33 is any amino acid
  Variant (38)..(38): Xaa in position 38 is any amino acid
  Variant (40)..(40): Xaa in position 40 is any amino acid
  Variant (41)..(41): Xaa in position 41 is any or no amino acid
  Variant (43)..(43): Xaa in position 43 is any amino acid
  Variant (48)..(48): Xaa in position 48 is any amino acid
  Variant (58)..(58): Xaa in position 58 is any amino acid
  Variant (74)..(74): Xaa in position 74 is any amino acid
  Variant (87)..(87): Xaa in position 87 is any amino acid
  Variant (97)..(97): Xaa in position 97 is any amino acid
  Variant (100)..(100): Xaa in position 100 is any amino acid
  Variant (112)..(113): Xaa in position 112 to 113 is any amino acid
  Variant (116)..(116): Xaa in position 116 is any amino acid
  Variant (119)..(120): Xaa in position 119 to 120 is any amino acid
  Variant (124)..(124): Xaa in position 124 is any amino acid
  Variant (128)..(128): Xaa in position 128 is any amino acid
  Variant (132)..(134): Xaa in position 132 to 134 is any amino acid
  Variant (137)..(137): Xaa in position 137 is any amino acid
  Variant (144)..(154): Xaa in position 144 to 154 is any amino acid
  Variant (155)..(166): Xaa in position 155 to 166 is any or no amino acid
  Variant (183)..(183): Xaa in position 183 is any amino acid
  Variant (185)..(185): Xaa in position 185 is any amino acid
  Variant (187)..(187): Xaa in position 187 is any amino acid
  Variant (193)..(193): Xaa in position 193 is any amino acid
  Variant (195)..(195): Xaa in position 195 is any amino acid
  Variant (199)..(199): Xaa in position 199 is any amino acid
  Variant (208)..(209): Xaa in position 208 to 209 is any amino acid
  Variant (214)..(214): Xaa in position 214 is any amino acid
  Variant (216)..(217): Xaa in position 216 to 217 is any amino acid
  Variant (219)..(220): Xaa in position 219 to 220 is any amino acid
  Variant (223)..(225): Xaa in position 223 to 225 is any amino acid
  Variant (233)..(233): Xaa in position 233 is any amino acid
  Variant (238)..(240): Xaa in position 238 to 240 is any amino acid
  Variant (242)..(244): Xaa in position 242 to 244 is any amino acid
  Variant (246)..(247): Xaa in position 246 to 247 is any amino acid
  Variant (249)..(254): Xaa in position 249 to 254 is any amino acid
  Variant (256)..(256): Xaa in position 256 is any amino acid
  Variant (258)..(262): Xaa in position 258 to 262 is any amino acid
  Variant (263)..(280): Xaa in position 263 to 280 is any or no amino acid
  Variant (282)..(295): Xaa in position 282 to 295 is any or no amino acid
  Variant (297)..(297): Xaa in position 297 is any amino acid
  Variant (304)..(305): Xaa in position 304 to 305 is any amino acid
  Variant (307)..(309): Xaa in position 307 to 309 is any amino acid
  Variant (311)..(312): Xaa in position 311 to 312 is any amino acid
  Variant (313)..(315): Xaa in position 313 to 315 is any or no amino acid
  Variant (319)..(321): Xaa in position 319 to 321 is any amino acid
  Variant (324)..(325): Xaa in position 324 to 325 is any amino acid
  Variant (328)..(328): Xaa in position 328 is any amino acid
  Variant (332)..(332): Xaa in position 332 is any amino acid
  Variant (334)..(335): Xaa in position 334 to 335 is any amino acid
  Variant (337)..(338): Xaa in position 337 to 338 is any amino acid
  Variant (342)..(342): Xaa in position 342 is any amino acid
  Variant (343)..(343): Xaa in position 343 is any or no amino acid
  Variant (347)..(348): Xaa in position 347 to 348 is any amino acid
  Variant (351)..(351): Xaa in position 351 is any amino acid
  Variant (355)..(355): Xaa in position 355 is any amino acid
  Variant (357)..(364): Xaa in position 357 to 364 is any amino acid
  Variant (369)..(369): Xaa in position 369 is any amino acid
  Variant (371)..(396): Xaa in position 371 to 396 is any amino acid
  Variant (397)..(405): Xaa in position 397 to 405 is any or no amino acid
  Variant (408)..(408): Xaa in position 408 is any amino acid
  Variant (410)..(410): Xaa in position 410 is any amino acid
  Variant (417)..(418): Xaa in position 417 to 418 is any amino acid
  Variant (420)..(422): Xaa in position 420 to 422 is any amino acid
  Variant (424)..(424): Xaa in position 424 is any amino acid
  Variant (428)..(428): Xaa in position 428 is any amino acid
  Variant (431)..(432): Xaa in position 431 to 432 is any amino acid
  Variant (434)..(436): Xaa in position 434 to 436 is any amino acid
  Variant (438)..(438): Xaa in position 438 is any amino acid
  Variant (440)..(441): Xaa in position 440 to 441 is any amino acid
  Variant (444)..(446): Xaa in position 444 to 446 is any amino acid
  Variant (448)..(452): Xaa in position 448 to 452 is any amino acid
  Variant (454)..(455): Xaa in position 454 to 455 is any amino acid
  Variant (457)..(463): Xaa in position 457 to 463 is any amino acid
  Variant (465)..(468): Xaa in position 465 to 468 is any amino acid
  Variant (469)..(470): Xaa in position 469 to 470 is any or no amino acid
  Variant (473)..(473): Xaa in position 473 is any amino acid
  Variant (478)..(483): Xaa in position 478 to 483 is any amino acid
  Variant (484)..(485): Xaa in position 484 to 485 is any or no amino acid
  Variant (489)..(493): Xaa in position 489 to 493 is any amino acid
  Variant (495)..(497): Xaa in position 495 to 497 is any amino acid
  Variant (499)..(501): Xaa in position 499 to 501 is any amino acid
  Variant (503)..(504): Xaa in position 503 to 504 is any amino acid
  Variant (507)..(508): Xaa in position 507 to 508 is any amino acid
  Variant (511)..(512): Xaa in position 511 to 512 is any amino acid
  Variant (514)..(525): Xaa in position 514 to 525 is any amino acid
  Variant (526)..(533): Xaa in position 526 to 533 is any or no amino acid
  Variant (535)..(544): Xaa in position 535 to 544 is any amino acid
  Variant (547)..(548): Xaa in position 547 to 548 is any amino acid
  Variant (553)..(553): Xaa in position 553 is any amino acid
  Variant (555)..(555): Xaa in position 555 is any amino acid
  Variant (558)..(558): Xaa in position 558 is any amino acid
  Variant (560)..(565): Xaa in position 560 to 565 is any amino acid
  Variant (567)..(578): Xaa in position 567 to 578 is any amino acid
  Variant (579)..(582): Xaa in position 579 to 582 is any or no amino acid
  Variant (589)..(597): Xaa in position 589 to 597 is any amino acid
  Variant (598)..(598): Xaa in position 598 is any or no amino acid
  Variant (601)..(601): Xaa in position 601 is any amino acid
  Variant (603)..(606): Xaa in position 603 to 606 is any amino acid
  Variant (611)..(613): Xaa in position 611 to 613 is any amino acid
  Variant (615)..(616): Xaa in position 615 to 616 is any amino acid
  Variant (620)..(627): Xaa in position 620 to 627 is any amino acid
  Variant (630)..(630): Xaa in position 630 is any amino acid
  Variant (634)..(634): Xaa in position 634 is any amino acid
  Variant (638)..(638): Xaa in position 638 is any or no amino acid
  Variant (641)..(648): Xaa in position 641 to 648 is any amino acid
  Variant (650)..(661): Xaa in position 650 to 661 is any amino acid
  Variant (662)..(662): Xaa in position 662 is any or no amino acid
  Variant (664)..(664): Xaa in position 664 is any amino acid
  Variant (667)..(672): Xaa in position 667 to 672 is any amino acid
  Variant (675)..(679): Xaa in position 675 to 679 is any amino acid
  Variant (682)..(683): Xaa in position 682 to 683 is any amino acid
  Variant (685)..(685): Xaa in position 685 is any amino acid
  Variant (687)..(691): Xaa in position 687 to 691 is any amino acid
  Variant (692)..(696): Xaa in position 692 to 696 is any or no amino acid
  Variant (698)..(699): Xaa in position 698 to 699 is any amino acid
  Variant (702)..(711): Xaa in position 702 to 711 is any amino acid
  Variant (714)..(715): Xaa in position 714 to 715 is any amino acid
  Variant (718)..(718): Xaa in position 718 is any amino acid
  Variant (721)..(723): Xaa in position 721 to 723 is any amino acid
  Variant (725)..(725): Xaa in position 725 is any amino acid
  Variant (727)..(727): Xaa in position 727 is any amino acid
  Variant (730)..(733): Xaa in position 730 to 733 is any amino acid
  Variant (735)..(735): Xaa in position 735 is any amino acid
  Variant (737)..(739): Xaa in position 737 to 739 is any amino acid
  Variant (742)..(742): Xaa in position 742 is any amino acid
  Variant (745)..(746): Xaa in position 745 to 746 is any amino acid
  Variant (748)..(749): Xaa in position 748 to 749 is any amino acid
  Variant (751)..(760): Xaa in position 751 to 760 is any amino acid
  Variant (761)..(764): Xaa in position 761 to 764 is any or no amino acid
  Variant (768)..(769): Xaa in position 768 to 769 is any amino acid
  Variant (771)..(772): Xaa in position 771 to 772 is any amino acid
  Variant (775)..(799): Xaa in position 775 to 799 is any amino acid
  Variant (800)..(806): Xaa in position 800 to 806 is any or no amino acid
  Variant (808)..(809): Xaa in position 808 to 809 is any amino acid
  Variant (811)..(813): Xaa in position 811 to 813 is any amino acid
  Variant (815)..(839): Xaa in position 815 to 839 is any amino acid
  Variant (840)..(852): Xaa in position 840 to 852 is any or no amino acid
  Variant (857)..(857): Xaa in position 857 is any amino acid
  Variant (859)..(861): Xaa in position 859 to 861 is any amino acid
  Variant (863)..(867): Xaa in position 863 to 867 is any amino acid
  Variant (870)..(873): Xaa in position 870 to 873 is any amino acid
  Variant (875)..(875): Xaa in position 875 is any amino acid
  Variant (877)..(877): Xaa in position 877 is any amino acid
  Variant (885)..(885): Xaa in position 885 is any amino acid
  Variant (890)..(890): Xaa in position 890 is any amino acid
  Variant (904)..(907): Xaa in position 904 to 907 is any amino acid
  Variant (909)..(909): Xaa in position 909 is any amino acid
  Variant (911)..(911): Xaa in position 911 is any amino acid
  Variant (913)..(913): Xaa in position 913 is any amino acid
  Variant (923)..(924): Xaa in position 923 to 924 is any amino acid
  Variant (927)..(931): Xaa in position 927 to 931 is any amino acid
  Variant (933)..(934): Xaa in position 933 to 934 is any amino acid
  Variant (936)..(936): Xaa in position 936 is any amino acid
  Variant (938)..(940): Xaa in position 938 to 940 is any amino acid
  Variant (941)..(947): Xaa in position 941 to 947 is any or no amino acid
  Variant (949)..(951): Xaa in position 949 to 951 is any amino acid
  Variant (954)..(954): Xaa in position 954 is any amino acid
  Variant (959)..(959): Xaa in position 959 is any amino acid
  Variant (963)..(963): Xaa in position 963 is any amino acid
  Variant (968)..(972): Xaa in position 968 to 972 is any amino acid
  Variant (975)..(977): Xaa in position 975 to 977 is any amino acid
  Variant (979)..(981): Xaa in position 979 to 981 is any amino acid
  Variant (984)..(984): Xaa in position 984 is any amino acid
  Variant (987)..(989): Xaa in position 987 to 989 is any amino acid
  Variant (992)..(994): Xaa in position 992 to 994 is any amino acid
  Variant (997)..(997): Xaa in position 997 is any amino acid
  Variant (999)..(1001): Xaa in position 999 to 1001 is any amino acid
  Variant (1003)..(1004): Xaa in position 1003 to 1004 is any amino acid
  Variant (1007)..(1008): Xaa in position 1007 to 1008 is any amino acid
  Variant (1012)..(1032): Xaa in position 1012 to 1032 is any amino acid
  Variant (1033)..(1035): Xaa in position 1033 to 1035 is any or no amino acid
  Variant (1037)..(1037): Xaa in position 1037 is any amino acid
GXXLHGFXVXXXXXVPEXXLXAVXLXHXXTGAXHLHIXRXXDXNNVFXIGFKTNPPDXTGVPHILEHTTLCGSXKYPVRDPFFKMLXRSLSNFMNAXTAXDHTFYPFATTNXXDFXNLXXVYLXATLXPLLXXXDFXQEGWRLXXXXXXXXXXXXXXXXXXXXXXXIVFKGVVYNEMKGQMSXAXYXFWIRFXEXIYPXLNNSGGDPXXITDLXYXXLXXFHXXXYHPSNAKXFTYGXXXLXXXLXXLXXXXXXFXKXXXXXXXXXXXXXXXXXXXXXXXVXXXXXXXXXXXXXXQXKTSVSWXXGXXXDXXXXXETFXXXILXXLLXDGHXSXXYXXLIEXXGLGXXFSXNTGXDXXXXXXXXSIGLXGXXXXXXXXXXXXXXXXXXXXXXXXXXXXXXXXXXXKIXAXLHQLELXXKXXXAXFGLXLLXXIXXXWXNXXDPXXXLXXXXXIXXFXXXXXXXGXXXXXXLIXKYLIXXXXXXXXFTMXXXXXFXXXLXXXEXXRLXXKIXXLXXXXXXXXXXXXXXXXXXXXLXXXXXXXXXXDLXXLPTLXVXDIXRXXXXXXLXXXXXXXXXXXXXXXXTNGLTYXXXXXXXXXXLPXEXXXXLPLFXXXLXXLGTXXXXXXXXEDXIKLXTGGXISXXXXXXXXPXXXXXXXXXXXXXGXALXXXXXXMFXXXXXLLXXTXFXXXXXXXXXXLXXLIXXXXXXXXXXIAXXGHXYAXXXAXAXLSXXXXIXEXXXGLXQVXXIXXLXXXXXXXXXXXXXXEVIXXLXXIQXXXXXXXXXXXXXXXXXXXXXXXXXXXXXXXXLXXFXXXLXXXXXXXXXXXXXXXXXXXXXXXXXXXXXXXXXXXXXXPFQVXYXXXAXXXXXYTXXXXAXLXVLSQLLTXKHLHXEIREKGGAYGGGAXXXXLXGXFXFYSYRDPNPXXSLXXXXXSXXWXLXXXXXXXXXXWXXXDLXEAKLXIFQXVDAPXXXXXEGXXXFXXXITXEMXXXRRXXXLDXTXXXVXXVAXXYLVXXXXXXXXXXXXXXXXXXXXXXXXWXV

SEQ ID NO: 34164 - protein, 101 aa, Artificial sequence
  Consensus
  Variant (2)..(2): Xaa in position 2 is any amino acid
  Variant (3)..(3): Xaa in position 3 is Ala or Ser
  Variant (4)..(4): Xaa in position 4 is Asp, Glu, Gln or Arg
  Variant (5)..(5): Xaa in position 5 is His or Tyr
  Variant (8)..(8): Xaa in position 8 is Ile, Leu or Val
  Variant (9)..(9): Xaa in position 9 is Ala, Asp or Glu
  Variant (11)..(11): Xaa in position 11 is Asp, Glu or Asn
  Variant (13)..(13): Xaa in position 13 is any amino acid
  Variant (18)..(18): Xaa in position 18 is Gly or Ser
  Variant (19)..(19): Xaa in position 19 is Ile or Val
  Variant (20)..(20): Xaa in position 20 is Ala or Gly
  Variant (22)..(22): Xaa in position 22 is Lys or Arg
  Variant (24)..(24): Xaa in position 24 is any or no amino acid
  Variant (27)..(27): Xaa in position 27 is any or no amino acid
  Variant (29)..(29): Xaa in position 29 is any amino acid
  Variant (32)..(32): Xaa in position 32 is Ile, Leu or Val
  Variant (45)..(45): Xaa in position 45 is any amino acid
  Variant (48)..(48): Xaa in position 48 is Pro or Gln
  Variant (49)..(49): Xaa in position 49 is Ile or Val
  Variant (58)..(58): Xaa in position 58 is Asn or Pro
  Variant (59)..(59): Xaa in position 59 is Lys or Arg
  Variant (60)..(60): Xaa in position 60 is Ser or Thr
  Variant (62)..(62): Xaa in position 62 is Ala or Ser
  Variant (68)..(68): Xaa in position 68 is Phe or Met
  Variant (70)..(70): Xaa in position 70 is Ala, Gly or Ser
  Variant (71)..(71): Xaa in position 71 is any amino acid
  Variant (73)..(73): Xaa in position 73 is His or Tyr
  Variant (75)..(75): Xaa in position 75 is any amino acid
  Variant (76)..(76): Xaa in position 76 is Phe or Tyr
  Variant (79)..(79): Xaa in position 79 is Ala or Ser
  Variant (83)..(84): Xaa in position 83 to 84 is any amino acid
  Variant (86)..(86): Xaa in position 86 is Phe or Met
  Variant (87)..(87): Xaa in position 87 is any amino acid
  Variant (90)..(90): Xaa in position 90 is any amino acid
  Variant (91)..(91): Xaa in position 91 is Asp, Gly or Ser
  Variant (92)..(92): Xaa in position 92 is Leu or Val
  Variant (94)..(94): Xaa in position 94 is Leu or Met
  Variant (95)..(95): Xaa in position 95 is Asp or Asn
  Variant (96)..(96): Xaa in position 96 is Ala or Ser
  Variant (98)..(98): Xaa in position 98 is Leu or Met
  Variant (99)..(99): Xaa in position 99 is any amino acid
TXXXXLHXXRXDXNNVFXXXFXTXPPXDXTGXPHILEHTTLCGSXKYXXRDPFFKMLXXXLXNFMNAXTXXDXTXXPFXTTNXXDXXNLXXXYXXXTXXPL

SEQ ID NO: 34165 - protein, 17 aa, Artificial sequence
  Consensus
  Variant (5)..(5): Xaa in position 5 is Phe or Tyr
  Variant (12)..(12): Xaa in position 12 is Ile, Met or Val
  Variant (14)..(14): Xaa in position 14 is Asp or Asn
  Variant (16)..(16): Xaa in position 16 is Ala, Asp, Gly, Asn or Ser
KGVVXNEMKGQXSXAXY

SEQ ID NO: 34166 - protein, 44 aa, Artificial sequence
  Consensus
  Variant (2)..(2): Xaa in position 2 is any amino acid
  Variant (7)..(8): Xaa in position 7 to 8 is any amino acid
  Variant (10)..(10): Xaa in position 10 is Pro, Thr or Val
  Variant (11)..(11): Xaa in position 11 is Asp or Glu
  Variant (13)..(13): Xaa in position 13 is any amino acid
  Variant (14)..(14): Xaa in position 14 is His or Tyr
  Variant (15)..(15): Xaa in position 15 is any amino acid
  Variant (16)..(16): Xaa in position 16 is Asp, Gly or Gln
  Variant (18)..(19): Xaa in position 18 to 19 is any amino acid
  Variant (21)..(24): Xaa in position 21 to 24 is any amino acid
  Variant (26)..(26): Xaa in position 26 is any amino acid
  Variant (31)..(31): Xaa in position 31 is Lys or Arg
  Variant (32)..(32): Xaa in position 32 is any amino acid
  Variant (33)..(33): Xaa in position 33 is Phe, Ile or Leu
  Variant (34)..(34): Xaa in position 34 is Ser or Thr
  Variant (37)..(37): Xaa in position 37 is any amino acid
  Variant (38)..(38): Xaa in position 38 is Phe, Ile, Leu or Met
  Variant (39)..(39): Xaa in position 39 is Pro or Ser
  Variant (40)..(40): Xaa in position 40 is Leu or Val
  Variant (41)..(41): Xaa in position 41 is any amino acid
  Variant (42)..(42): Xaa in position 42 is Asp or Val
  Variant (43)..(43): Xaa in position 43 is any amino acid
NXGGDPXXIXXLXXXXLXXFXXXXYXPSNAXXXXYGXXXXXXXL

SEQ ID NO: 34167 - protein, 66 aa, Artificial sequence
  Consensus
  Variant (2)..(2): Xaa in position 2 is any amino acid
  Variant (3)..(3): Xaa in position 3 is Ser or Thr
  Variant (5)..(6): Xaa in position 5 to 6 is any amino acid
  Variant (8)..(10): Xaa in position 8 to 10 is any amino acid
  Variant (11)..(11): Xaa in position 11 is Asp or Asn
  Variant (12)..(13): Xaa in position 12 to 13 is any amino acid
  Variant (14)..(14): Xaa in position 14 is Asp, Glu or Gln
  Variant (15)..(15): Xaa in position 15 is Ser or Thr
  Variant (17)..(17): Xaa in position 17 is any amino acid
  Variant (18)..(18): Xaa in position 18 is Ala, Leu or Val
  Variant (19)..(19): Xaa in position 19 is any amino acid
  Variant (20)..(20): Xaa in position 20 is Ile, Leu or Val
  Variant (21)..(21): Xaa in position 21 is Ile or Leu
  Variant (22)..(22): Xaa in position 22 is Gly or Ser
  Variant (23)..(23): Xaa in position 23 is Ala, Asn, Ser or Thr
  Variant (26)..(26): Xaa in position 26 is Phe, Ile, Leu or Met
  Variant (29)..(29): Xaa in position 29 is His or Tyr
  Variant (30)..(30): Xaa in position 30 is Asp, Gly or Ser
  Variant (32)..(32): Xaa in position 32 is Ala, Ile, Pro or Val
  Variant (33)..(33): Xaa in position 33 is Phe, Leu or Met
  Variant (34)..(34): Xaa in position 34 is His or Tyr
  Variant (35)..(36): Xaa in position 35 to 36 is any amino acid
  Variant (38)..(39): Xaa in position 38 to 39 is any amino acid
  Variant (40)..(41): Xaa in position 40 to 41 is any or no amino acid
  Variant (43)..(49): Xaa in position 43 to 49 is any amino acid
  Variant (50)..(50): Xaa in position 50 is any or no amino acid
  Variant (52)..(52): Xaa in position 52 is Ala, Ser or Thr
  Variant (54)..(54): Xaa in position 54 is any amino acid
  Variant (55)..(55): Xaa in position 55 is Asp or Glu
  Variant (56)..(56): Xaa in position 56 is Asn, Pro, Ser or Thr
  Variant (57)..(57): Xaa in position 57 is any amino acid
  Variant (58)..(58): Xaa in position 58 is Ala, Gly, Pro or Thr
  Variant (59)..(60): Xaa in position 59 to 60 is any amino acid
  Variant (61)..(61): Xaa in position 61 is Gly, Asn or Pro
  Variant (62)..(63): Xaa in position 62 to 63 is Phe, Ile or Leu
  Variant (64)..(64): Xaa in position 64 is Ser or Thr
  Variant (65)..(65): Xaa in position 65 is Ile or Val
SXXWXXGXXXXXXXXFXXXXXXXLLXDGXXSXXXXXLXXXXGXXXXXXXXNXGXXXXXXXXXXXXG

SEQ ID NO: 34168 - protein, 89 aa, Artificial sequence
  Consensus
  Variant (2)..(2): Xaa in position 2 is Phe or Tyr
  Variant (3)..(3): Xaa in position 3 is any amino acid
  Variant (5)..(5): Xaa in position 5 is any amino acid
  Variant (7)..(7): Xaa in position 7 is Ala, Gly, Ser or Thr
  Variant (8)..(8): Xaa in position 8 is Ala, Gly or Ser
  Variant (9)..(9): Xaa in position 9 is any amino acid
  Variant (10)..(10): Xaa in position 10 is Ala, Cys or Ser
  Variant (11)..(12): Xaa in position 11 to 12 is any amino acid
  Variant (13)..(13): Xaa in position 13 is Gly or Thr
  Variant (14)..(14): Xaa in position 14 is Ala, Ser, Thr or Val
  Variant (15)..(15): Xaa in position 15 is Pro or Ser
  Variant (16)..(16): Xaa in position 16 is Phe or Tyr
  Variant (17)..(20): Xaa in position 17 to 20 is any amino acid
  Variant (21)..(21): Xaa in position 21 is Gly, Asn or Ser
  Variant (22)..(22): Xaa in position 22 is Ala or Ser
  Variant (23)..(23): Xaa in position 23 is any amino acid
  Variant (25)..(25): Xaa in position 25 is any amino acid
  Variant (26)..(26): Xaa in position 26 is Ile or Val
  Variant (27)..(27): Xaa in position 27 is Leu or Met
  Variant (28)..(28): Xaa in position 28 is Ala or Ser
  Variant (29)..(29): Xaa in position 29 is Asn, Gln or Ser
  Variant (30)..(30): Xaa in position 30 is Leu or Met
  Variant (33)..(34): Xaa in position 33 to 34 is any or no amino acid
  Variant (36)..(37): Xaa in position 36 to 37 is any or no amino acid
  Variant (40)..(40): Xaa in position 40 is any amino acid
  Variant (42)..(42): Xaa in position 42 is Ile or Val
  Variant (51)..(51): Xaa in position 51 is Ala or Gly
  Variant (53)..(53): Xaa in position 53 is Ala or Ser
  Variant (54)..(56): Xaa in position 54 to 56 is any amino acid
  Variant (57)..(57): Xaa in position 57 is Ala, Pro or Ser
  Variant (58)..(59): Xaa in position 58 to 59 is any amino acid
  Variant (61)..(61): Xaa in position 61 is any amino acid
  Variant (63)..(63): Xaa in position 63 is Ala, Gly, Asn or Ser
  Variant (64)..(64): Xaa in position 64 is Phe or Tyr
  Variant (65)..(65): Xaa in position 65 is any amino acid
  Variant (71)..(71): Xaa in position 71 is any amino acid
  Variant (72)..(72): Xaa in position 72 is Ala, Leu or Pro
  Variant (73)..(74): Xaa in position 73 to 74 is any amino acid
  Variant (75)..(75): Xaa in position 75 is Ser or Thr
  Variant (76)..(76): Xaa in position 76 is Ile or Leu
  Variant (77)..(81): Xaa in position 77 to 81 is any amino acid
  Variant (82)..(82): Xaa in position 82 is Ala, Ser or Val
  Variant (83)..(83): Xaa in position 83 is Ala, Gly or Pro
  Variant (84)..(84): Xaa in position 84 is any amino acid
  Variant (85)..(85): Xaa in position 85 is Phe, Trp or Tyr
  Variant (86)..(88): Xaa in position 86 to 88 is any amino acid
  Variant (89)..(89): Xaa in position 89 is Asp, Glu, Lys or Arg
PXXVXYXXXXXXXXXXXXXXXXXLXXXXXXLTXXHXXLHXEXREKGGAYGXGXXXXXXXGXFXXXSYRDPXXXXXXXXXXXXXXXXXXX

SEQ ID NO: 34169 - DNA, 1755 bp, Saccharomyces cerevisiae; identical to SEQ ID NO: 7718
  CDS (1)..(1755)

SEQ ID NO: 34170 - protein, 584 aa, Saccharomyces cerevisiae; identical to SEQ ID NO: 7719

SEQ ID NO: 34171 - DNA, 1560 bp, Glycine max; identical to SEQ ID NO: 7720
  CDS (1)..(1560)

SEQ ID NO: 34172 - protein, 519 aa, Glycine max; identical to SEQ ID NO: 7721

SEQ ID NO: 34173 - DNA, 1536 bp, Glycine max; identical to SEQ ID NO: 7722
  CDS (1)..(1536)

SEQ ID NO: 34174 - protein, 511 aa, Glycine max; identical to SEQ ID NO: 7723

SEQ ID NO: 34175 - DNA, 2856 bp, Homo sapiens (man); identical to SEQ ID NO: 7724
  CDS (180)..(1658)

SEQ ID NO: 34176 - protein, 492 aa, Homo sapiens (man); identical to SEQ ID NO: 7725

SEQ ID NO: 34177 - DNA, 2487 bp, Oryctolagus cuniculus (domestic rabbit); identical to SEQ ID NO: 7726
  CDS (124)..(1602)

SEQ ID NO: 34178 - protein, 492 aa, Oryctolagus cuniculus (domestic rabbit); identical to SEQ ID NO: 7727

SEQ ID NO: 34179 - DNA, 3642 bp, Saccharomyces cerevisiae; identical to SEQ ID NO: 7728
  CDS (551)..(3205)

SEQ ID NO: 34180 - protein, 884 aa, Saccharomyces cerevisiae; identical to SEQ ID NO: 168

SEQ ID NO: 34181 - DNA, 1774 bp, Mus musculus (house mouse); identical to SEQ ID NO: 7730
  CDS (80)..(1561)

SEQ ID NO: 34182 - protein, 493 aa, Mus musculus (house mouse); identical to SEQ ID NO: 7731

SEQ ID NO: 34183 - DNA, 2798 bp, Leishmania donovani; identical to SEQ ID NO: 7732
  CDS (676)..(2319)

SEQ ID NO: 34184 - protein, 547 aa, Leishmania donovani; identical to SEQ ID NO: 7733

SEQ ID NO: 34185 - DNA, 1536 bp, Arabidopsis thaliana (mouse-ear cress); identical to SEQ ID NO: 7734
  CDS (1)..(1536)

SEQ ID NO: 34186 - protein, 511 aa, Arabidopsis thaliana (mouse-ear cress); identical to SEQ ID NO: 7735

SEQ ID NO: 34187 - DNA, 1482 bp, Arabidopsis thaliana (mouse-ear cress); identical to SEQ ID NO: 7736
  CDS (1)..(1482)

SEQ ID NO: 34188 - protein, 493 aa, Arabidopsis thaliana (mouse-ear cress); identical to SEQ ID NO: 172

SEQ ID NO: 34189 - DNA, 1395 bp, Salmonella enterica subsp. enterica serovar Typhi; identical to SEQ ID NO: 7738
  CDS (1)..(1395)

SEQ ID NO: 34190 - protein, 464 aa, Salmonella enterica subsp. enterica serovar Typhi; identical to SEQ ID NO: 7739

SEQ ID NO: 34191 - DNA, 2568 bp, Saccharomyces cerevisiae; identical to SEQ ID NO: 7740
  CDS (461)..(2299)

SEQ ID NO: 34192 - protein, 612 aa, Saccharomyces cerevisiae; identical to SEQ ID NO: 7741

SEQ ID NO: 34193 - DNA, 1449 bp, Bacillus subtilis; identical to SEQ ID NO: 173
  CDS (1)..(1449)

SEQ ID NO: 34194 - protein, 482 aa, Bacillus subtilis; identical to SEQ ID NO: 174

SEQ ID NO: 34195 - DNA, 1644 bp, Arabidopsis thaliana (mouse-ear cress); identical to SEQ ID NO: 175
  CDS (1)..(1644)

SEQ ID NO: 34196 - protein, 547 aa, Arabidopsis thaliana (mouse-ear cress); identical to SEQ ID NO: 176

SEQ ID NO: 34197 - DNA, 1560 bp, Caulobacter crescentus; identical to SEQ ID NO: 7746
  CDS (1)..(1560)

SEQ ID NO: 34198 - protein, 519 aa, Caulobacter crescentus; identical to SEQ ID NO: 7747

SEQ ID NO: 34199 - DNA, 1386 bp, Bacillus subtilis; identical to SEQ ID NO: 7748
  CDS (1)..(1386)

SEQ ID NO: 34200 - protein, 461 aa, Bacillus subtilis; identical to SEQ ID NO: 7749

SEQ ID NO: 34201 - DNA, 1743 bp, Arabidopsis thaliana (mouse-ear cress); identical to SEQ ID NO: 7750
  CDS (1)..(1743)

SEQ ID NO: 34202 - protein, 580 aa, Arabidopsis thaliana (mouse-ear cress); identical to SEQ ID NO: 7751

SEQ ID NO: 34203 - DNA, 1774 bp, Arabidopsis thaliana (mouse-ear cress); identical to SEQ ID NO: 7752
  CDS (1)..(1743)

SEQ ID NO: 34204 - protein, 580 aa, Arabidopsis thaliana (mouse-ear cress); identical to SEQ ID NO: 7753

SEQ ID NO: 34205 - DNA, 1554 bp, Arabidopsis thaliana (mouse-ear cress); identical to SEQ ID NO: 7754
  CDS (1)..(1554)

SEQ ID NO: 34206 - protein, 517 aa, Arabidopsis thaliana (mouse-ear cress); identical to SEQ ID NO: 7755

SEQ ID NO: 34207 - DNA, 1260 bp, Bacillus subtilis; identical to SEQ ID NO: 7756
  CDS (1)..(1260)

SEQ ID NO: 34208 - protein, 419 aa, Bacillus subtilis; identical to SEQ ID NO: 7757

SEQ ID NO: 34209 - DNA, 1518 bp, Bacillus subtilis; identical to SEQ ID NO: 7758
  CDS (16)..(1389)

SEQ ID NO: 34210 - protein, 457 aa, Bacillus subtilis; identical to SEQ ID NO: 7759

SEQ ID NO: 34211 - DNA, 1695 bp, Arabidopsis thaliana (mouse-ear cress); identical to SEQ ID NO: 7760
  CDS (12)..(1475)

SEQ ID NO: 34212 - protein, 487 aa, Arabidopsis thaliana (mouse-ear cress); identical to SEQ ID NO: 7761

SEQ ID NO: 34213 - DNA, 1395 bp, Bacillus subtilis; identical to SEQ ID NO: 177
  CDS (1)..(1395)

SEQ ID NO: 34214 - protein, 464 aa, Bacillus subtilis; identical to SEQ ID NO: 178

SEQ ID NO: 34215 - DNA, 1780 bp, Arabidopsis thaliana (mouse-ear cress); identical to SEQ ID NO: 7764
  CDS (1)..(1749)

SEQ ID NO: 34216 - protein, 582 aa, Arabidopsis thaliana (mouse-ear cress); identical to SEQ ID NO: 7765

SEQ ID NO: 34217 - DNA, 1368 bp, Clostridium acetobutylicum; identical to SEQ ID NO: 7766
  CDS (1)..(1368)

SEQ ID NO: 34218 - protein, 455 aa, Clostridium acetobutylicum; identical to SEQ ID NO: 7767

SEQ ID NO: 34219 - DNA, 1422 bp, Bacillus subtilis; identical to SEQ ID NO: 7768
  CDS (1)..(1422)

SEQ ID NO: 34220 - protein, 473 aa, Bacillus subtilis; identical to SEQ ID NO: 7769

SEQ ID NO: 34221 - DNA, 1566 bp, Arabidopsis thaliana (mouse-ear cress); identical to SEQ ID NO: 181
  CDS (1)..(1566)

SEQ ID NO: 34222 - protein, 521 aa, Arabidopsis thaliana (mouse-ear cress); identical to SEQ ID NO: 182

SEQ ID NO: 34223 - DNA, 1302 bp, Lactococcus lactis subsp. lactis; identical to SEQ ID NO: 7772
  CDS (1)..(1302)

SEQ ID NO: 34224 - protein, 433 aa, Lactococcus lactis subsp. lactis; identical to SEQ ID NO: 7773

SEQ ID NO: 34225 - DNA, 1536 bp, Arabidopsis thaliana (mouse-ear cress); identical to SEQ ID NO: 183
  CDS (1)..(1536)

SEQ ID NO: 34226 - protein, 511 aa, Arabidopsis thaliana (mouse-ear cress); identical to SEQ ID NO: 184

SEQ ID NO: 34227 - DNA, 1410 bp, Clostridium acetobutylicum; identical to SEQ ID NO: 185
  CDS (1)..(1410)

SEQ ID NO: 34228 - protein, 469 aa, Clostridium acetobutylicum; identical to SEQ ID NO: 186

SEQ ID NO: 34229 - DNA, 2890 bp, Saccharomyces cerevisiae; identical to SEQ ID NO: 189
  CDS (818)..(2443)

SEQ ID NO: 34230 - protein, 541 aa, Saccharomyces cerevisiae; identical to SEQ ID NO: 190

SEQ ID NO: 34231 - DNA, 2613 bp, Mus musculus (house mouse); identical to SEQ ID NO: 7780
  CDS (180)..(1658)

SEQ ID NO: 34232 - protein, 492 aa, Mus musculus (house mouse); identical to SEQ ID NO: 7781

SEQ ID NO: 34233 - DNA, 1559 bp, Synechocystis sp; identical to SEQ ID NO: 7782
  CDS (92)..(1498)

SEQ ID NO: 34234 - protein, 468 aa, Synechocystis sp; identical to SEQ ID NO: 7783

SEQ ID NO: 34235 - DNA, 1704 bp, Kluyveromyces marxianus var. lactis, Candida sphaerica; identical to SEQ ID NO: 193
  CDS (1)..(1704)

SEQ ID NO: 34236 - protein, 567 aa, Kluyveromyces marxianus var. lactis, Candida sphaerica; identical to SEQ ID NO: 194

SEQ ID NO: 34237 - DNA, 1545 bp, Arabidopsis thaliana (mouse-ear cress); identical to SEQ ID NO: 7786
  CDS (1)..(1545)

SEQ ID NO: 34238 - protein, 514 aa, Arabidopsis thaliana (mouse-ear cress); identical to SEQ ID NO: 7787

SEQ ID NO: 34239 - DNA, 1853 bp, Nicotiana tabacum (common tobacco); identical to SEQ ID NO: 7788
  CDS (103)..(1674)

SEQ ID NO: 34240 - protein, 523 aa, Nicotiana tabacum (common tobacco); identical to SEQ ID NO: 7789

SEQ ID NO: 34241 - DNA, 2114 bp, Saccharomyces cerevisiae; identical to SEQ ID NO: 7790
  CDS (373)..(2076)

SEQ ID NO: 34242 - protein, 567 aa, Saccharomyces cerevisiae; identical to SEQ ID NO: 196

SEQ ID NO: 34243 - DNA, 1605 bp, Chlorella kessleri; identical to SEQ ID NO: 7792
  CDS (1)..(1605)

SEQ ID NO: 34244 - protein, 534 aa, Chlorella kessleri; identical to SEQ ID NO: 7793

SEQ ID NO: 34245 - DNA, 2160 bp, Saccharomyces cerevisiae; identical to SEQ ID NO: 197
  CDS (216)..(1928)

SEQ ID NO: 34246 - protein, 570 aa, Saccharomyces cerevisiae; identical to SEQ ID NO: 198

SEQ ID NO: 34247 - DNA, 1673 bp, Rattus norvegicus (Norway rat); identical to SEQ ID NO: 7796
  CDS (85)..(1566)

SEQ ID NO: 34248 - protein, 493 aa, Rattus norvegicus (Norway rat); identical to SEQ ID NO: 7797

SEQ ID NO: 34249 - DNA, 2209 bp, Saccharomyces cerevisiae; identical to SEQ ID NO: 7798
  CDS (213)..(1925)

SEQ ID NO: 34250 - protein, 570 aa, Saccharomyces cerevisiae; identical to SEQ ID NO: 7799

SEQ ID NO: 34251 - DNA, 3025 bp, Saccharomyces cerevisiae; identical to SEQ ID NO: 201
  CDS (510)..(2288)

SEQ ID NO: 34252 - protein, 592 aa, Saccharomyces cerevisiae; identical to SEQ ID NO: 202

SEQ ID NO: 34253 - DNA, 1683 bp, Saccharomyces cerevisiae; identical to SEQ ID NO: 7802
  CDS (1)..(1683)

SEQ ID NO: 34254 - protein, 560 aa, Saccharomyces cerevisiae; identical to SEQ ID NO: 7803

SEQ ID NO: 34255 - DNA, 1463 bp, Klebsiella oxytoca; identical to SEQ ID NO: 7804
  CDS (27)..(1445)

SEQ ID NO: 34256 - protein, 472 aa, Klebsiella oxytoca; identical to SEQ ID NO: 7805

SEQ ID NO: 34257 - DNA, 1641 bp, Saccharomyces cerevisiae; identical to SEQ ID NO: 203
  CDS (1)..(1641)

SEQ ID NO: 34258 - protein, 546 aa, Saccharomyces cerevisiae; identical to SEQ ID NO: 204

SEQ ID NO: 34259 - DNA, 1695 bp, Saccharomyces cerevisiae; identical to SEQ ID NO: 205
  CDS (1)..(1695)

SEQ ID NO: 34260 - protein, 564 aa, Saccharomyces cerevisiae; identical to SEQ ID NO: 206

SEQ ID NO: 34261 - DNA, 3277 bp, Saccharomyces cerevisiae; identical to SEQ ID NO: 207
  CDS (802)..(2505)

SEQ ID NO: 34262 - protein, 567 aa, Saccharomyces cerevisiae; identical to SEQ ID NO: 208

SEQ ID NO: 34263 - DNA, 1710 bp, Saccharomyces cerevisiae; identical to SEQ ID NO: 209
  CDS (1)..(1710)

SEQ ID NO: 34264 - protein, 569 aa, Saccharomyces cerevisiae; identical to SEQ ID NO: 210

SEQ ID NO: 34265 - DNA, 1701 bp, Kluyveromyces marxianus var. lactis, Candida sphaerica; identical to SEQ ID NO: 211
  CDS (1)..(1701)

SEQ ID NO: 34266 - protein, 566 aa, Kluyveromyces marxianus var. lactis, Candida sphaerica; identical to SEQ ID NO: 212

SEQ ID NO: 34267 - DNA, 1704 bp, Saccharomyces cerevisiae; identical to SEQ ID NO: 7816
  CDS (1)..(1704)

SEQ ID NO: 34268 - protein, 567 aa, Saccharomyces cerevisiae; identical to SEQ ID NO: 7817

SEQ ID NO: 34269 - DNA, 3323 bp, Saccharomyces cerevisiae; identical to SEQ ID NO: 217
  CDS (1189)..(2883)

SEQ ID NO: 34270 - protein, 564 aa, Saccharomyces cerevisiae; identical to SEQ ID NO: 218

SEQ ID NO: 34271 - DNA, 3143 bp, Saccharomyces cerevisiae; identical to SEQ ID NO: 219
  CDS (962)..(2686)

SEQ ID NO: 34272 - protein, 574 aa, Saccharomyces cerevisiae; identical to SEQ ID NO: 220

SEQ ID NO: 34273 - DNA, 4409 bp, Saccharomyces cerevisiae; identical to SEQ ID NO: 221
  CDS (1233)..(3524)

SEQ ID NO: 34274 - protein, 763 aa, Saccharomyces cerevisiae; identical to SEQ ID NO: 222

SEQ ID NO: 34275 - DNA, 1668 bp, Saccharomyces cerevisiae; identical to SEQ ID NO: 7824
  CDS (1)..(1668)

SEQ ID NO: 34276 - protein, 555 aa, Saccharomyces cerevisiae; identical to SEQ ID NO: 7825

SEQ ID NO: 34277 - DNA, 1542 bp, Arabidopsis thaliana (mouse-ear cress); identical to SEQ ID NO: 7826
  CDS (1)..(1542)

SEQ ID NO: 34278 - protein, 513 aa, Arabidopsis thaliana (mouse-ear cress); identical to SEQ ID NO: 7827

SEQ ID NO: 34279 - DNA, 1524 bp, Arabidopsis thaliana (mouse-ear cress); identical to SEQ ID NO: 7828
  CDS (1)..(1524)

SEQ ID NO: 34280 - protein, 507 aa, Arabidopsis thaliana (mouse-ear cress); identical to SEQ ID NO: 7829

SEQ ID NO: 34281 - DNA, 1868 bp, Arabidopsis thaliana (mouse-ear cress); identical to SEQ ID NO: 7830
  CDS (73)..(1653)

SEQ ID NO: 34282 - protein, 526 aa, Arabidopsis thaliana (mouse-ear cress); identical to SEQ ID NO: 7831

SEQ ID NO: 34283 - DNA, 1527 bp, Arabidopsis thaliana (mouse-ear cress); identical to SEQ ID NO: 7832
  CDS (1)..(1527)

SEQ ID NO: 34284 - protein, 508 aa, Arabidopsis thaliana (mouse-ear cress); identical to SEQ ID NO: 7833

SEQ ID NO: 34285 - DNA, 2118 bp, Lycopersicon esculentum (tomato); identical to SEQ ID NO: 7834
  CDS (93)..(1664)

SEQ ID NO: 34286 - protein, 523 aa, Lycopersicon esculentum (tomato); identical to SEQ ID NO: 7835

SEQ ID NO: 34287 - DNA, 1779 bp, Ricinus communis (castor bean); identical to SEQ ID NO: 7836
  CDS (86)..(1657)

SEQ ID NO: 34288 - protein, 523 aa, Ricinus communis (castor bean); identical to SEQ ID NO: 7837

SEQ ID NO: 34289 - DNA, 1966 bp, Ricinus communis (castor bean); identical to SEQ ID NO: 7838
  misc_feature (412)..(413): n is a, c, g, or t
  misc_feature (427)..(428): n is a, c, g, or t
  CDS (63)..(1595)

SEQ ID NO: 34290 - protein, 510 aa, Ricinus communis (castor bean); identical to SEQ ID NO: 7839
  misc_feature (117)..(117): Xaa can be any naturally occuring amino acid
  misc_feature (122)..(122): Xaa can be any naturally occuring amino acid

SEQ ID NO: 34291 - DNA, 1861 bp, Ricinus communis (castor bean); identical to SEQ ID NO: 7840
  CDS (102)..(1670)

SEQ ID NO: 34292 - protein, 522 aa, Ricinus communis (castor bean); identical to SEQ ID NO: 7841

SEQ ID NO: 34293 - DNA, 1672 bp, Vicia faba (fava bean); identical to SEQ ID NO: 7842
  CDS (18)..(1568)

SEQ ID NO: 34294 - protein, 516 aa, Vicia faba (fava bean); identical to SEQ ID NO: 7843

SEQ ID NO: 34295 - DNA, 2020 bp, Beta vulgaris (beet); identical to SEQ ID NO: 229
  CDS (190)..(1662)

SEQ ID NO: 34296 - protein, 490 aa, Beta vulgaris (beet); identical to SEQ ID NO: 230

SEQ ID NO: 34297 - DNA, 1925 bp, Beta vulgaris (beet); identical to SEQ ID NO: 7846
  CDS (40)..(1689)

SEQ ID NO: 34298 - protein, 549 aa, Beta vulgaris (beet); identical to SEQ ID NO: 7847

SEQ ID NO: 34299 - DNA, 1820 bp, Picea abies (Norway spruce); identical to SEQ ID NO: 7848
  CDS (33)..(1574)

SEQ ID NO: 34300 - protein, 513 aa, Picea abies (Norway spruce); identical to SEQ ID NO: 7849

SEQ ID NO: 34301 - DNA, 1920 bp, Caenorhabditis elegans; identical to SEQ ID NO: 7850
  CDS (1)..(1920)

SEQ ID NO: 34302 - protein, 639 aa, Caenorhabditis elegans; identical to SEQ ID NO: 7851

SEQ ID NO: 34303 - DNA, 1821 bp, Caenorhabditis elegans; identical to SEQ ID NO: 7852
  CDS (1)..(1821)

SEQ ID NO: 34304 - protein, 606 aa, Caenorhabditis elegans; identical to SEQ ID NO: 7853

SEQ ID NO: 34305 - DNA, 1842 bp, Caenorhabditis elegans; identical to SEQ ID NO: 7854
  CDS (1)..(1842)

SEQ ID NO: 34306 - protein, 613 aa, Caenorhabditis elegans; identical to SEQ ID NO: 7855

SEQ ID NO: 34307 - DNA, 1419 bp, Streptomyces coelicolor; identical to SEQ ID NO: 7856
  CDS (1)..(1419)

SEQ ID NO: 34308 - protein, 472 aa, Streptomyces coelicolor; identical to SEQ ID NO: 7857

SEQ ID NO: 34309 - DNA, 1674 bp, Schizosaccharomyces pombe; identical to SEQ ID NO: 233
  CDS (1)..(1674)

SEQ ID NO: 34310 - protein, 557 aa, Schizosaccharomyces pombe; identical to SEQ ID NO: 234

SEQ ID NO: 34311 - DNA, 2407 bp, Schizosaccharomyces pombe; identical to SEQ ID NO: 7860
  CDS (401)..(2128)

SEQ ID NO: 34312 - protein, 575 aa, Schizosaccharomyces pombe; identical to SEQ ID NO: 7861

SEQ ID NO: 34313 - DNA, 1998 bp, Neurospora crassa; identical to SEQ ID NO: 7862
  CDS (1)..(1998)

SEQ ID NO: 34314 - protein, 665 aa, Neurospora crassa; identical to SEQ ID NO: 7863

SEQ ID NO: 34315 - DNA, 1678 bp, Arabidopsis thaliana (mouse-ear cress); identical to SEQ ID NO: 7864
  CDS (40)..(1530)

SEQ ID NO: 34316 - protein, 496 aa, Arabidopsis thaliana (mouse-ear cress); identical to SEQ ID NO: 7865

SEQ ID NO: 34317 - DNA, 2072 bp, Mus sp; identical to SEQ ID NO: 7866
  CDS (21)..(1454)

SEQ ID NO: 34318 - protein, 477 aa, Mus sp; identical to SEQ ID NO: 7867

SEQ ID NO: 34319 - DNA, 2177 bp, Homo sapiens; identical to SEQ ID NO: 7868
  CDS (288)..(2177)

SEQ ID NO: 34320 - protein, 629 aa, Homo sapiens; identical to SEQ ID NO: 7869

SEQ ID NO: 34321 - DNA, 1422 bp, Bacillus megaterium; identical to SEQ ID NO: 7870
  CDS (1)..(1422)

SEQ ID NO: 34322 - protein, 473 aa, Bacillus megaterium; identical to SEQ ID NO: 7871

SEQ ID NO: 34323 - DNA, 1711 bp, Amanita muscaria; identical to SEQ ID NO: 247
  CDS (38)..(1600)

SEQ ID NO: 34324 - protein, 520 aa, Amanita muscaria; identical to SEQ ID NO: 248

SEQ ID NO: 34325 - DNA, 2700 bp, Kluyveromyces lactis; identical to SEQ ID NO: 7874
  CDS (453)..(2603)

SEQ ID NO: 34326 - protein, 716 aa, Kluyveromyces lactis; identical to SEQ ID NO: 7875

SEQ ID NO: 34327 - DNA, 2065 bp, Prunus armeniaca; identical to SEQ ID NO: 7876
  CDS (363)..(1790)

SEQ ID NO: 34328 - protein, 475 aa, Prunus armeniaca; identical to SEQ ID NO: 7877

SEQ ID NO: 34329 - DNA, 1893 bp, Petunia hybrida; identical to SEQ ID NO: 7878
  CDS (253)..(1785)

SEQ ID NO: 34330 - protein, 510 aa, Petunia hybrida; identical to SEQ ID NO: 7879

SEQ ID NO: 34331 - DNA, 1425 bp, Tetragenococcus halophilus; identical to SEQ ID NO: 249
  CDS (1)..(1425)

SEQ ID NO: 34332 - protein, 474 aa, Tetragenococcus halophilus; identical to SEQ ID NO: 250

SEQ ID NO: 34333 - DNA, 2846 bp, Pichia stipitis; identical to SEQ ID NO: 251
  CDS (175)..(1836)

SEQ ID NO: 34334 - protein, 553 aa, Pichia stipitis; identical to SEQ ID NO: 252

SEQ ID NO: 34335 - DNA, 2054 bp, Beta vulgaris subsp; identical to SEQ ID NO: 253
  CDS (94)..(1731)

SEQ ID NO: 34336 - protein, 545 aa, Beta vulgaris subsp; identical to SEQ ID NO: 254

SEQ ID NO: 34337 - DNA, 1708 bp, Taenia solium; identical to SEQ ID NO: 7886
  CDS (46)..(1548)

SEQ ID NO: 34338 - protein, 500 aa, Taenia solium; identical to SEQ ID NO: 7887

SEQ ID NO: 34339 - DNA, 1753 bp, Medicago truncatula; identical to SEQ ID NO: 7888
  CDS (29)..(1585)

SEQ ID NO: 34340 - protein, 518 aa, Medicago truncatula; identical to SEQ ID NO: 7889

SEQ ID NO: 34341 - DNA, 1726 bp, Saccharum hybrid; identical to SEQ ID NO: 7890
  CDS (73)..(1629)

SEQ ID NO: 34342 - protein, 518 aa, Saccharum hybrid; identical to SEQ ID NO: 7891

SEQ ID NO: 34343 - DNA, 1638 bp, Debaryomyces hansenii; identical to SEQ ID NO: 265
  CDS (1)..(1638)

SEQ ID NO: 34344 - protein, 545 aa, Debaryomyces hansenii; identical to SEQ ID NO: 266

SEQ ID NO: 34345 - DNA, 1737 bp, Debaryomyces hansenii; identical to SEQ ID NO: 277
  CDS (1)..(1737)

SEQ ID NO: 34346 - protein, 578 aa, Debaryomyces hansenii; identical to SEQ ID NO: 278

SEQ ID NO: 34347 - DNA, 1584 bp, Debaryomyces hansenii; identical to SEQ ID NO: 279
  CDS (1)..(1584)

SEQ ID NO: 34348 - protein, 527 aa, Debaryomyces hansenii; identical to SEQ ID NO: 280

SEQ ID NO: 34349 - DNA, 1674 bp, Debaryomyces hansenii; identical to SEQ ID NO: 281
  CDS (1)..(1674)

SEQ ID NO: 34350 - protein, 557 aa, Debaryomyces hansenii; identical to SEQ ID NO: 282

SEQ ID NO: 34351 - DNA, 1671 bp, Debaryomyces hansenii; identical to SEQ ID NO: 7900
  CDS (1)..(1671)

SEQ ID NO: 34352 - protein, 556 aa, Debaryomyces hansenii; identical to SEQ ID NO: 7901

SEQ ID NO: 34353 - DNA, 1947 bp, Debaryomyces hansenii; identical to SEQ ID NO: 7902
  CDS (1)..(1947)

SEQ ID NO: 34354 - protein, 648 aa, Debaryomyces hansenii; identical to SEQ ID NO: 7903

SEQ ID NO: 34355 - DNA, 2196 bp, Debaryomyces hansenii; identical to SEQ ID NO: 287
  CDS (1)..(2196)

SEQ ID NO: 34356 - protein, 731 aa, Debaryomyces hansenii; identical to SEQ ID NO: 288

SEQ ID NO: 34357 - DNA, 1659 bp, Debaryomyces hansenii; identical to SEQ ID NO: 291
  CDS (1)..(1659)

SEQ ID NO: 34358 - protein, 552 aa, Debaryomyces hansenii; identical to SEQ ID NO: 292

SEQ ID NO: 34359 - DNA, 1623 bp, Yarrowia lipolytica; identical to SEQ ID NO: 293
  CDS (1)..(1623)

SEQ ID NO: 34360 - protein, 540 aa, Yarrowia lipolytica; identical to SEQ ID NO: 294

SEQ ID NO: 34361 - DNA, 1602 bp, Yarrowia lipolytica; identical to SEQ ID NO: 295
  CDS (1)..(1602)

SEQ ID NO: 34362 - protein, 533 aa, Yarrowia lipolytica; identical to SEQ ID NO: 296

SEQ ID NO: 34363 - DNA, 1980 bp, Yarrowia lipolytica; identical to SEQ ID NO: 7912
  CDS (1)..(1980)

SEQ ID NO: 34364 - protein, 659 aa, Yarrowia lipolytica; identical to SEQ ID NO: 7913

SEQ ID NO: 34365 - DNA, 1548 bp, Yarrowia lipolytica; identical to SEQ ID NO: 305
  CDS (1)..(1548)

SEQ ID NO: 34366 - protein, 515 aa, Yarrowia lipolytica; identical to SEQ ID NO: 306

SEQ ID NO: 34367 - DNA, 1665 bp, Yarrowia lipolytica; identical to SEQ ID NO: 309
  CDS (1)..(1665)

SEQ ID NO: 34368 - protein, 554 aa, Yarrowia lipolytica; identical to SEQ ID NO: 310

SEQ ID NO: 34369 - DNA, 2364 bp, Kluyveromyces lactis; identical to SEQ ID NO: 317
  CDS (1)..(2364)

SEQ ID NO: 34370 - protein, 787 aa, Kluyveromyces lactis; identical to SEQ ID NO: 318

SEQ ID NO: 34371 - DNA, 1710 bp, Kluyveromyces lactis; identical to SEQ ID NO: 7920
  CDS (1)..(1710)

SEQ ID NO: 34372 - protein, 569 aa, Kluyveromyces lactis; identical to SEQ ID NO: 7921

SEQ ID NO: 34373 - DNA, 1530 bp, Equus caballus; identical to SEQ ID NO: 7922
  misc_feature (46)..(46): n is a, c, g, or t
  CDS (1)..(1530)

SEQ ID NO: 34374 - protein, 509 aa, Equus caballus; identical to SEQ ID NO: 7923
  misc_feature (16)..(16): Xaa can be any naturally occuring amino acid

SEQ ID NO: 34375 - DNA, 1850 bp, Oryza sativa; identical to SEQ ID NO: 7924
  CDS (99)..(1634)

SEQ ID NO: 34376 - protein, 511 aa, Oryza sativa; identical to SEQ ID NO: 7925

SEQ ID NO: 34377 - DNA, 1644 bp, Candida glabrata; identical to SEQ ID NO: 7926
  CDS (1)..(1644)

SEQ ID NO: 34378 - protein, 547 aa, Candida glabrata; identical to SEQ ID NO: 7927

SEQ ID NO: 34379 - DNA, 2571 bp, Candida glabrata; identical to SEQ ID NO: 329
  CDS (1)..(2571)

SEQ ID NO: 34380 - protein, 856 aa, Candida glabrata; identical to SEQ ID NO: 330

SEQ ID NO: 34381 - DNA, 1713 bp, Candida glabrata; identical to SEQ ID NO: 7930
  CDS (1)..(1713)

SEQ ID NO: 34382 - protein, 570 aa, Candida glabrata; identical to SEQ ID NO: 7931

SEQ ID NO: 34383 - DNA, 2289 bp, Candida glabrata; identical to SEQ ID NO: 331
  CDS (1)..(2289)

SEQ ID NO: 34384 - protein, 762 aa, Candida glabrata; identical to SEQ ID NO: 332

SEQ ID NO: 34385 - DNA, 1695 bp, Candida glabrata; identical to SEQ ID NO: 335
  CDS (1)..(1695)

SEQ ID NO: 34386 - protein, 564 aa, Candida glabrata; identical to SEQ ID NO: 336

SEQ ID NO: 34387 - DNA, 1692 bp, Candida glabrata; identical to SEQ ID NO: 341
  CDS (1)..(1692)

SEQ ID NO: 34388 - protein, 563 aa, Candida glabrata; identical to SEQ ID NO: 342

SEQ ID NO: 34389 - DNA, 1707 bp, Candida glabrata; identical to SEQ ID NO: 343
  CDS (1)..(1707)

SEQ ID NO: 34390 - protein, 568 aa, Candida glabrata; identical to SEQ ID NO: 344

SEQ ID NO: 34391 - DNA, 1671 bp, Candida glabrata; identical to SEQ ID NO: 345
  CDS (1)..(1671)

SEQ ID NO: 34392 - protein, 556 aa, Candida glabrata; identical to SEQ ID NO: 346

SEQ ID NO: 34393 - DNA, 1754 bp, Oryza sativa; identical to SEQ ID NO: 7942
  CDS (115)..(1677)

SEQ ID NO: 34394 - protein, 520 aa, Oryza sativa; identical to SEQ ID NO: 7943

SEQ ID NO: 34395 - DNA, 2196 bp, Oryza sativa; identical to SEQ ID NO: 7944
  CDS (301)..(1746)

SEQ ID NO: 34396 - protein, 481 aa, Oryza sativa; identical to SEQ ID NO: 7945

SEQ ID NO: 34397 - DNA, 2048 bp, Equus caballus; identical to SEQ ID NO: 355
  misc_feature (1853)..(1853): n is a, c, g, or t
  CDS (178)..(1752)

SEQ ID NO: 34398 - protein, 524 aa, Equus caballus; identical to SEQ ID NO: 356

SEQ ID NO: 34399 - DNA, 1443 bp, Photobacterium profundum; identical to SEQ ID NO: 7948
  CDS (1)..(1443)

SEQ ID NO: 34400 - protein, 480 aa, Photobacterium profundum; identical to SEQ ID NO: 7949

SEQ ID NO: 34401 - DNA, 2181 bp, Drosophila melanogaster; identical to SEQ ID NO: 7950
  CDS (549)..(2015)

SEQ ID NO: 34402 - protein, 488 aa, Drosophila melanogaster; identical to SEQ ID NO: 7951

SEQ ID NO: 34403 - DNA, 2536 bp, Pichia angusta; identical to SEQ ID NO: 7952
  CDS (578)..(2203)

SEQ ID NO: 34404 - protein, 541 aa, Pichia angusta; identical to SEQ ID NO: 7953

SEQ ID NO: 34405 - DNA, 1544 bp, Bos taurus; identical to SEQ ID NO: 7954
  CDS (12)..(1541)

SEQ ID NO: 34406 - protein, 509 aa, Bos taurus; identical to SEQ ID NO: 7955

SEQ ID NO: 34407 - DNA, 1590 bp, Oryza sativa; identical to SEQ ID NO: 7956
  CDS (1)..(1590)

SEQ ID NO: 34408 - protein, 529 aa, Oryza sativa; identical to SEQ ID NO: 7957

SEQ ID NO: 34409 - DNA, 1548 bp, Oryza sativa; identical to SEQ ID NO: 7958
  CDS (1)..(1548)

SEQ ID NO: 34410 - protein, 515 aa, Oryza sativa; identical to SEQ ID NO: 7959

SEQ ID NO: 34411 - DNA, 2355 bp, Oryctolagus cuniculus; identical to SEQ ID NO: 7960
  CDS (1)..(1530)

SEQ ID NO: 34412 - protein, 509 aa, Oryctolagus cuniculus; identical to SEQ ID NO: 7961

SEQ ID NO: 34413 - DNA, 2073 bp, Bos taurus; identical to SEQ ID NO: 7962
  CDS (96)..(1532)

SEQ ID NO: 34414 - protein, 478 aa, Bos taurus; identical to SEQ ID NO: 7963

SEQ ID NO: 34415 - DNA, 1560 bp, Oryza sativa; identical to SEQ ID NO: 7964
  CDS (1)..(1560)

SEQ ID NO: 34416 - protein, 519 aa, Oryza sativa; identical to SEQ ID NO: 7965

SEQ ID NO: 34417 - DNA, 1891 bp, Plantago major; identical to SEQ ID NO: 369
  CDS (146)..(1738)

SEQ ID NO: 34418 - protein, 530 aa, Plantago major; identical to SEQ ID NO: 370

SEQ ID NO: 34419 - DNA, 1987 bp, Plantago major; identical to SEQ ID NO: 371
  CDS (116)..(1705)

SEQ ID NO: 34420 - protein, 529 aa, Plantago major; identical to SEQ ID NO: 372

SEQ ID NO: 34421 - DNA, 1407 bp, Bacillus cereus; identical to SEQ ID NO: 7970
  CDS (1)..(1407)

SEQ ID NO: 34422 - protein, 468 aa, Bacillus cereus; identical to SEQ ID NO: 7971

SEQ ID NO: 34423 - DNA, 1431 bp, Mycobacterium paratuberculosis; identical to SEQ ID NO: 7972
  CDS (1)..(1431)

SEQ ID NO: 34424 - protein, 476 aa, Mycobacterium paratuberculosis; identical to SEQ ID NO: 7973

SEQ ID NO: 34425 - DNA, 1716 bp, Ashbya gossypii; identical to SEQ ID NO: 7974
  CDS (1)..(1716)

SEQ ID NO: 34426 - protein, 571 aa, Ashbya gossypii; identical to SEQ ID NO: 7975

SEQ ID NO: 34427 - DNA, 1608 bp, Ashbya gossypii; identical to SEQ ID NO: 375
  CDS (1)..(1608)

SEQ ID NO: 34428 - protein, 535 aa, Ashbya gossypii; identical to SEQ ID NO: 376

SEQ ID NO: 34429 - DNA, 1641 bp, Ashbya gossypii; identical to SEQ ID NO: 377
  CDS (1)..(1641)

SEQ ID NO: 34430 - protein, 546 aa, Ashbya gossypii; identical to SEQ ID NO: 378

SEQ ID NO: 34431 - DNA, 1620 bp, Ashbya gossypii; identical to SEQ ID NO: 379
  CDS (1)..(1620)

SEQ ID NO: 34432 - protein, 539 aa, Ashbya gossypii; identical to SEQ ID NO: 380

SEQ ID NO: 34433 - DNA, 1644 bp, Ashbya gossypii; identical to SEQ ID NO: 381
  CDS (1)..(1644)

SEQ ID NO: 34434 - protein, 547 aa, Ashbya gossypii; identical to SEQ ID NO: 382

SEQ ID NO: 34435 - DNA, 1995 bp, Ashbya gossypii; identical to SEQ ID NO: 383
  CDS (1)..(1995)

SEQ ID NO: 34436 - protein, 664 aa, Ashbya gossypii; identical to SEQ ID NO: 384

SEQ ID NO: 34437 - DNA, 1476 bp, Shigella flexneri; identical to SEQ ID NO: 7986
  CDS (1)..(1476)

SEQ ID NO: 34438 - protein, 491 aa, Shigella flexneri; identical to SEQ ID NO: 7987

SEQ ID NO: 34439 - DNA, 1557 bp, Oryza sativa; identical to SEQ ID NO: 7988
  CDS (1)..(1557)

SEQ ID NO: 34440 - protein, 518 aa, Oryza sativa; identical to SEQ ID NO: 7989

SEQ ID NO: 34441 - DNA, 1774 bp, Anopheles gambiae str; identical to SEQ ID NO: 7990
  CDS (94)..(1542)

SEQ ID NO: 34442 - protein, 482 aa, Anopheles gambiae str; identical to SEQ ID NO: 7991

SEQ ID NO: 34443 - DNA, 1785 bp, Neurospora crassa; identical to SEQ ID NO: 7992
  CDS (1)..(1785)

SEQ ID NO: 34444 - protein, 594 aa, Neurospora crassa; identical to SEQ ID NO: 7993

SEQ ID NO: 34445 - DNA, 1620 bp, Neurospora crassa; identical to SEQ ID NO: 387
  CDS (1)..(1620)

SEQ ID NO: 34446 - protein, 539 aa, Neurospora crassa; identical to SEQ ID NO: 388

SEQ ID NO: 34447 - DNA, 1752 bp, Neurospora crassa; identical to SEQ ID NO: 401
  CDS (1)..(1752)

SEQ ID NO: 34448 - protein, 583 aa, Neurospora crassa; identical to SEQ ID NO: 402

SEQ ID NO: 34449 - DNA, 1464 bp, Neurospora crassa; identical to SEQ ID NO: 7998
  CDS (1)..(1464)

SEQ ID NO: 34450 - protein, 487 aa, Neurospora crassa; identical to SEQ ID NO: 7999

SEQ ID NO: 34451 - DNA, 1509 bp, Mycobacterium bovis; identical to SEQ ID NO: 425
  CDS (1)..(1509)

SEQ ID NO: 34452 - protein, 502 aa, Mycobacterium bovis; identical to SEQ ID NO: 426

SEQ ID NO: 34453 - DNA, 1455 bp, Rhodopirellula baltica; identical to SEQ ID NO: 8002
  CDS (1)..(1455)

SEQ ID NO: 34454 - protein, 484 aa, Rhodopirellula baltica; identical to SEQ ID NO: 8003

SEQ ID NO: 34455 - DNA, 1847 bp, Oryza sativa; identical to SEQ ID NO: 8004
  CDS (94)..(1647)

SEQ ID NO: 34456 - protein, 517 aa, Oryza sativa; identical to SEQ ID NO: 8005

SEQ ID NO: 34457 - DNA, 2251 bp, Oryza sativa; identical to SEQ ID NO: 427
  CDS (152)..(1723)

SEQ ID NO: 34458 - protein, 523 aa, Oryza sativa; identical to SEQ ID NO: 428

SEQ ID NO: 34459 - DNA, 1894 bp, Glycine max; identical to SEQ ID NO: 8008
  CDS (163)..(1734)

SEQ ID NO: 34460 - protein, 523 aa, Glycine max; identical to SEQ ID NO: 8009

SEQ ID NO: 34461 - DNA, 1648 bp, Orobanche ramosa; identical to SEQ ID NO: 429
  CDS (46)..(1605)

SEQ ID NO: 34462 - protein, 519 aa, Orobanche ramosa; identical to SEQ ID NO: 430

SEQ ID NO: 34463 - DNA, 1975 bp, Oryza sativa; identical to SEQ ID NO: 8012
  CDS (96)..(1604)

SEQ ID NO: 34464 - protein, 502 aa, Oryza sativa; identical to SEQ ID NO: 8013

SEQ ID NO: 34465 - DNA, 2458 bp, Oryza sativa; identical to SEQ ID NO: 8014
  CDS (510)..(2255)

SEQ ID NO: 34466 - protein, 581 aa, Oryza sativa; identical to SEQ ID NO: 8015

SEQ ID NO: 34467 - DNA, 2574 bp, Oryza sativa; identical to SEQ ID NO: 435
  CDS (569)..(2089)

SEQ ID NO: 34468 - protein, 506 aa, Oryza sativa; identical to SEQ ID NO: 436

SEQ ID NO: 34469 - DNA, 1413 bp, Streptomyces avermitilis; identical to SEQ ID NO: 8018
  CDS (1)..(1413)

SEQ ID NO: 34470 - protein, 470 aa, Streptomyces avermitilis; identical to SEQ ID NO: 8019

SEQ ID NO: 34471 - DNA, 1230 bp, Coxiella burnetii; identical to SEQ ID NO: 8020
  CDS (1)..(1230)

SEQ ID NO: 34472 - protein, 409 aa, Coxiella burnetii; identical to SEQ ID NO: 8021

SEQ ID NO: 34473 - DNA, 1407 bp, Shigella flexneri; identical to SEQ ID NO: 8022
  CDS (1)..(1407)

SEQ ID NO: 34474 - protein, 468 aa, Shigella flexneri; identical to SEQ ID NO: 8023

SEQ ID NO: 34475 - DNA, 1927 bp, Prunus cerasus; identical to SEQ ID NO: 441
  CDS (56)..(1585)

SEQ ID NO: 34476 - protein, 509 aa, Prunus cerasus; identical to SEQ ID NO: 442

SEQ ID NO: 34477 - DNA, 1838 bp, Medicago truncatula; identical to SEQ ID NO: 8026
  CDS (112)..(1650)

SEQ ID NO: 34478 - protein, 512 aa, Medicago truncatula; identical to SEQ ID NO: 8027

SEQ ID NO: 34479 - DNA, 1764 bp, Datisca glomerata; identical to SEQ ID NO: 8028
  CDS (79)..(1650)

SEQ ID NO: 34480 - protein, 523 aa, Datisca glomerata; identical to SEQ ID NO: 8029

SEQ ID NO: 34481 - DNA, 2032 bp, Prunus cerasus; identical to SEQ ID NO: 443
  CDS (74)..(1690)

SEQ ID NO: 34482 - protein, 538 aa, Prunus cerasus; identical to SEQ ID NO: 444

SEQ ID NO: 34483 - DNA, 1784 bp, Malus domestica; identical to SEQ ID NO: 8032
  CDS (116)..(1561)

SEQ ID NO: 34484 - protein, 481 aa, Malus domestica; identical to SEQ ID NO: 8033

SEQ ID NO: 34485 - DNA, 2012 bp, Malus domestica; identical to SEQ ID NO: 445
  CDS (104)..(1579)

SEQ ID NO: 34486 - protein, 491 aa, Malus domestica; identical to SEQ ID NO: 446

SEQ ID NO: 34487 - DNA, 2178 bp, Mesembryanthemum crystallinum; identical to SEQ ID NO: 8036
  CDS (512)..(2008)

SEQ ID NO: 34488 - protein, 498 aa, Mesembryanthemum crystallinum; identical to SEQ ID NO: 8037

SEQ ID NO: 34489 - DNA, 1569 bp, Oryza sativa; identical to SEQ ID NO: 8038
  CDS (1)..(1569)

SEQ ID NO: 34490 - protein, 522 aa, Oryza sativa; identical to SEQ ID NO: 8039

SEQ ID NO: 34491 - DNA, 1724 bp, Oryza sativa; identical to SEQ ID NO: 8040
  CDS (1)..(1578)

SEQ ID NO: 34492 - protein, 525 aa, Oryza sativa; identical to SEQ ID NO: 8041

SEQ ID NO: 34493 - DNA, 1422 bp, Pseudomonas syringae; identical to SEQ ID NO: 8042
  CDS (1)..(1422)

SEQ ID NO: 34494 - protein, 473 aa, Pseudomonas syringae; identical to SEQ ID NO: 8043

SEQ ID NO: 34495 - DNA, 1467 bp, Lactobacillus plantarum; identical to SEQ ID NO: 8044
  CDS (1)..(1467)

SEQ ID NO: 34496 - protein, 488 aa, Lactobacillus plantarum; identical to SEQ ID NO: 8045

SEQ ID NO: 34497 - DNA, 1413 bp, Lactobacillus plantarum; identical to SEQ ID NO: 8046
  CDS (1)..(1413)

SEQ ID NO: 34498 - protein, 470 aa, Lactobacillus plantarum; identical to SEQ ID NO: 8047

SEQ ID NO: 34499 - DNA, 1401 bp, Lactobacillus plantarum; identical to SEQ ID NO: 8048
  CDS (1)..(1401)

SEQ ID NO: 34500 - protein, 466 aa, Lactobacillus plantarum; identical to SEQ ID NO: 8049

SEQ ID NO: 34501 - DNA, 1383 bp, Bacteroides thetaiotaomicron; identical to SEQ ID NO: 8050
  CDS (1)..(1383)

SEQ ID NO: 34502 - protein, 460 aa, Bacteroides thetaiotaomicron; identical to SEQ ID NO: 8051

SEQ ID NO: 34503 - DNA, 1407 bp, Bacteroides thetaiotaomicron; identical to SEQ ID NO: 453
  CDS (1)..(1407)

SEQ ID NO: 34504 - protein, 468 aa, Bacteroides thetaiotaomicron; identical to SEQ ID NO: 454

SEQ ID NO: 34505 - DNA, 1455 bp, Bacteroides thetaiotaomicron; identical to SEQ ID NO: 8054
  CDS (1)..(1455)

SEQ ID NO: 34506 - protein, 484 aa, Bacteroides thetaiotaomicron; identical to SEQ ID NO: 8055

SEQ ID NO: 34507 - DNA, 1407 bp, Bacteroides thetaiotaomicron; identical to SEQ ID NO: 455
  CDS (1)..(1407)

SEQ ID NO: 34508 - protein, 468 aa, Bacteroides thetaiotaomicron; identical to SEQ ID NO: 456

SEQ ID NO: 34509 - DNA, 1404 bp, Staphylococcus epidermidis; identical to SEQ ID NO: 457
  CDS (1)..(1404)

SEQ ID NO: 34510 - protein, 467 aa, Staphylococcus epidermidis; identical to SEQ ID NO: 458

SEQ ID NO: 34511 - DNA, 1392 bp, Oceanobacillus iheyensis; identical to SEQ ID NO: 8060
  CDS (1)..(1392)

SEQ ID NO: 34512 - protein, 463 aa, Oceanobacillus iheyensis; identical to SEQ ID NO: 8061

SEQ ID NO: 34513 - DNA, 1548 bp, Escherichia coli O6; identical to SEQ ID NO: 8062
  CDS (1)..(1548)

SEQ ID NO: 34514 - protein, 515 aa, Escherichia coli O6; identical to SEQ ID NO: 8063

SEQ ID NO: 34515 - DNA, 1554 bp, Bifidobacterium longum; identical to SEQ ID NO: 8064
  CDS (1)..(1554)

SEQ ID NO: 34516 - protein, 517 aa, Bifidobacterium longum; identical to SEQ ID NO: 8065

SEQ ID NO: 34517 - DNA, 1515 bp, Arabidopsis thaliana; identical to SEQ ID NO: 8066
  CDS (1)..(1515)

SEQ ID NO: 34518 - protein, 504 aa, Arabidopsis thaliana; identical to SEQ ID NO: 8067

SEQ ID NO: 34519 - DNA, 1545 bp, Aspergillus niger; identical to SEQ ID NO: 459
  CDS (1)..(1545)

SEQ ID NO: 34520 - protein, 514 aa, Aspergillus niger; identical to SEQ ID NO: 460

SEQ ID NO: 34521 - DNA, 1752 bp, Aspergillus niger; identical to SEQ ID NO: 463
  CDS (1)..(1752)

SEQ ID NO: 34522 - protein, 583 aa, Aspergillus niger; identical to SEQ ID NO: 464

SEQ ID NO: 34523 - DNA, 1584 bp, Emericella nidulans; identical to SEQ ID NO: 467
  CDS (1)..(1584)

SEQ ID NO: 34524 - protein, 527 aa, Emericella nidulans; identical to SEQ ID NO: 468

SEQ ID NO: 34525 - DNA, 1512 bp, Arabidopsis thaliana; identical to SEQ ID NO: 8074
  CDS (1)..(1512)

SEQ ID NO: 34526 - protein, 503 aa, Arabidopsis thaliana; identical to SEQ ID NO: 472

SEQ ID NO: 34527 - DNA, 1837 bp, Arabidopsis thaliana; identical to SEQ ID NO: 8076
  CDS (131)..(1699)

SEQ ID NO: 34528 - protein, 522 aa, Arabidopsis thaliana; identical to SEQ ID NO: 8077

SEQ ID NO: 34529 - DNA, 1536 bp, Oryza sativa; identical to SEQ ID NO: 8078
  CDS (1)..(1536)

SEQ ID NO: 34530 - protein, 511 aa, Oryza sativa; identical to SEQ ID NO: 8079

SEQ ID NO: 34531 - DNA, 1673 bp, Drosophila melanogaster; identical to SEQ ID NO: 8080
  CDS (88)..(1554)

SEQ ID NO: 34532 - protein, 488 aa, Drosophila melanogaster; identical to SEQ ID NO: 8081

SEQ ID NO: 34533 - DNA, 2234 bp, Kluyveromyces lactis; identical to SEQ ID NO: 473
  CDS (402)..(2102)

SEQ ID NO: 34534 - protein, 566 aa, Kluyveromyces lactis; identical to SEQ ID NO: 474

SEQ ID NO: 34535 - DNA, 1476 bp, Corynebacterium glutamicum; identical to SEQ ID NO: 8084
  CDS (1)..(1476)

SEQ ID NO: 34536 - protein, 491 aa, Corynebacterium glutamicum; identical to SEQ ID NO: 476

SEQ ID NO: 34537 - DNA, 1446 bp, Xanthomonas campestris; identical to SEQ ID NO: 8086
  CDS (1)..(1446)

SEQ ID NO: 34538 - protein, 481 aa, Xanthomonas campestris; identical to SEQ ID NO: 8087

SEQ ID NO: 34539 - DNA, 1428 bp, Xanthomonas axonopodis; identical to SEQ ID NO: 8088
  CDS (1)..(1428)

SEQ ID NO: 34540 - protein, 475 aa, Xanthomonas axonopodis; identical to SEQ ID NO: 8089

SEQ ID NO: 34541 - DNA, 1778 bp, Apium graveolens var; identical to SEQ ID NO: 8090
  CDS (79)..(1650)

SEQ ID NO: 34542 - protein, 523 aa, Apium graveolens var; identical to SEQ ID NO: 8091

SEQ ID NO: 34543 - DNA, 2118 bp, Homo sapiens; identical to SEQ ID NO: 8092
  CDS (110)..(1603)

SEQ ID NO: 34544 - protein, 497 aa, Homo sapiens; identical to SEQ ID NO: 8093

SEQ ID NO: 34545 - DNA, 1449 bp, Arabidopsis thaliana; identical to SEQ ID NO: 8094
  CDS (1)..(1449)

SEQ ID NO: 34546 - protein, 482 aa, Arabidopsis thaliana; identical to SEQ ID NO: 482

SEQ ID NO: 34547 - DNA, 1561 bp, Arabidopsis thaliana; identical to SEQ ID NO: 8096
  CDS (1)..(1530)

SEQ ID NO: 34548 - protein, 509 aa, Arabidopsis thaliana; identical to SEQ ID NO: 8097

SEQ ID NO: 34549 - DNA, 1420 bp, Arabidopsis thaliana; identical to SEQ ID NO: 8098
  CDS (1)..(1389)

SEQ ID NO: 34550 - protein, 462 aa, Arabidopsis thaliana; identical to SEQ ID NO: 8099

SEQ ID NO: 34551 - DNA, 1998 bp, Oryza sativa; identical to SEQ ID NO: 8100
  CDS (197)..(1717)

SEQ ID NO: 34552 - protein, 506 aa, Oryza sativa; identical to SEQ ID NO: 8101

SEQ ID NO: 34553 - DNA, 2145 bp, Homo sapiens; identical to SEQ ID NO: 8102
  CDS (46)..(1479)

SEQ ID NO: 34554 - protein, 477 aa, Homo sapiens; identical to SEQ ID NO: 8103

SEQ ID NO: 34555 - DNA, 1419 bp, Salmonella typhimurium; identical to SEQ ID NO: 8104
  CDS (1)..(1419)

SEQ ID NO: 34556 - protein, 472 aa, Salmonella typhimurium; identical to SEQ ID NO: 8105

SEQ ID NO: 34557 - DNA, 2039 bp, Olea europaea; identical to SEQ ID NO: 8106
  CDS (133)..(1767)

SEQ ID NO: 34558 - protein, 544 aa, Olea europaea; identical to SEQ ID NO: 8107

SEQ ID NO: 34559 - DNA, 1521 bp, Arabidopsis thaliana; identical to SEQ ID NO: 8108
  CDS (1)..(1521)

SEQ ID NO: 34560 - protein, 506 aa, Arabidopsis thaliana; identical to SEQ ID NO: 8109

SEQ ID NO: 34561 - DNA, 1557 bp, Arabidopsis thaliana; identical to SEQ ID NO: 8110
  CDS (1)..(1467)

SEQ ID NO: 34562 - protein, 488 aa, Arabidopsis thaliana; identical to SEQ ID NO: 8111

SEQ ID NO: 34563 - DNA, 1876 bp, Arabidopsis thaliana; identical to SEQ ID NO: 8112
  CDS (87)..(1727)

SEQ ID NO: 34564 - protein, 546 aa, Arabidopsis thaliana; identical to SEQ ID NO: 8113

SEQ ID NO: 34565 - DNA, 1377 bp, Arabidopsis thaliana; identical to SEQ ID NO: 8114
  CDS (1)..(1377)

SEQ ID NO: 34566 - protein, 458 aa, Arabidopsis thaliana; identical to SEQ ID NO: 8115

SEQ ID NO: 34567 - DNA, 1608 bp, Oryza sativa; identical to SEQ ID NO: 8116
  CDS (1)..(1608)

SEQ ID NO: 34568 - protein, 535 aa, Oryza sativa; identical to SEQ ID NO: 8117

SEQ ID NO: 34569 - DNA, 1606 bp, Arabidopsis thaliana; identical to SEQ ID NO: 8118
  CDS (18)..(1454)

SEQ ID NO: 34570 - protein, 478 aa, Arabidopsis thaliana; identical to SEQ ID NO: 8119

SEQ ID NO: 34571 - DNA, 1787 bp, Arabidopsis thaliana; identical to SEQ ID NO: 8120
  CDS (100)..(1524)

SEQ ID NO: 34572 - protein, 474 aa, Arabidopsis thaliana; identical to SEQ ID NO: 8121

SEQ ID NO: 34573 - DNA, 1539 bp, Oryza sativa; identical to SEQ ID NO: 8122
  CDS (1)..(1539)

SEQ ID NO: 34574 - protein, 512 aa, Oryza sativa; identical to SEQ ID NO: 8123

SEQ ID NO: 34575 - DNA, 1702 bp, Oryza sativa; identical to SEQ ID NO: 8124
  CDS (87)..(1628)

SEQ ID NO: 34576 - protein, 513 aa, Oryza sativa; identical to SEQ ID NO: 8125

SEQ ID NO: 34577 - DNA, 1569 bp, Uromyces fabae; identical to SEQ ID NO: 487
  CDS (1)..(1569)

SEQ ID NO: 34578 - protein, 522 aa, Uromyces fabae; identical to SEQ ID NO: 488

SEQ ID NO: 34579 - DNA, 1380 bp, Sulfolobus tokodaii; identical to SEQ ID NO: 8128
  CDS (1)..(1380)

SEQ ID NO: 34580 - protein, 459 aa, Sulfolobus tokodaii; identical to SEQ ID NO: 8129

SEQ ID NO: 34581 - DNA, 1503 bp, Thermoplasma volcanium; identical to SEQ ID NO: 8130
  CDS (1)..(1503)

SEQ ID NO: 34582 - protein, 500 aa, Thermoplasma volcanium; identical to SEQ ID NO: 8131

SEQ ID NO: 34583 - DNA, 1440 bp, Zymomonas mobilis; identical to SEQ ID NO: 493
  CDS (1)..(1440)

SEQ ID NO: 34584 - protein, 479 aa, Zymomonas mobilis; identical to SEQ ID NO: 494

SEQ ID NO: 34585 - DNA, 1865 bp, Arabidopsis thaliana; identical to SEQ ID NO: 8134
  CDS (66)..(1742)

SEQ ID NO: 34586 - protein, 558 aa, Arabidopsis thaliana; identical to SEQ ID NO: 8135

SEQ ID NO: 34587 - DNA, 1545 bp, Arabidopsis thaliana; identical to SEQ ID NO: 8136
  CDS (1)..(1545)

SEQ ID NO: 34588 - protein, 514 aa, Arabidopsis thaliana; identical to SEQ ID NO: 8137

SEQ ID NO: 34589 - DNA, 1766 bp, Apium graveolens var; identical to SEQ ID NO: 495
  CDS (17)..(1558)

SEQ ID NO: 34590 - protein, 513 aa, Apium graveolens var; identical to SEQ ID NO: 496

SEQ ID NO: 34591 - DNA, 2041 bp, Mesembryanthemum crystallinum; identical to SEQ ID NO: 497
  CDS (118)..(1785)

SEQ ID NO: 34592 - protein, 555 aa, Mesembryanthemum crystallinum; identical to SEQ ID NO: 498

SEQ ID NO: 34593 - DNA, 1961 bp, Saccharomyces pastorianus; identical to SEQ ID NO: 8142
  CDS (192)..(1904)

SEQ ID NO: 34594 - protein, 570 aa, Saccharomyces pastorianus; identical to SEQ ID NO: 8143

SEQ ID NO: 34595 - DNA, 1458 bp, Thermoplasma acidophilum; identical to SEQ ID NO: 8144
  CDS (1)..(1458)

SEQ ID NO: 34596 - protein, 485 aa, Thermoplasma acidophilum; identical to SEQ ID NO: 8145

SEQ ID NO: 34597 - DNA, 1413 bp, Lactobacillus casei; identical to SEQ ID NO: 8146
  CDS (1)..(1413)

SEQ ID NO: 34598 - protein, 470 aa, Lactobacillus casei; identical to SEQ ID NO: 8147

SEQ ID NO: 34599 - DNA, 1699 bp, Lycopersicon esculentum; identical to SEQ ID NO: 8148
  CDS (24)..(1466)

SEQ ID NO: 34600 - protein, 480 aa, Lycopersicon esculentum; identical to SEQ ID NO: 8149

SEQ ID NO: 34601 - DNA, 2013 bp, Mesembryanthemum crystallinum; identical to SEQ ID NO: 8150
  CDS (131)..(1876)

SEQ ID NO: 34602 - protein, 581 aa, Mesembryanthemum crystallinum; identical to SEQ ID NO: 8151

SEQ ID NO: 34603 - DNA, 2422 bp, Mesembryanthemum crystallinum; identical to SEQ ID NO: 8152
  CDS (386)..(2131)

SEQ ID NO: 34604 - protein, 581 aa, Mesembryanthemum crystallinum; identical to SEQ ID NO: 8153

SEQ ID NO: 34605 - DNA, 1864 bp, Spinacia oleracea; identical to SEQ ID NO: 501
  CDS (61)..(1716)

SEQ ID NO: 34606 - protein, 551 aa, Spinacia oleracea; identical to SEQ ID NO: 502

SEQ ID NO: 34607 - DNA, 1822 bp, Arabidopsis thaliana; identical to SEQ ID NO: 503
  CDS (65)..(1684)

SEQ ID NO: 34608 - protein, 539 aa, Arabidopsis thaliana; identical to SEQ ID NO: 504

SEQ ID NO: 34609 - DNA, 1545 bp, Arabidopsis thaliana; identical to SEQ ID NO: 8158
  CDS (1)..(1545)

SEQ ID NO: 34610 - protein, 514 aa, Arabidopsis thaliana; identical to SEQ ID NO: 8159

SEQ ID NO: 34611 - DNA, 1624 bp, Arabidopsis thaliana; identical to SEQ ID NO: 8160
  CDS (73)..(1464)

SEQ ID NO: 34612 - protein, 463 aa, Arabidopsis thaliana; identical to SEQ ID NO: 8161

SEQ ID NO: 34613 - DNA, 1578 bp, Arabidopsis thaliana; identical to SEQ ID NO: 8162
  CDS (1)..(1434)

SEQ ID NO: 34614 - protein, 477 aa, Arabidopsis thaliana; identical to SEQ ID NO: 8163

SEQ ID NO: 34615 - DNA, 1524 bp, Arabidopsis thaliana; identical to SEQ ID NO: 8164
  CDS (1)..(1524)

SEQ ID NO: 34616 - protein, 507 aa, Arabidopsis thaliana; identical to SEQ ID NO: 8165

SEQ ID NO: 34617 - DNA, 1976 bp, Lycopersicon esculentum; identical to SEQ ID NO: 8166
  CDS (87)..(1658)

SEQ ID NO: 34618 - protein, 523 aa, Lycopersicon esculentum; identical to SEQ ID NO: 8167

SEQ ID NO: 34619 - DNA, 1653 bp, Pichia stipitis; identical to SEQ ID NO: 505
  CDS (1)..(1653)

SEQ ID NO: 34620 - protein, 550 aa, Pichia stipitis; identical to SEQ ID NO: 506

SEQ ID NO: 34621 - DNA, 2169 bp, Drosophila melanogaster; identical to SEQ ID NO: 8170
  CDS (579)..(2024)

SEQ ID NO: 34622 - protein, 481 aa, Drosophila melanogaster; identical to SEQ ID NO: 8171

SEQ ID NO: 34623 - DNA, 1587 bp, Drosophila melanogaster; identical to SEQ ID NO: 8172
  CDS (47)..(1444)

SEQ ID NO: 34624 - protein, 465 aa, Drosophila melanogaster; identical to SEQ ID NO: 8173

SEQ ID NO: 34625 - DNA, 2514 bp, Drosophila melanogaster; identical to SEQ ID NO: 8174
  CDS (463)..(2082)

SEQ ID NO: 34626 - protein, 539 aa, Drosophila melanogaster; identical to SEQ ID NO: 8175

SEQ ID NO: 34627 - DNA, 1560 bp, Vitis vinifera; identical to SEQ ID NO: 8176
  CDS (1)..(1560)

SEQ ID NO: 34628 - protein, 519 aa, Vitis vinifera; identical to SEQ ID NO: 8177

SEQ ID NO: 34629 - DNA, 1686 bp, Arabidopsis thaliana; identical to SEQ ID NO: 8178
  CDS (130)..(1521)

SEQ ID NO: 34630 - protein, 463 aa, Arabidopsis thaliana; identical to SEQ ID NO: 8179

SEQ ID NO: 34631 - DNA, 2468 bp, Mus musculus; identical to SEQ ID NO: 515
  CDS (34)..(1605)

SEQ ID NO: 34632 - protein, 523 aa, Mus musculus; identical to SEQ ID NO: 516

SEQ ID NO: 34633 - DNA, 2355 bp, Canis familiaris; identical to SEQ ID NO: 517
  CDS (201)..(1688)

SEQ ID NO: 34634 - protein, 495 aa, Canis familiaris; identical to SEQ ID NO: 518

SEQ ID NO: 34635 - DNA, 1485 bp, Ovis aries; identical to SEQ ID NO: 519
  CDS (1)..(1485)

SEQ ID NO: 34636 - protein, 494 aa, Ovis aries; identical to SEQ ID NO: 520

SEQ ID NO: 34637 - DNA, 2425 bp, Kluyveromyces lactis; identical to SEQ ID NO: 523
  CDS (539)..(2194)

SEQ ID NO: 34638 - protein, 551 aa, Kluyveromyces lactis; identical to SEQ ID NO: 524

SEQ ID NO: 34639 - DNA, 2353 bp, Chlorella kessleri; identical to SEQ ID NO: 8188
  CDS (57)..(1679)

SEQ ID NO: 34640 - protein, 540 aa, Chlorella kessleri; identical to SEQ ID NO: 8189

SEQ ID NO: 34641 - DNA, 1731 bp, Saccharomyces cerevisiae; identical to SEQ ID NO: 8190
  CDS (1)..(1731)

SEQ ID NO: 34642 - protein, 576 aa, Saccharomyces cerevisiae; identical to SEQ ID NO: 526

SEQ ID NO: 34643 - DNA, 3261 bp, Homo sapiens; identical to SEQ ID NO: 8192
  CDS (109)..(1998): Xaa of translated CDS can stand for any naturally occuring amino acid which can be translated from respective CDS-codon

SEQ ID NO: 34644 - protein, 629 aa, Homo sapiens; identical to SEQ ID NO: 8193
  misc_feature (227)..(227): Xaa can be any naturally occuring amino acid
  misc_feature (436)..(436): Xaa can be any naturally occuring amino acid

SEQ ID NO: 34645 - DNA, 2504 bp, Rattus norvegicus; identical to SEQ ID NO: 8194
  CDS (145)..(2001)

SEQ ID NO: 34646 - protein, 618 aa, Rattus norvegicus; identical to SEQ ID NO: 8195

SEQ ID NO: 34647 - DNA, 3642 bp, Saccharomyces cerevisiae; identical to SEQ ID NO: 7728
  CDS (749)..(3205)

SEQ ID NO: 34648 - protein, 818 aa, Saccharomyces cerevisiae; identical to SEQ ID NO: 8197

SEQ ID NO: 34649 - DNA, 1374 bp, Lactobacillus brevis; identical to SEQ ID NO: 8198
  CDS (1)..(1374)

SEQ ID NO: 34650 - protein, 457 aa, Lactobacillus brevis; identical to SEQ ID NO: 8199

SEQ ID NO: 34651 - DNA, 1500 bp, Xenopus laevis; identical to SEQ ID NO: 8200
  CDS (1)..(1500)

SEQ ID NO: 34652 - protein, 499 aa, Xenopus laevis; identical to SEQ ID NO: 8201

SEQ ID NO: 34653 - DNA, 1470 bp, Gadus morhua; identical to SEQ ID NO: 8202
  CDS (1)..(1470)

SEQ ID NO: 34654 - protein, 489 aa, Gadus morhua; identical to SEQ ID NO: 8203

SEQ ID NO: 34655 - DNA, 25 bp, Artificial sequence
  Primer sequence
atgggaatacacataccatatctca

SEQ ID NO: 34656 - DNA, 26 bp, Artificial sequence
  Primer sequence
ctatatatcctctataatctcttgag

SEQ ID NO: 34657 - protein, 728 aa, Artificial sequence
  Consensus
  Variant (2)..(3): Xaa in position 2 to 3 is any amino acid
  Variant (8)..(9): Xaa in position 8 to 9 is any amino acid
  Variant (10)..(44): Xaa in position 10 to 44 is any or no amino acid
  Variant (46)..(46): Xaa in position 46 is any amino acid
  Variant (48)..(67): Xaa in position 48 to 67 is any amino acid
  Variant (68)..(88): Xaa in position 68 to 88 is any or no amino acid
  Variant (90)..(93): Xaa in position 90 to 93 is any amino acid
  Variant (95)..(97): Xaa in position 95 to 97 is any amino acid
  Variant (99)..(109): Xaa in position 99 to 109 is any amino acid
  Variant (113)..(114): Xaa in position 113 to 114 is any amino acid
  Variant (116)..(124): Xaa in position 116 to 124 is any amino acid
  Variant (126)..(131): Xaa in position 126 to 131 is any amino acid
  Variant (133)..(136): Xaa in position 133 to 136 is any amino acid
  Variant (137)..(155): Xaa in position 137 to 155 is any or no amino acid
  Variant (157)..(158): Xaa in position 157 to 158 is any amino acid
  Variant (161)..(161): Xaa in position 161 is any amino acid
  Variant (163)..(163): Xaa in position 163 is any amino acid
  Variant (165)..(165): Xaa in position 165 is any amino acid
  Variant (169)..(174): Xaa in position 169 to 174 is any amino acid
  Variant (181)..(181): Xaa in position 181 is any amino acid
  Variant (184)..(184): Xaa in position 184 is any amino acid
  Variant (185)..(186): Xaa in position 185 to 186 is any or no amino acid
  Variant (189)..(189): Xaa in position 189 is any or no amino acid
  Variant (191)..(195): Xaa in position 191 to 195 is any amino acid
  Variant (197)..(197): Xaa in position 197 is any amino acid
  Variant (199)..(200): Xaa in position 199 to 200 is any amino acid
  Variant (203)..(212): Xaa in position 203 to 212 is any amino acid
  Variant (213)..(256): Xaa in position 213 to 256 is any or no amino acid
  Variant (259)..(261): Xaa in position 259 to 261 is any amino acid
  Variant (264)..(267): Xaa in position 264 to 267 is any amino acid
  Variant (269)..(277): Xaa in position 269 to 277 is any amino acid
  Variant (278)..(278): Xaa in position 278 is any or no amino acid
  Variant (287)..(294): Xaa in position 287 to 294 is any amino acid
  Variant (295)..(338): Xaa in position 295 to 338 is any or no amino acid
  Variant (340)..(342): Xaa in position 340 to 342 is any amino acid
  Variant (344)..(363): Xaa in position 344 to 363 is any amino acid
  Variant (364)..(411): Xaa in position 364 to 411 is any or no amino acid
  Variant (413)..(414): Xaa in position 413 to 414 is any amino acid
  Variant (416)..(417): Xaa in position 416 to 417 is any amino acid
  Variant (419)..(421): Xaa in position 419 to 421 is any amino acid
  Variant (424)..(425): Xaa in position 424 to 425 is any amino acid
  Variant (427)..(427): Xaa in position 427 is any amino acid
  Variant (429)..(429): Xaa in position 429 is any amino acid
  Variant (431)..(431): Xaa in position 431 is any amino acid
  Variant (434)..(436): Xaa in position 434 to 436 is any amino acid
  Variant (439)..(452): Xaa in position 439 to 452 is any amino acid
  Variant (453)..(465): Xaa in position 453 to 465 is any or no amino acid
  Variant (467)..(479): Xaa in position 467 to 479 is any amino acid
  Variant (483)..(483): Xaa in position 483 is any amino acid
  Variant (487)..(487): Xaa in position 487 is any amino acid
  Variant (489)..(489): Xaa in position 489 is any amino acid
  Variant (491)..(491): Xaa in position 491 is any amino acid
  Variant (492)..(502): Xaa in position 492 to 502 is any or no amino acid
  Variant (504)..(522): Xaa in position 504 to 522 is any amino acid
  Variant (523)..(622): Xaa in position 523 to 622 is any or no amino acid
  Variant (624)..(627): Xaa in position 624 to 627 is any amino acid
  Variant (628)..(628): Xaa in position 628 is any or no amino acid
  Variant (631)..(632): Xaa in position 631 to 632 is any amino acid
  Variant (634)..(637): Xaa in position 634 to 637 is any amino acid
  Variant (639)..(639): Xaa in position 639 is any amino acid
  Variant (641)..(641): Xaa in position 641 is any amino acid
  Variant (643)..(643): Xaa in position 643 is any amino acid
  Variant (645)..(646): Xaa in position 645 to 646 is any amino acid
  Variant (648)..(648): Xaa in position 648 is any amino acid
  Variant (650)..(650): Xaa in position 650 is any or no amino acid
  Variant (652)..(654): Xaa in position 652 to 654 is any amino acid
  Variant (656)..(657): Xaa in position 656 to 657 is any or no amino acid
  Variant (659)..(660): Xaa in position 659 to 660 is any or no amino acid
  Variant (662)..(665): Xaa in position 662 to 665 is any amino acid
  Variant (667)..(672): Xaa in position 667 to 672 is any amino acid
  Variant (674)..(679): Xaa in position 674 to 679 is any amino acid
  Variant (681)..(687): Xaa in position 681 to 687 is any amino acid
  Variant (688)..(698): Xaa in position 688 to 698 is any or no amino acid
  Variant (700)..(701): Xaa in position 700 to 701 is any amino acid
  Variant (703)..(711): Xaa in position 703 to 711 is any amino acid
  Variant (713)..(716): Xaa in position 713 to 716 is any amino acid
  Variant (723)..(724): Xaa in position 723 to 724 is any amino acid
  Variant (727)..(727): Xaa in position 727 is any amino acid
GXXLFGYXXXXXXXXXXXXXXXXXXXXXXXXXXXXXXXXXXXXXGXIXXXXXXXXXXXXXXXXXXXXXXXXXXXXXXXXXXXXXXXXXSXXXXGXXXGXXXXXXXXXXXGRRXXLXXXXXXXXXGXXXXXXAXXXXXXXXXXXXXXXXXXXXXXXLXXGRXLXGXGVGXXXXXXPLYISEXAPXXXRGXLXXXXXLXIXXGIXXXXXXXXXXXXXXXXXXXXXXXXXXXXXXXXXXXXXXXXXXXXXXXXXXXXXXWRXXXGLXXXXAXXXXXXXXXXLPESPRWLXXXXXXXXXXXXXXXXXXXXXXXXXXXXXXXXXXXXXXXXXXXXXXXXXXXXAXXXLXXXXXXXXXXXXXXXXXXXXXXXXXXXXXXXXXXXXXXXXXXXXXXXXXXXXXXXXXXXXXXXXXXXXLXXGXXLXXXQQXXGXNXIXYYXXXIFXXXXXXXXXXXXXXXXXXXXXXXXXXXGXXXXXXXXXXXXXVDRXGRRXLXLXXXXXXXXXXXXMXXXXXXXXXXXXXXXXXXXXXXXXXXXXXXXXXXXXXXXXXXXXXXXXXXXXXXXXXXXXXXXXXXXXXXXXXXXXXXXXXXXXXXXXXXXXXXXXXXXXXXXXXXXXXXXXXXXXXXXIXXXXXYVXXFXXXXGXIXWXIXXEXFXPXXXRXXAXXIXXXXNXXXXXXIXXXXXXLXXXXXXXXXXXXXXXXXXFXXFXXXXXXXXXFXXXXVPETKGXXLEXI

SEQ ID NO: 34658 - protein, 20 aa, Artificial sequence
  Consensus
  Variant (1)..(1): Xaa in position 1 is Leu, Val, Ile, Met, Phe or Ala
  Variant (2)..(4): Xaa in position 2 to 4 is any amino acid
  Variant (5)..(5): Xaa in position 5 is Gln, Asn, Gly or Leu
  Variant (6)..(6): Xaa in position 6 is Gln or Ile
  Variant (7)..(8): Xaa in position 7 to 8 is any amino acid
  Variant (10)..(10): Xaa in position 10 is any amino acid
  Variant (11)..(11): Xaa in position 11 is Asn, Asp, Ser, Pro or Glu
  Variant (12)..(14): Xaa in position 12 to 14 is any amino acid
  Variant (15)..(15): Xaa in position 15 is Tyr, Phe, Leu or Ser
  Variant (16)..(16): Xaa in position 16 is Tyr or Phe
  Variant (17)..(19): Xaa in position 17 to 19 is any amino acid
  Variant (20)..(20): Xaa in position 20 is Ile, Leu, Val or Phe
XXXXXXXXGXXXXXXXXXXX

SEQ ID NO: 34659 - DNA, 1164 bp, Saccharomyces cerevisiae; identical to SEQ ID NO: 1121
  CDS (1)..(1164)

SEQ ID NO: 34660 - protein, 387 aa, Saccharomyces cerevisiae; identical to SEQ ID NO: 1122

SEQ ID NO: 34661 - DNA, 1041 bp, Pseudomonas aeruginosa; identical to SEQ ID NO: 1123
  CDS (1)..(1041)

SEQ ID NO: 34662 - protein, 346 aa, Pseudomonas aeruginosa; identical to SEQ ID NO: 1124

SEQ ID NO: 34663 - DNA, 1077 bp, Listeria monocytogenes; identical to SEQ ID NO: 1125
  CDS (1)..(1077)

SEQ ID NO: 34664 - protein, 358 aa, Listeria monocytogenes; identical to SEQ ID NO: 1126

SEQ ID NO: 34665 - DNA, 1053 bp, Agrobacterium tumefaciens; identical to SEQ ID NO: 1127
  CDS (1)..(1053)

SEQ ID NO: 34666 - protein, 350 aa, Agrobacterium tumefaciens; identical to SEQ ID NO: 1128

SEQ ID NO: 34667 - DNA, 1002 bp, Salmonella enterica subsp. enterica serovar Typhi; identical to SEQ ID NO: 1129
  CDS (1)..(1002)

SEQ ID NO: 34668 - protein, 333 aa, Salmonella enterica subsp. enterica serovar Typhi; identical to SEQ ID NO: 1130

SEQ ID NO: 34669 - DNA, 1038 bp, Nostoc sp. PCC 7120; identical to SEQ ID NO: 1131
  CDS (1)..(1038)

SEQ ID NO: 34670 - protein, 345 aa, Nostoc sp. PCC 7120; identical to SEQ ID NO: 1132

SEQ ID NO: 34671 - DNA, 1032 bp, Thermotoga maritima; identical to SEQ ID NO: 1133
  CDS (1)..(1032)

SEQ ID NO: 34672 - protein, 343 aa, Thermotoga maritima; identical to SEQ ID NO: 1134

SEQ ID NO: 34673 - DNA, 978 bp, Bacillus halodurans; identical to SEQ ID NO: 1135
  CDS (1)..(978)

SEQ ID NO: 34674 - protein, 325 aa, Bacillus halodurans; identical to SEQ ID NO: 1136

SEQ ID NO: 34675 - DNA, 1032 bp, Caulobacter crescentus; identical to SEQ ID NO: 1137
  CDS (1)..(1032)

SEQ ID NO: 34676 - protein, 343 aa, Caulobacter crescentus; identical to SEQ ID NO: 1138

SEQ ID NO: 34677 - DNA, 1035 bp, Clostridium acetobutylicum; identical to SEQ ID NO: 1139
  CDS (1)..(1035)

SEQ ID NO: 34678 - protein, 344 aa, Clostridium acetobutylicum; identical to SEQ ID NO: 1140

SEQ ID NO: 34679 - DNA, 1074 bp, Halobacterium sp. NRC-1; identical to SEQ ID NO: 1141
  CDS (1)..(1074)

SEQ ID NO: 34680 - protein, 357 aa, Halobacterium sp. NRC-1; identical to SEQ ID NO: 1142

SEQ ID NO: 34681 - DNA, 1029 bp, Deinococcus radiodurans; identical to SEQ ID NO: 1143
  CDS (1)..(1029)

SEQ ID NO: 34682 - protein, 342 aa, Deinococcus radiodurans; identical to SEQ ID NO: 1144

SEQ ID NO: 34683 - DNA, 1032 bp, Vibrio cholerae; identical to SEQ ID NO: 1145
  CDS (1)..(1032)

SEQ ID NO: 34684 - protein, 343 aa, Vibrio cholerae; identical to SEQ ID NO: 1146

SEQ ID NO: 34685 - DNA, 1280 bp, Escherichia coli; identical to SEQ ID NO: 1147
  CDS (61)..(1062)

SEQ ID NO: 34686 - protein, 333 aa, Escherichia coli; identical to SEQ ID NO: 1148

SEQ ID NO: 34687 - DNA, 1005 bp, Pseudomonas aeruginosa; identical to SEQ ID NO: 1149
  CDS (1)..(1005)

SEQ ID NO: 34688 - protein, 334 aa, Pseudomonas aeruginosa; identical to SEQ ID NO: 1150

SEQ ID NO: 34689 - DNA, 1080 bp, Leishmania major; identical to SEQ ID NO: 1151
  CDS (1)..(1080)

SEQ ID NO: 34690 - protein, 359 aa, Leishmania major; identical to SEQ ID NO: 1152

SEQ ID NO: 34691 - DNA, 1302 bp, Caenorhabditis elegans; identical to SEQ ID NO: 1153
  CDS (1)..(1302)

SEQ ID NO: 34692 - protein, 433 aa, Caenorhabditis elegans; identical to SEQ ID NO: 1154

SEQ ID NO: 34693 - DNA, 1212 bp, Streptomyces coelicolor; identical to SEQ ID NO: 1155
  CDS (1)..(1212)

SEQ ID NO: 34694 - protein, 403 aa, Streptomyces coelicolor; identical to SEQ ID NO: 1156

SEQ ID NO: 34695 - DNA, 1131 bp, Schizosaccharomyces pombe; identical to SEQ ID NO: 1157
  CDS (1)..(1131)

SEQ ID NO: 34696 - protein, 376 aa, Schizosaccharomyces pombe; identical to SEQ ID NO: 1158

SEQ ID NO: 34697 - DNA, 1017 bp, Aeromonas jandaei; identical to SEQ ID NO: 1159
  CDS (1)..(1017)

SEQ ID NO: 34698 - protein, 338 aa, Aeromonas jandaei; identical to SEQ ID NO: 1160

SEQ ID NO: 34699 - DNA, 1152 bp, Tolypocladium inflatum; identical to SEQ ID NO: 1161
  CDS (1)..(1152)

SEQ ID NO: 34700 - protein, 383 aa, Tolypocladium inflatum; identical to SEQ ID NO: 1162

SEQ ID NO: 34701 - DNA, 1104 bp, Debaryomyces hansenii; identical to SEQ ID NO: 1163
  CDS (1)..(1104)

SEQ ID NO: 34702 - protein, 367 aa, Debaryomyces hansenii; identical to SEQ ID NO: 1164

SEQ ID NO: 34703 - DNA, 1128 bp, Debaryomyces hansenii; identical to SEQ ID NO: 1165
  CDS (1)..(1128)

SEQ ID NO: 34704 - protein, 375 aa, Debaryomyces hansenii; identical to SEQ ID NO: 1166

SEQ ID NO: 34705 - DNA, 1071 bp, Yarrowia lipolytica; identical to SEQ ID NO: 1167
  CDS (1)..(1071)

SEQ ID NO: 34706 - protein, 356 aa, Yarrowia lipolytica; identical to SEQ ID NO: 1168

SEQ ID NO: 34707 - DNA, 1188 bp, Kluyveromyces lactis; identical to SEQ ID NO: 1169
  CDS (1)..(1188)

SEQ ID NO: 34708 - protein, 395 aa, Kluyveromyces lactis; identical to SEQ ID NO: 1170

SEQ ID NO: 34709 - DNA, 1182 bp, Kluyveromyces lactis; identical to SEQ ID NO: 1171
  CDS (1)..(1182)

SEQ ID NO: 34710 - protein, 393 aa, Kluyveromyces lactis; identical to SEQ ID NO: 1172

SEQ ID NO: 34711 - DNA, 1161 bp, Candida glabrata; identical to SEQ ID NO: 1173
  CDS (1)..(1161)

SEQ ID NO: 34712 - protein, 386 aa, Candida glabrata; identical to SEQ ID NO: 1174

SEQ ID NO: 34713 - DNA, 1026 bp, Staphylococcus aureus subsp; identical to SEQ ID NO: 1175
  CDS (1)..(1026)

SEQ ID NO: 34714 - protein, 341 aa, Staphylococcus aureus subsp; identical to SEQ ID NO: 1176

SEQ ID NO: 34715 - DNA, 1008 bp, Photobacterium profundum; identical to SEQ ID NO: 1177
  CDS (1)..(1008)

SEQ ID NO: 34716 - protein, 335 aa, Photobacterium profundum; identical to SEQ ID NO: 1178

SEQ ID NO: 34717 - DNA, 1026 bp, Bdellovibrio bacteriovorus; identical to SEQ ID NO: 1179
  CDS (1)..(1026)

SEQ ID NO: 34718 - protein, 341 aa, Bdellovibrio bacteriovorus; identical to SEQ ID NO: 1180

SEQ ID NO: 34719 - DNA, 1101 bp, Rhodopseudomonas palustris; identical to SEQ ID NO: 1181
  CDS (1)..(1101)

SEQ ID NO: 34720 - protein, 366 aa, Rhodopseudomonas palustris; identical to SEQ ID NO: 1182

SEQ ID NO: 34721 - DNA, 1083 bp, Rhodopseudomonas palustris; identical to SEQ ID NO: 1183
  CDS (1)..(1083)

SEQ ID NO: 34722 - protein, 360 aa, Rhodopseudomonas palustris; identical to SEQ ID NO: 1184

SEQ ID NO: 34723 - DNA, 1855 bp, Mus musculus; identical to SEQ ID NO: 1185
  CDS (128)..(1330)

SEQ ID NO: 34724 - protein, 400 aa, Mus musculus; identical to SEQ ID NO: 1186

SEQ ID NO: 34725 - DNA, 1080 bp, Listeria monocytogenes; identical to SEQ ID NO: 1187
  CDS (1)..(1080)

SEQ ID NO: 34726 - protein, 359 aa, Listeria monocytogenes; identical to SEQ ID NO: 1188

SEQ ID NO: 34727 - DNA, 1023 bp, Desulfovibrio vulgaris; identical to SEQ ID NO: 1189
  CDS (1)..(1023)

SEQ ID NO: 34728 - protein, 340 aa, Desulfovibrio vulgaris; identical to SEQ ID NO: 1190

SEQ ID NO: 34729 - DNA, 1023 bp, Thermus thermophilus; identical to SEQ ID NO: 1191
  CDS (1)..(1023)

SEQ ID NO: 34730 - protein, 340 aa, Thermus thermophilus; identical to SEQ ID NO: 1192

SEQ ID NO: 34731 - DNA, 1053 bp, Wolbachia pipientis wMel; identical to SEQ ID NO: 1193
  CDS (1)..(1053)

SEQ ID NO: 34732 - protein, 350 aa, Wolbachia pipientis wMel; identical to SEQ ID NO: 1194

SEQ ID NO: 34733 - DNA, 1050 bp, Wolbachia pipientis wMel; identical to SEQ ID NO: 1195
  CDS (1)..(1050)

SEQ ID NO: 34734 - protein, 349 aa, Wolbachia pipientis wMel; identical to SEQ ID NO: 1196

SEQ ID NO: 34735 - DNA, 1056 bp, Treponema denticola; identical to SEQ ID NO: 1197
  CDS (1)..(1056)

SEQ ID NO: 34736 - protein, 351 aa, Treponema denticola; identical to SEQ ID NO: 1198

SEQ ID NO: 34737 - DNA, 1056 bp, Geobacter sulfurreducens; identical to SEQ ID NO: 1199
  CDS (1)..(1056)

SEQ ID NO: 34738 - protein, 351 aa, Geobacter sulfurreducens; identical to SEQ ID NO: 1200

SEQ ID NO: 34739 - DNA, 1047 bp, Geobacter sulfurreducens; identical to SEQ ID NO: 1201
  CDS (1)..(1047)

SEQ ID NO: 34740 - protein, 348 aa, Geobacter sulfurreducens; identical to SEQ ID NO: 1202

SEQ ID NO: 34741 - DNA, 1056 bp, Yersinia pestis; identical to SEQ ID NO: 1203
  CDS (1)..(1056)

SEQ ID NO: 34742 - protein, 351 aa, Yersinia pestis; identical to SEQ ID NO: 1204

SEQ ID NO: 34743 - DNA, 1140 bp, Ashbya gossypii; identical to SEQ ID NO: 1205
  CDS (1)..(1140)

SEQ ID NO: 34744 - protein, 379 aa, Ashbya gossypii; identical to SEQ ID NO: 1206

SEQ ID NO: 34745 - DNA, 1008 bp, Vibrio vulnificus; identical to SEQ ID NO: 1207
  CDS (1)..(1008)

SEQ ID NO: 34746 - protein, 335 aa, Vibrio vulnificus; identical to SEQ ID NO: 1208

SEQ ID NO: 34747 - DNA, 1038 bp, Porphyromonas gingivalis; identical to SEQ ID NO: 1209
  CDS (1)..(1038)

SEQ ID NO: 34748 - protein, 345 aa, Porphyromonas gingivalis; identical to SEQ ID NO: 1210

SEQ ID NO: 34749 - DNA, 1035 bp, Gloeobacter violaceus; identical to SEQ ID NO: 1211
  CDS (1)..(1035)

SEQ ID NO: 34750 - protein, 344 aa, Gloeobacter violaceus; identical to SEQ ID NO: 1212

SEQ ID NO: 34751 - DNA, 1029 bp, Chromobacterium violaceum; identical to SEQ ID NO: 1213
  CDS (1)..(1029)

SEQ ID NO: 34752 - protein, 342 aa, Chromobacterium violaceum; identical to SEQ ID NO: 1214

SEQ ID NO: 34753 - DNA, 1047 bp, Fusobacterium nucleatum subsp; identical to SEQ ID NO: 1215
  CDS (1)..(1047)

SEQ ID NO: 34754 - protein, 348 aa, Fusobacterium nucleatum subsp; identical to SEQ ID NO: 1216

SEQ ID NO: 34755 - DNA, 1083 bp, Neurospora crassa; identical to SEQ ID NO: 1217
  CDS (1)..(1083)

SEQ ID NO: 34756 - protein, 360 aa, Neurospora crassa; identical to SEQ ID NO: 1218

SEQ ID NO: 34757 - DNA, 1020 bp, Bordetella pertussis; identical to SEQ ID NO: 1219
  CDS (1)..(1020)

SEQ ID NO: 34758 - protein, 339 aa, Bordetella pertussis; identical to SEQ ID NO: 1220

SEQ ID NO: 34759 - DNA, 1376 bp, Oryza sativa; identical to SEQ ID NO: 1221
  CDS (115)..(1233)

SEQ ID NO: 34760 - protein, 372 aa, Oryza sativa; identical to SEQ ID NO: 1222

SEQ ID NO: 34761 - DNA, 1242 bp, Streptomyces avermitilis; identical to SEQ ID NO: 1223
  CDS (1)..(1242)

SEQ ID NO: 34762 - protein, 413 aa, Streptomyces avermitilis; identical to SEQ ID NO: 1224

SEQ ID NO: 34763 - DNA, 1071 bp, Streptomyces avermitilis; identical to SEQ ID NO: 1225
  CDS (1)..(1071)

SEQ ID NO: 34764 - protein, 356 aa, Streptomyces avermitilis; identical to SEQ ID NO: 1226

SEQ ID NO: 34765 - DNA, 1005 bp, Vibrio parahaemolyticus; identical to SEQ ID NO: 1227
  CDS (1)..(1005)

SEQ ID NO: 34766 - protein, 334 aa, Vibrio parahaemolyticus; identical to SEQ ID NO: 1228

SEQ ID NO: 34767 - DNA, 1077 bp, Vibrio parahaemolyticus; identical to SEQ ID NO: 1229
  CDS (1)..(1077)

SEQ ID NO: 34768 - protein, 358 aa, Vibrio parahaemolyticus; identical to SEQ ID NO: 1230

SEQ ID NO: 34769 - DNA, 1005 bp, Pseudomonas syringae; identical to SEQ ID NO: 1231
  CDS (1)..(1005)

SEQ ID NO: 34770 - protein, 334 aa, Pseudomonas syringae; identical to SEQ ID NO: 1232

SEQ ID NO: 34771 - DNA, 1041 bp, Pseudomonas syringae; identical to SEQ ID NO: 1233
  CDS (1)..(1041)

SEQ ID NO: 34772 - protein, 346 aa, Pseudomonas syringae; identical to SEQ ID NO: 1234

SEQ ID NO: 34773 - DNA, 1041 bp, Pseudomonas putida; identical to SEQ ID NO: 1235
  CDS (1)..(1041)

SEQ ID NO: 34774 - protein, 346 aa, Pseudomonas putida; identical to SEQ ID NO: 1236

SEQ ID NO: 34775 - DNA, 1026 bp, Clostridium tetani; identical to SEQ ID NO: 1237
  CDS (1)..(1026)

SEQ ID NO: 34776 - protein, 341 aa, Clostridium tetani; identical to SEQ ID NO: 1238

SEQ ID NO: 34777 - DNA, 1083 bp, Bradyrhizobium japonicum; identical to SEQ ID NO: 1239
  CDS (1)..(1083)

SEQ ID NO: 34778 - protein, 360 aa, Bradyrhizobium japonicum; identical to SEQ ID NO: 1240

SEQ ID NO: 34779 - DNA, 1044 bp, Bradyrhizobium japonicum; identical to SEQ ID NO: 1241
  CDS (1)..(1044)

SEQ ID NO: 34780 - protein, 347 aa, Bradyrhizobium japonicum; identical to SEQ ID NO: 1242

SEQ ID NO: 34781 - DNA, 1014 bp, Bacteroides thetaiotaomicron; identical to SEQ ID NO: 1243
  CDS (1)..(1014)

SEQ ID NO: 34782 - protein, 337 aa, Bacteroides thetaiotaomicron; identical to SEQ ID NO: 1244

SEQ ID NO: 34783 - DNA, 1077 bp, Vibrio vulnificus; identical to SEQ ID NO: 1245
  CDS (1)..(1077)

SEQ ID NO: 34784 - protein, 358 aa, Vibrio vulnificus; identical to SEQ ID NO: 1246

SEQ ID NO: 34785 - DNA, 1026 bp, Streptococcus agalactiae; identical to SEQ ID NO: 1247
  CDS (1)..(1026)

SEQ ID NO: 34786 - protein, 341 aa, Streptococcus agalactiae; identical to SEQ ID NO: 1248

SEQ ID NO: 34787 - DNA, 1014 bp, Shewanella oneidensis; identical to SEQ ID NO: 1249
  CDS (1)..(1014)

SEQ ID NO: 34788 - protein, 337 aa, Shewanella oneidensis; identical to SEQ ID NO: 1250

SEQ ID NO: 34789 - DNA, 1002 bp, Escherichia coli O6; identical to SEQ ID NO: 1251
  CDS (1)..(1002)

SEQ ID NO: 34790 - protein, 333 aa, Escherichia coli O6; identical to SEQ ID NO: 1252

SEQ ID NO: 34791 - DNA, 1026 bp, Bifidobacterium longum; identical to SEQ ID NO: 1253
  CDS (1)..(1026)

SEQ ID NO: 34792 - protein, 341 aa, Bifidobacterium longum; identical to SEQ ID NO: 1254

SEQ ID NO: 34793 - DNA, 1116 bp, Rhizobium loti; identical to SEQ ID NO: 1255
  CDS (1)..(1116)

SEQ ID NO: 34794 - protein, 371 aa, Rhizobium loti; identical to SEQ ID NO: 1256

SEQ ID NO: 34795 - DNA, 1074 bp, Xanthomonas campestris; identical to SEQ ID NO: 1257
  CDS (1)..(1074)

SEQ ID NO: 34796 - protein, 357 aa, Xanthomonas campestris; identical to SEQ ID NO: 1258

SEQ ID NO: 34797 - DNA, 1065 bp, Xanthomonas axonopodis; identical to SEQ ID NO: 1259
  CDS (1)..(1065)

SEQ ID NO: 34798 - protein, 354 aa, Xanthomonas axonopodis; identical to SEQ ID NO: 1260

SEQ ID NO: 34799 - DNA, 1041 bp, Thermoanaerobacter tengcongensis; identical to SEQ ID NO: 1261
  CDS (1)..(1041)

SEQ ID NO: 34800 - protein, 346 aa, Thermoanaerobacter tengcongensis; identical to SEQ ID NO: 1262

SEQ ID NO: 34801 - DNA, 1023 bp, Fusobacterium nucleatum; identical to SEQ ID NO: 1263
  CDS (1)..(1023)

SEQ ID NO: 34802 - protein, 340 aa, Fusobacterium nucleatum; identical to SEQ ID NO: 1264

SEQ ID NO: 34803 - DNA, 1533 bp, Arabidopsis thaliana; identical to SEQ ID NO: 1265
  CDS (303)..(1379)

SEQ ID NO: 34804 - protein, 358 aa, Arabidopsis thaliana; identical to SEQ ID NO: 1266

SEQ ID NO: 34805 - DNA, 1098 bp, Ralstonia solanacearum; identical to SEQ ID NO: 1267
  CDS (1)..(1098)

SEQ ID NO: 34806 - protein, 365 aa, Ralstonia solanacearum; identical to SEQ ID NO: 1268

SEQ ID NO: 34807 - DNA, 1038 bp, Ralstonia solanacearum; identical to SEQ ID NO: 1269
  CDS (1)..(1038)

SEQ ID NO: 34808 - protein, 345 aa, Ralstonia solanacearum; identical to SEQ ID NO: 1270

SEQ ID NO: 34809 - DNA, 1002 bp, Salmonella typhimurium; identical to SEQ ID NO: 1271
  CDS (1)..(1002)

SEQ ID NO: 34810 - protein, 333 aa, Salmonella typhimurium; identical to SEQ ID NO: 1272

SEQ ID NO: 34811 - DNA, 1047 bp, Rhizobium meliloti; identical to SEQ ID NO: 1273
  CDS (1)..(1047)

SEQ ID NO: 34812 - protein, 348 aa, Rhizobium meliloti; identical to SEQ ID NO: 1274

SEQ ID NO: 34813 - DNA, 1092 bp, Rhizobium loti; identical to SEQ ID NO: 1275
  CDS (1)..(1092)

SEQ ID NO: 34814 - protein, 363 aa, Rhizobium loti; identical to SEQ ID NO: 1276

SEQ ID NO: 34815 - DNA, 1313 bp, Arabidopsis thaliana; identical to SEQ ID NO: 1277
  CDS (91)..(1158)

SEQ ID NO: 34816 - protein, 355 aa, Arabidopsis thaliana; identical to SEQ ID NO: 1278

SEQ ID NO: 34817 - DNA, 1059 bp, Arabidopsis thaliana; identical to SEQ ID NO: 1279
  CDS (1)..(1059)

SEQ ID NO: 34818 - protein, 352 aa, Arabidopsis thaliana; identical to SEQ ID NO: 1280

SEQ ID NO: 34819 - DNA, 1071 bp, Streptomyces coelicolor; identical to SEQ ID NO: 1281
  CDS (1)..(1071)

SEQ ID NO: 34820 - protein, 356 aa, Streptomyces coelicolor; identical to SEQ ID NO: 1282

SEQ ID NO: 34821 - DNA, 1113 bp, Arabidopsis thaliana; identical to SEQ ID NO: 1283
  CDS (1)..(1113)

SEQ ID NO: 34822 - protein, 370 aa, Arabidopsis thaliana; identical to SEQ ID NO: 1284

SEQ ID NO: 34823 - DNA, 1327 bp, Drosophila melanogaster; identical to SEQ ID NO: 1285
  CDS (79)..(1230)

SEQ ID NO: 34824 - protein, 383 aa, Drosophila melanogaster; identical to SEQ ID NO: 1286

SEQ ID NO: 34825 - DNA, 1014 bp, Zymomonas mobilis; identical to SEQ ID NO: 1287
  CDS (1)..(1014)

SEQ ID NO: 34826 - protein, 337 aa, Zymomonas mobilis; identical to SEQ ID NO: 1288

SEQ ID NO: 34827 - DNA, 1149 bp, Ashbya gossypii; identical to SEQ ID NO: 1289
  CDS (1)..(1149)

SEQ ID NO: 34828 - protein, 382 aa, Ashbya gossypii; identical to SEQ ID NO: 1290

SEQ ID NO: 34829 - DNA, 1530 bp, Candida albicans; identical to SEQ ID NO: 1291
  CDS (117)..(1241)

SEQ ID NO: 34830 - protein, 374 aa, Candida albicans; identical to SEQ ID NO: 1292

SEQ ID NO: 34831 - DNA, 1041 bp, Pseudomonas sp; identical to SEQ ID NO: 1293
  CDS (1)..(1041)

SEQ ID NO: 34832 - protein, 346 aa, Pseudomonas sp; identical to SEQ ID NO: 1294

SEQ ID NO: 34833 - DNA, 1170 bp, Cochliobolus carbonum; identical to SEQ ID NO: 1295
  CDS (1)..(1170)

SEQ ID NO: 34834 - protein, 389 aa, Cochliobolus carbonum; identical to SEQ ID NO: 1296

SEQ ID NO: 34835 - DNA, 25 bp, Artificial sequence
  Primer sequence
atgactgaattcgaattgcctccaa

SEQ ID NO: 34836 - DNA, 26 bp, Artificial sequence
  Primer sequence
tcagtatttgtaggtttttatttcgc

SEQ ID NO: 34837 - protein, 333 aa, Artificial sequence
  Consensus
  Variant (4)..(5): Xaa in position 4 to 5 is any amino acid
  Variant (7)..(7): Xaa in position 7 is any amino acid
  Variant (9)..(24): Xaa in position 9 to 24 is any amino acid
  Variant (26)..(26): Xaa in position 26 is any amino acid
  Variant (28)..(29): Xaa in position 28 to 29 is any amino acid
  Variant (32)..(33): Xaa in position 32 to 33 is any amino acid
  Variant (35)..(37): Xaa in position 35 to 37 is any amino acid
  Variant (39)..(45): Xaa in position 39 to 45 is any amino acid
  Variant (47)..(61): Xaa in position 47 to 61 is any amino acid
  Variant (63)..(64): Xaa in position 63 to 64 is any amino acid
  Variant (67)..(87): Xaa in position 67 to 87 is any amino acid
  Variant (89)..(92): Xaa in position 89 to 92 is any amino acid
  Variant (94)..(102): Xaa in position 94 to 102 is any amino acid
  Variant (104)..(106): Xaa in position 104 to 106 is any amino acid
  Variant (108)..(111): Xaa in position 108 to 111 is any amino acid
  Variant (113)..(136): Xaa in position 113 to 136 is any amino acid
  Variant (139)..(143): Xaa in position 139 to 143 is any amino acid
  Variant (147)..(148): Xaa in position 147 to 148 is any amino acid
  Variant (150)..(152): Xaa in position 150 to 152 is any amino acid
  Variant (154)..(155): Xaa in position 154 to 155 is any amino acid
  Variant (157)..(171): Xaa in position 157 to 171 is any amino acid
  Variant (173)..(173): Xaa in position 173 is any amino acid
  Variant (178)..(200): Xaa in position 178 to 200 is any amino acid
  Variant (202)..(208): Xaa in position 202 to 208 is any amino acid
  Variant (210)..(212): Xaa in position 210 to 212 is any amino acid
  Variant (215)..(215): Xaa in position 215 is any amino acid
  Variant (217)..(236): Xaa in position 217 to 236 is any amino acid
  Variant (240)..(240): Xaa in position 240 is any amino acid
  Variant (242)..(243): Xaa in position 242 to 243 is any amino acid
  Variant (245)..(289): Xaa in position 245 to 289 is any amino acid
  Variant (291)..(328): Xaa in position 291 to 328 is any amino acid
  Variant (330)..(332): Xaa in position 330 to 332 is any amino acid
RSDXXTXPXXXXXXXXXXXXXXXXDXVXXEDXXTXXXEXXXXXXXGXXXXXXXXXXXXXXXTXXNQXXXXXXXXXXXXXXXXXXXXXHXXXXEXXXXXXXXXAXXXPXXXXNXXXXXXXXXXXXXXXXXXXXXXXXPTXXXXXENTXXGXXXPXXEXXXXXXXXXXXXXXXHXDGARXXXXXXXXXXXXXXXXXXXXXXXDXXXXXXXKXXXAPXGXXXXXXXXXXXXXXXXXXXXGGGXRXXGXXXXXXXXXXXXXXXXXXXXXXXXXXXXXXXXXXXXXXXXXXXXXLXXXXXXXXXXXXXXXXXXXXXXXXXXXXXXXXXXXXXXRXXXH

SEQ ID NO: 34838 - protein, 357 aa, Artificial sequence
  Consensus
  Variant (3)..(26): Xaa in position 3 to 26 is any amino acid
  Variant (29)..(29): Xaa in position 29 is any amino acid
  Variant (31)..(55): Xaa in position 31 to 55 is any amino acid
  Variant (57)..(59): Xaa in position 57 to 59 is any amino acid
  Variant (62)..(63): Xaa in position 62 to 63 is any amino acid
  Variant (65)..(86): Xaa in position 65 to 86 is any amino acid
  Variant (88)..(91): Xaa in position 88 to 91 is any amino acid
  Variant (93)..(93): Xaa in position 93 is any amino acid
  Variant (95)..(134): Xaa in position 95 to 134 is any amino acid
  Variant (136)..(152): Xaa in position 136 to 152 is any amino acid
  Variant (154)..(176): Xaa in position 154 to 176 is any amino acid
  Variant (178)..(178): Xaa in position 178 is any amino acid
  Variant (183)..(185): Xaa in position 183 to 185 is any amino acid
  Variant (187)..(205): Xaa in position 187 to 205 is any amino acid
  Variant (207)..(213): Xaa in position 207 to 213 is any amino acid
  Variant (215)..(238): Xaa in position 215 to 238 is any amino acid
  Variant (240)..(241): Xaa in position 240 to 241 is any amino acid
  Variant (243)..(280): Xaa in position 243 to 280 is any amino acid
  Variant (282)..(307): Xaa in position 282 to 307 is any amino acid
  Variant (309)..(356): Xaa in position 309 to 356 is any amino acid
SDXXXXXXXXXXXXXXXXXXXXXXXXYGXDXXXXXXXXXXXXXXXXXXXXXXXXXFXXXGTXXNXXXXXXXXXXXXXXXXXXXXXXHXXXXEXGXXXXXXXXXXXXXXXXXXXXXXXXXXXXXXXXXXXXXXXXHXXXXXXXXXXXXXXXXXGXXXXXXXXXXXXXXXXXXXXXXXHXDGARXXXAXXXXXXXXXXXXXXXXXXXDXXXXXXXKXXXXXXXXXXXXXXXXXXXXXXXXKXXGXXXXXXXXXXXXXXXXXXXXXXXXXXXXXXXXXXXXXXAXXXXXXXXXXXXXXXXXXXXXXXXXXNXXXXXXXXXXXXXXXXXXXXXXXXXXXXXXXXXXXXXXXXXXXXXXXXR

SEQ ID NO: 34839 - protein, 346 aa, Artificial sequence
  Consensus
  Variant (5)..(5): Xaa in position 5 is any amino acid
  Variant (7)..(7): Xaa in position 7 is any amino acid
  Variant (10)..(11): Xaa in position 10 to 11 is any amino acid
  Variant (13)..(23): Xaa in position 13 to 23 is any amino acid
  Variant (26)..(26): Xaa in position 26 is any amino acid
  Variant (29)..(29): Xaa in position 29 is any amino acid
  Variant (32)..(33): Xaa in position 32 to 33 is any amino acid
  Variant (35)..(37): Xaa in position 35 to 37 is any amino acid
  Variant (39)..(45): Xaa in position 39 to 45 is any amino acid
  Variant (47)..(53): Xaa in position 47 to 53 is any amino acid
  Variant (55)..(56): Xaa in position 55 to 56 is any amino acid
  Variant (58)..(58): Xaa in position 58 is any amino acid
  Variant (63)..(64): Xaa in position 63 to 64 is any amino acid
  Variant (67)..(69): Xaa in position 67 to 69 is any amino acid
  Variant (71)..(72): Xaa in position 71 to 72 is any amino acid
  Variant (74)..(76): Xaa in position 74 to 76 is any amino acid
  Variant (79)..(79): Xaa in position 79 is any amino acid
  Variant (85)..(85): Xaa in position 85 is any amino acid
  Variant (89)..(92): Xaa in position 89 to 92 is any amino acid
  Variant (95)..(95): Xaa in position 95 is any amino acid
  Variant (97)..(97): Xaa in position 97 is any amino acid
  Variant (99)..(99): Xaa in position 99 is any amino acid
  Variant (104)..(106): Xaa in position 104 to 106 is any amino acid
  Variant (108)..(109): Xaa in position 108 to 109 is any amino acid
  Variant (111)..(111): Xaa in position 111 is any amino acid
  Variant (114)..(114): Xaa in position 114 is any amino acid
  Variant (116)..(116): Xaa in position 116 is any amino acid
  Variant (118)..(118): Xaa in position 118 is any amino acid
  Variant (121)..(131): Xaa in position 121 to 131 is any amino acid
  Variant (133)..(133): Xaa in position 133 is any amino acid
  Variant (135)..(136): Xaa in position 135 to 136 is any amino acid
  Variant (139)..(142): Xaa in position 139 to 142 is any amino acid
  Variant (147)..(148): Xaa in position 147 to 148 is any amino acid
  Variant (150)..(152): Xaa in position 150 to 152 is any amino acid
  Variant (154)..(155): Xaa in position 154 to 155 is any amino acid
  Variant (157)..(159): Xaa in position 157 to 159 is any amino acid
  Variant (161)..(171): Xaa in position 161 to 171 is any amino acid
  Variant (173)..(173): Xaa in position 173 is any amino acid
  Variant (178)..(178): Xaa in position 178 is any amino acid
  Variant (180)..(180): Xaa in position 180 is any amino acid
  Variant (182)..(199): Xaa in position 182 to 199 is any amino acid
  Variant (203)..(203): Xaa in position 203 is any amino acid
  Variant (205)..(205): Xaa in position 205 is any amino acid
  Variant (210)..(212): Xaa in position 210 to 212 is any amino acid
  Variant (215)..(215): Xaa in position 215 is any amino acid
  Variant (218)..(219): Xaa in position 218 to 219 is any amino acid
  Variant (222)..(233): Xaa in position 222 to 233 is any amino acid
  Variant (235)..(236): Xaa in position 235 to 236 is any amino acid
  Variant (240)..(240): Xaa in position 240 is any amino acid
  Variant (243)..(243): Xaa in position 243 is any amino acid
  Variant (245)..(249): Xaa in position 245 to 249 is any amino acid
  Variant (251)..(272): Xaa in position 251 to 272 is any amino acid
  Variant (274)..(275): Xaa in position 274 to 275 is any amino acid
  Variant (277)..(286): Xaa in position 277 to 286 is any amino acid
  Variant (288)..(289): Xaa in position 288 to 289 is any amino acid
  Variant (291)..(292): Xaa in position 291 to 292 is any amino acid
  Variant (294)..(295): Xaa in position 294 to 295 is any amino acid
  Variant (298)..(298): Xaa in position 298 is any amino acid
  Variant (300)..(301): Xaa in position 300 to 301 is any amino acid
  Variant (303)..(324): Xaa in position 303 to 324 is any amino acid
  Variant (326)..(328): Xaa in position 326 to 328 is any amino acid
  Variant (330)..(332): Xaa in position 330 to 332 is any amino acid
  Variant (334)..(334): Xaa in position 334 is any amino acid
  Variant (336)..(345): Xaa in position 336 to 345 is any amino acid
RSDTXTXPTXXMXXXXXXXXXXXGDXVYXEDXXTXXXEXXXXXXXGXXXXXXXAXXFXVSGTXXNQXXXRXXLXXXPPXSILCDXRAHXXXXEAXGXAXLSQAXXXPXXPXNGXYXTXEDXXXXXXXXXXXDXHXXPTXXXXLENTXXGXXXPXXEXXXIXXXXXXXXXXXHXDGARXWXAXXXXXXXXXXXXXXXXXXFDSXSXCLSKXXXAPXGSXXVGXXXXXXXXXXXXKXXGGGXRQXGXXXXXAXXXXXXXXXXXXXXXXXXXXXXHXXAXXXXXXXXXXGXXLXXPXXTNXVXXDXXXXXXXXXXXXXXXXXXXXXXLXXXRXXXHXQXXXXXXXXXXK

SEQ ID NO: 34840 - protein, 101 aa, Artificial sequence; identical to SEQ ID NO: 1322
  Consensus
  Variant (2)..(23): Xaa in position 2 to 23 is any amino acid
  Variant (24)..(30): Xaa in position 24 to 30 is any or no amino acid
  Variant (32)..(32): Xaa in position 32 is any amino acid
  Variant (37)..(39): Xaa in position 37 to 39 is any amino acid
  Variant (41)..(55): Xaa in position 41 to 55 is any amino acid
  Variant (56)..(57): Xaa in position 56 to 57 is any or no amino acid
  Variant (59)..(62): Xaa in position 59 to 62 is any amino acid
  Variant (64)..(64): Xaa in position 64 is any amino acid
  Variant (67)..(70): Xaa in position 67 to 70 is any amino acid
  Variant (72)..(72): Xaa in position 72 is any amino acid
  Variant (75)..(77): Xaa in position 75 to 77 is any amino acid
  Variant (79)..(85): Xaa in position 79 to 85 is any amino acid
  Variant (87)..(90): Xaa in position 87 to 90 is any amino acid
  Variant (92)..(93): Xaa in position 92 to 93 is any amino acid
  Variant (97)..(97): Xaa in position 97 is any amino acid
  Variant (100)..(100): Xaa in position 100 is any amino acid

SEQ ID NO: 34841 - protein, 94 aa, Artificial sequence; identical to SEQ ID NO: 1313
  Consensus
  Variant (1)..(1): Xaa in position 1 is Asp or Gly
  Variant (2)..(9): Xaa in position 2 to 9 is any amino acid
  Variant (10)..(10): Xaa in position 10 is Met, Val, Ile, Leu or Ser
  Variant (11)..(26): Xaa in position 11 to 26 is any amino acid
  Variant (27)..(28): Xaa in position 27 to 28 is any or no amino acid
  Variant (29)..(29): Xaa in position 29 is Asp, Gly or Ser
  Variant (30)..(34): Xaa in position 30 to 34 is any amino acid
  Variant (35)..(35): Xaa in position 35 is Leu, Ala, Phe, Val or Ile
  Variant (36)..(52): Xaa in position 36 to 52 is any amino acid
  Variant (53)..(57): Xaa in position 53 to 57 is any or no amino acid
  Variant (58)..(58): Xaa in position 58 is Ser, Thr, Asn or Gly
  Variant (60)..(60): Xaa in position 60 is Thr or Ser
  Variant (61)..(61): Xaa in position 61 is any amino acid
  Variant (62)..(62): Xaa in position 62 is Ala, Ser, Thr, Gly or Cys
  Variant (63)..(63): Xaa in position 63 is Asn or Gln
  Variant (64)..(66): Xaa in position 64 to 66 is any amino acid
  Variant (67)..(67): Xaa in position 67 is Leu, Ile, Val, Met or Thr
  Variant (68)..(72): Xaa in position 68 to 72 is any amino acid
  Variant (73)..(74): Xaa in position 73 to 74 is any or no amino acid
  Variant (75)..(75): Xaa in position 75 is Pro, Arg or Ser
  Variant (76)..(84): Xaa in position 76 to 84 is any amino acid
  Variant (85)..(85): Xaa in position 85 is Ala, Ser, Gly or Cys
  Variant (87)..(90): Xaa in position 87 to 90 is any amino acid
  Variant (92)..(92): Xaa in position 92 is any amino acid
  Variant (93)..(93): Xaa in position 93 is Gly, Ala, Gln or Asp
  Variant (94)..(94): Xaa in position 94 is Gly, Ala or Ser

SEQ ID NO: 34842 - protein, 89 aa, Artificial sequence; identical to SEQ ID NO: 1314
  Consensus
  Variant (2)..(2): Xaa in position 2 is any amino acid
  Variant (3)..(3): Xaa in position 3 is Val, Ile, Leu or Cys
  Variant (4)..(8): Xaa in position 4 to 8 is any amino acid
  Variant (9)..(9): Xaa in position 9 is Leu, Ile, Met, Val or Thr
  Variant (10)..(20): Xaa in position 10 to 20 is any amino acid
  Variant (21)..(21): Xaa in position 21 is Leu, Val, Ile or Met
  Variant (22)..(22): Xaa in position 22 is any amino acid
  Variant (23)..(23): Xaa in position 23 is Leu, Val, Ile, Met or Thr
  Variant (24)..(24): Xaa in position 24 is His, Tyr or Phe
  Variant (25)..(25): Xaa in position 25 is Leu, Met, Ile, Val or Cys
  Variant (28)..(28): Xaa in position 28 is Ala or Ser
  Variant (30)..(30): Xaa in position 30 is Leu, Ile, Phe or Val
  Variant (31)..(32): Xaa in position 31 to 32 is any amino acid
  Variant (33)..(33): Xaa in position 33 is Ala, Gly, Ser or Ile
  Variant (34)..(48): Xaa in position 34 to 48 is any amino acid
  Variant (49)..(52): Xaa in position 49 to 52 is any or no amino acid
  Variant (54)..(57): Xaa in position 54 to 57 is any amino acid
  Variant (58)..(58): Xaa in position 58 is Cys, Gly or Ser
  Variant (59)..(59): Xaa in position 59 is Leu, Gly, Phe or Ala
  Variant (60)..(60): Xaa in position 60 is Ser, Thr or Tyr
  Variant (62)..(62): Xaa in position 62 is any amino acid
  Variant (63)..(63): Xaa in position 63 is Leu, Gly, Ile, Met or Val
  Variant (64)..(67): Xaa in position 64 to 67 is any amino acid
  Variant (68)..(68): Xaa in position 68 is Gly or Glu
  Variant (69)..(69): Xaa in position 69 is Ser or Ala
  Variant (70)..(70): Xaa in position 70 is Val, Leu, Ile or Met
  Variant (71)..(71): Xaa in position 71 is Leu, Val or Ile
  Variant (72)..(85): Xaa in position 72 to 85 is any amino acid
  Variant (86)..(86): Xaa in position 86 is Lys, Arg or Gln
  Variant (87)..(88): Xaa in position 87 to 88 is any amino acid
  Variant (89)..(89): Xaa in position 89 is Gly, Ala or Met

SEQ ID NO: 34843 - protein, 122 aa, Artificial sequence; identical to SEQ ID NO: 1316
  Consensus
  Variant (1)..(1): Xaa in position 1 is Asp or Glu
  Variant (2)..(2): Xaa in position 2 is Phe or Leu
  Variant (6)..(7): Xaa in position 6 to 7 is any amino acid
  Variant (9)..(9): Xaa in position 9 is any amino acid
  Variant (11)..(11): Xaa in position 11 is Thr or Ser
  Variant (12)..(13): Xaa in position 12 to 13 is any amino acid
  Variant (14)..(14): Xaa in position 14 is Met or Val
  Variant (15)..(20): Xaa in position 15 to 20 is any amino acid
  Variant (21)..(22): Xaa in position 21 to 22 is any or no amino acid
  Variant (23)..(23): Xaa in position 23 is Ala, Ser or Thr
  Variant (24)..(24): Xaa in position 24 is Thr, Ser or Ala
  Variant (25)..(25): Xaa in position 25 is any amino acid
  Variant (26)..(26): Xaa in position 26 is Gly or Asn
  Variant (28)..(28): Xaa in position 28 is any amino acid
  Variant (30)..(30): Xaa in position 30 is Tyr or Phe
  Variant (31)..(31): Xaa in position 31 is any amino acid
  Variant (34)..(35): Xaa in position 34 to 35 is any amino acid
  Variant (37)..(38): Xaa in position 37 to 38 is any amino acid
  Variant (39)..(39): Xaa in position 39 is Leu or Phe
  Variant (41)..(42): Xaa in position 41 to 42 is any amino acid
  Variant (43)..(43): Xaa in position 43 is Val, Met or Ile
  Variant (44)..(47): Xaa in position 44 to 47 is any amino acid
  Variant (49)..(50): Xaa in position 49 to 50 is any amino acid
  Variant (51)..(55): Xaa in position 51 to 55 is any or no amino acid
  Variant (56)..(56): Xaa in position 56 is Ala or Glu
  Variant (57)..(57): Xaa in position 57 is Gly or Ala
  Variant (58)..(58): Xaa in position 58 is Leu, Met or Val
  Variant (59)..(59): Xaa in position 59 is Phe or Met
  Variant (60)..(61): Xaa in position 60 to 61 is any amino acid
  Variant (62)..(62): Xaa in position 62 is Ser or Thr
  Variant (63)..(63): Xaa in position 63 is Gly or Thr
  Variant (65)..(66): Xaa in position 65 to 66 is any amino acid
  Variant (69)..(69): Xaa in position 69 is Ile or Leu
  Variant (70)..(70): Xaa in position 70 is any amino acid
  Variant (71)..(71): Xaa in position 71 is Leu, Val or Ile
  Variant (72)..(74): Xaa in position 72 to 74 is any amino acid
  Variant (75)..(75): Xaa in position 75 is Leu, Val or Ser
  Variant (76)..(76): Xaa in position 76 is any amino acid
  Variant (77)..(78): Xaa in position 77 to 78 is any or no amino acid
  Variant (79)..(79): Xaa in position 79 is Pro or Arg
  Variant (80)..(80): Xaa in position 80 is Pro or Cys
  Variant (81)..(81): Xaa in position 81 is any amino acid
  Variant (82)..(82): Xaa in position 82 is Ser or Gly
  Variant (83)..(83): Xaa in position 83 is Ile or Val
  Variant (84)..(84): Xaa in position 84 is Leu or Ile
  Variant (85)..(85): Xaa in position 85 is any amino acid
  Variant (86)..(86): Xaa in position 86 is Asp or Ser
  Variant (87)..(88): Xaa in position 87 to 88 is any amino acid
  Variant (89)..(89): Xaa in position 89 is Ala or Ser
  Variant (91)..(91): Xaa in position 91 is Val, Ile or Ala
  Variant (92)..(94): Xaa in position 92 to 94 is any amino acid
  Variant (96)..(96): Xaa in position 96 is Ala or Cys
  Variant (97)..(98): Xaa in position 97 to 98 is Gly or Ala
  Variant (99)..(99): Xaa in position 99 is any amino acid
  Variant (100)..(100): Xaa in position 100 is Ala, Ser or Gly
  Variant (101)..(101): Xaa in position 101 is any amino acid
  Variant (102)..(102): Xaa in position 102 is Leu or Phe
  Variant (103)..(103): Xaa in position 103 is Ser, Thr or Cys
  Variant (104)..(104): Xaa in position 104 is Gln or Gly
  Variant (106)..(106): Xaa in position 106 is any amino acid
  Variant (107)..(107): Xaa in position 107 is Val, Leu, Ile or Ala
  Variant (108)..(108): Xaa in position 108 is any amino acid
  Variant (110)..(110): Xaa in position 110 is Val, Ile or Ala
  Variant (111)..(111): Xaa in position 111 is any amino acid
  Variant (112)..(112): Xaa in position 112 is Pro or Ala
  Variant (113)..(113): Xaa in position 113 is any amino acid
  Variant (115)..(115): Xaa in position 115 is Gly or Asn
  Variant (116)..(116): Xaa in position 116 is any amino acid
  Variant (117)..(117): Xaa in position 117 is Tyr or His
  Variant (118)..(118): Xaa in position 118 is Leu, Ile or Met
  Variant (119)..(119): Xaa in position 119 is Thr or Arg
  Variant (120)..(120): Xaa in position 120 is any amino acid
  Variant (121)..(121): Xaa in position 121 is Glu or Asp
  Variant (122)..(122): Xaa in position 122 is Asp or Glu

SEQ ID NO: 34844 - protein, 50 aa, Artificial sequence; identical to SEQ ID NO: 1317
  Consensus
  Variant (1)..(1): Xaa in position 1 is Asp, Glu or Met
  Variant (2)..(2): Xaa in position 2 is Ile, Val or Thr
  Variant (3)..(3): Xaa in position 3 is His or Glu
  Variant (4)..(5): Xaa in position 4 to 5 is any amino acid
  Variant (8)..(8): Xaa in position 8 is any amino acid
  Variant (9)..(9): Xaa in position 9 is Leu, Ile or Val
  Variant (10)..(10): Xaa in position 10 is Ile, Val or Leu
  Variant (11)..(11): Xaa in position 11 is any amino acid
  Variant (12)..(12): Xaa in position 12 is Leu or Met
  Variant (16)..(17): Xaa in position 16 to 17 is any amino acid
  Variant (19)..(21): Xaa in position 19 to 21 is any amino acid
  Variant (23)..(23): Xaa in position 23 is Leu, Val or Ile
  Variant (24)..(24): Xaa in position 24 is any amino acid
  Variant (26)..(26): Xaa in position 26 is Leu, Ile, Val or Met
  Variant (27)..(27): Xaa in position 27 is any amino acid
  Variant (28)..(28): Xaa in position 28 is Arg or Lys
  Variant (29)..(29): Xaa in position 29 is Ile or Met
  Variant (30)..(31): Xaa in position 30 to 31 is any amino acid
  Variant (32)..(32): Xaa in position 32 is Trp, Phe or Leu
  Variant (33)..(33): Xaa in position 33 is Ala or Cys
  Variant (34)..(35): Xaa in position 34 to 35 is any amino acid
  Variant (36)..(36): Xaa in position 36 is Asn, Gln or His
  Variant (37)..(37): Xaa in position 37 is any amino acid
  Variant (38)..(38): Xaa in position 38 is Ile, Val, Leu or Met
  Variant (39)..(39): Xaa in position 39 is any amino acid
  Variant (40)..(40): Xaa in position 40 is Leu, Val, Ile or Thr
  Variant (42)..(42): Xaa in position 42 is any amino acid
  Variant (47)..(47): Xaa in position 47 is Leu or Ile
  Variant (48)..(48): Xaa in position 48 is Trp or Phe
  Variant (49)..(49): Xaa in position 49 is any amino acid
  Variant (50)..(50): Xaa in position 50 is Ala or Ser

SEQ ID NO: 34845 - protein, 62 aa, Artificial sequence; identical to SEQ ID NO: 1318
  Consensus
  Variant (1)..(1): Xaa in position 1 is Leu, Ile or Met
  Variant (2)..(2): Xaa in position 2 is Lys, Arg or Glu
  Variant (3)..(8): Xaa in position 3 to 8 is any amino acid
  Variant (10)..(10): Xaa in position 10 is Ser, Ala or Leu
  Variant (11)..(11): Xaa in position 11 is Val, Ile or Met
  Variant (12)..(12): Xaa in position 12 is Ser or Thr
  Variant (13)..(13): Xaa in position 13 is Leu, Ile or Val
  Variant (14)..(14): Xaa in position 14 is any amino acid
  Variant (15)..(15): Xaa in position 15 is Leu or Phe
  Variant (16)..(16): Xaa in position 16 is Ser or Gly
  Variant (18)..(18): Xaa in position 18 is any amino acid
  Variant (19)..(19): Xaa in position 19 is Leu, Met, Ile or Val
  Variant (20)..(20): Xaa in position 20 is Gly, Ala or Cys
  Variant (23)..(23): Xaa in position 23 is Ile, Val or Met
  Variant (25)..(25): Xaa in position 25 is Ser, Thr or Ala
  Variant (26)..(26): Xaa in position 26 is Val, Ile, Met or Ala
  Variant (27)..(27): Xaa in position 27 is Leu or Ile
  Variant (28)..(28): Xaa in position 28 is Val, Leu or Ile
  Variant (29)..(29): Xaa in position 29 is Gly or Ala
  Variant (30)..(32): Xaa in position 30 to 32 is any amino acid
  Variant (33)..(33): Xaa in position 33 is Phe or Leu
  Variant (34)..(34): Xaa in position 34 is Ile or Val
  Variant (35)..(40): Xaa in position 35 to 40 is any amino acid
  Variant (41)..(41): Xaa in position 41 is Arg, Lys or Gln
  Variant (42)..(42): Xaa in position 42 is Lys or Gln
  Variant (43)..(44): Xaa in position 43 to 44 is any amino acid
  Variant (48)..(48): Xaa in position 48 is Ile, Val, Leu or Met
  Variant (50)..(50): Xaa in position 50 is Gln or Lys
  Variant (51)..(51): Xaa in position 51 is Ser, Ala or Gly
  Variant (53)..(53): Xaa in position 53 is any amino acid
  Variant (54)..(54): Xaa in position 54 is Leu, Ile or Met
  Variant (55)..(56): Xaa in position 55 to 56 is any amino acid
  Variant (57)..(57): Xaa in position 57 is Met or Ala
  Variant (58)..(58): Xaa in position 58 is Ala or Gly
  Variant (59)..(61): Xaa in position 59 to 61 is any amino acid
  Variant (62)..(62): Xaa in position 62 is Ile, Leu, Met or Val

SEQ ID NO: 34846 - protein, 65 aa, Artificial sequence; identical to SEQ ID NO: 1319
  Consensus
  Variant (1)..(1): Xaa in position 1 is Gly or Gln
  Variant (2)..(2): Xaa in position 2 is Ile, Gly or Leu
  Variant (3)..(3): Xaa in position 3 is any amino acid
  Variant (5)..(6): Xaa in position 5 to 6 is any amino acid
  Variant (7)..(7): Xaa in position 7 is Pro or Glu
  Variant (8)..(9): Xaa in position 8 to 9 is any amino acid
  Variant (10)..(10): Xaa in position 10 is Thr or Ser
  Variant (11)..(11): Xaa in position 11 is Asn or Ser
  Variant (12)..(12): Xaa in position 12 is any amino acid
  Variant (13)..(13): Xaa in position 13 is Val, Phe or Ile
  Variant (14)..(14): Xaa in position 14 is Phe, Trp, Tyr or Thr
  Variant (15)..(15): Xaa in position 15 is Leu, Ile or Val
  Variant (16)..(16): Xaa in position 16 is Asp, Ala or Asn
  Variant (17)..(20): Xaa in position 17 to 20 is any amino acid
  Variant (21)..(21): Xaa in position 21 is any or no amino acid
  Variant (22)..(22): Xaa in position 22 is Met, Ile, Leu or Phe
  Variant (23)..(24): Xaa in position 23 to 24 is any amino acid
  Variant (25)..(25): Xaa in position 25 is Asp, Ser or Asn
  Variant (26)..(26): Xaa in position 26 is any amino acid
  Variant (27)..(27): Xaa in position 27 is Leu, Phe or Ala
  Variant (28)..(31): Xaa in position 28 to 31 is any amino acid
  Variant (32)..(36): Xaa in position 32 to 36 is any or no amino acid
  Variant (37)..(37): Xaa in position 37 is Val, Ile or Cys
  Variant (38)..(38): Xaa in position 38 is Lys, Ile or Arg
  Variant (39)..(39): Xaa in position 39 is Leu or Ile
  Variant (40)..(40): Xaa in position 40 is any amino acid
  Variant (41)..(41): Xaa in position 41 is Gly, Ala or Asp
  Variant (42)..(42): Xaa in position 42 is any amino acid
  Variant (44)..(44): Xaa in position 44 is Ile, Val or Leu
  Variant (45)..(45): Xaa in position 45 is Ala, Ser or Val
  Variant (46)..(46): Xaa in position 46 is Phe, Cys or Leu
  Variant (48)..(48): Xaa in position 48 is any amino acid
  Variant (49)..(49): Xaa in position 49 is Gln or His
  Variant (50)..(50): Xaa in position 50 is any or no amino acid
  Variant (51)..(51): Xaa in position 51 is Val, Leu, Ile or Thr
  Variant (52)..(54): Xaa in position 52 to 54 is any amino acid
  Variant (55)..(55): Xaa in position 55 is Ser, Ala or Thr
  Variant (56)..(58): Xaa in position 56 to 58 is any amino acid
  Variant (59)..(59): Xaa in position 59 is Val, Leu, Ile or Cys
  Variant (60)..(60): Xaa in position 60 is Lys, Ile or Glu
  Variant (61)..(61): Xaa in position 61 is any amino acid
  Variant (62)..(62): Xaa in position 62 is Val, Ala or Cys
  Variant (63)..(64): Xaa in position 63 to 64 is any amino acid
  Variant (65)..(65): Xaa in position 65 is Glu, Asp or Arg

SEQ ID NO: 34847 - DNA, 1390 bp, Saccharomyces cerevisiae; identical to SEQ ID NO: 531
  CDS (303)..(1118)

SEQ ID NO: 34848 - protein, 271 aa, Saccharomyces cerevisiae; identical to SEQ ID NO: 532

SEQ ID NO: 34849 - DNA, 714 bp, Deinococcus radiodurans; identical to SEQ ID NO: 533
  CDS (1)..(714)

SEQ ID NO: 34850 - protein, 237 aa, Deinococcus radiodurans; identical to SEQ ID NO: 534

SEQ ID NO: 34851 - DNA, 1350 bp, Nostoc sp. PCC 7120; identical to SEQ ID NO: 535
  CDS (1)..(1350)

SEQ ID NO: 34852 - protein, 449 aa, Nostoc sp. PCC 7120; identical to SEQ ID NO: 536

SEQ ID NO: 34853 - DNA, 636 bp, Listeria monocytogenes; identical to SEQ ID NO: 537
  CDS (1)..(636)

SEQ ID NO: 34854 - protein, 211 aa, Listeria monocytogenes; identical to SEQ ID NO: 538

SEQ ID NO: 34855 - DNA, 636 bp, Listeria innocua; identical to SEQ ID NO: 539
  CDS (1)..(636)

SEQ ID NO: 34856 - protein, 211 aa, Listeria innocua; identical to SEQ ID NO: 540

SEQ ID NO: 34857 - DNA, 654 bp, Brucella melitensis; identical to SEQ ID NO: 541
  CDS (1)..(654)

SEQ ID NO: 34858 - protein, 217 aa, Brucella melitensis; identical to SEQ ID NO: 542

SEQ ID NO: 34859 - DNA, 813 bp, Nostoc sp. PCC 7120; identical to SEQ ID NO: 543
  CDS (1)..(813)

SEQ ID NO: 34860 - protein, 270 aa, Nostoc sp. PCC 7120; identical to SEQ ID NO: 544

SEQ ID NO: 34861 - DNA, 615 bp, Deinococcus radiodurans; identical to SEQ ID NO: 545
  CDS (1)..(615)

SEQ ID NO: 34862 - protein, 204 aa, Deinococcus radiodurans; identical to SEQ ID NO: 546

SEQ ID NO: 34863 - DNA, 714 bp, Caulobacter crescentus; identical to SEQ ID NO: 547
  CDS (1)..(714)

SEQ ID NO: 34864 - protein, 237 aa, Caulobacter crescentus; identical to SEQ ID NO: 548

SEQ ID NO: 34865 - DNA, 756 bp, Treponema pallidum subsp. pallidum (syphilis spirochete); identical to SEQ ID NO: 549
  CDS (1)..(756)

SEQ ID NO: 34866 - protein, 251 aa, Treponema pallidum subsp. pallidum (syphilis spirochete); identical to SEQ ID NO: 550

SEQ ID NO: 34867 - DNA, 645 bp, Xylella fastidiosa; identical to SEQ ID NO: 551
  CDS (1)..(645)

SEQ ID NO: 34868 - protein, 214 aa, Xylella fastidiosa; identical to SEQ ID NO: 552

SEQ ID NO: 34869 - DNA, 2034 bp, Arabidopsis thaliana (mouse-ear cress); identical to SEQ ID NO: 553
  CDS (1)..(2034)

SEQ ID NO: 34870 - protein, 677 aa, Arabidopsis thaliana (mouse-ear cress); identical to SEQ ID NO: 554

SEQ ID NO: 34871 - DNA, 582 bp, Bacillus subtilis; identical to SEQ ID NO: 555
  CDS (1)..(582)

SEQ ID NO: 34872 - protein, 193 aa, Bacillus subtilis; identical to SEQ ID NO: 556

SEQ ID NO: 34873 - DNA, 606 bp, Thermotoga maritima; identical to SEQ ID NO: 557
  CDS (1)..(606)

SEQ ID NO: 34874 - protein, 201 aa, Thermotoga maritima; identical to SEQ ID NO: 558

SEQ ID NO: 34875 - DNA, 660 bp, Clostridium acetobutylicum; identical to SEQ ID NO: 559
  CDS (1)..(660)

SEQ ID NO: 34876 - protein, 219 aa, Clostridium acetobutylicum; identical to SEQ ID NO: 560

SEQ ID NO: 34877 - DNA, 744 bp, Saccharomyces cerevisiae; identical to SEQ ID NO: 561
  CDS (1)..(744)

SEQ ID NO: 34878 - protein, 247 aa, Saccharomyces cerevisiae; identical to SEQ ID NO: 562

SEQ ID NO: 34879 - DNA, 1050 bp, Synechocystis sp; identical to SEQ ID NO: 563
  CDS (1)..(1050)

SEQ ID NO: 34880 - protein, 349 aa, Synechocystis sp; identical to SEQ ID NO: 564

SEQ ID NO: 34881 - DNA, 875 bp, Arabidopsis thaliana (mouse-ear cress); identical to SEQ ID NO: 565
  CDS (30)..(722)

SEQ ID NO: 34882 - protein, 230 aa, Arabidopsis thaliana (mouse-ear cress); identical to SEQ ID NO: 566

SEQ ID NO: 34883 - DNA, 741 bp, Debaryomyces hansenii; identical to SEQ ID NO: 567
  CDS (1)..(741)

SEQ ID NO: 34884 - protein, 246 aa, Debaryomyces hansenii; identical to SEQ ID NO: 568

SEQ ID NO: 34885 - DNA, 741 bp, Yarrowia lipolytica; identical to SEQ ID NO: 569
  CDS (1)..(741)

SEQ ID NO: 34886 - protein, 246 aa, Yarrowia lipolytica; identical to SEQ ID NO: 570

SEQ ID NO: 34887 - DNA, 816 bp, Kluyveromyces lactis; identical to SEQ ID NO: 571
  CDS (1)..(816)

SEQ ID NO: 34888 - protein, 271 aa, Kluyveromyces lactis; identical to SEQ ID NO: 572

SEQ ID NO: 34889 - DNA, 687 bp, Kluyveromyces lactis; identical to SEQ ID NO: 573
  CDS (1)..(687)

SEQ ID NO: 34890 - protein, 228 aa, Kluyveromyces lactis; identical to SEQ ID NO: 574

SEQ ID NO: 34891 - DNA, 651 bp, Erwinia carotovora subsp; identical to SEQ ID NO: 575
  CDS (1)..(651)

SEQ ID NO: 34892 - protein, 216 aa, Erwinia carotovora subsp; identical to SEQ ID NO: 576

SEQ ID NO: 34893 - DNA, 840 bp, Candida glabrata; identical to SEQ ID NO: 577
  CDS (1)..(840)

SEQ ID NO: 34894 - protein, 279 aa, Candida glabrata; identical to SEQ ID NO: 578

SEQ ID NO: 34895 - DNA, 744 bp, Candida glabrata; identical to SEQ ID NO: 579
  CDS (1)..(744)

SEQ ID NO: 34896 - protein, 247 aa, Candida glabrata; identical to SEQ ID NO: 580

SEQ ID NO: 34897 - DNA, 621 bp, Bartonella quintana; identical to SEQ ID NO: 581
  CDS (1)..(621)

SEQ ID NO: 34898 - protein, 206 aa, Bartonella quintana; identical to SEQ ID NO: 582

SEQ ID NO: 34899 - DNA, 648 bp, Parachlamydia sp; identical to SEQ ID NO: 583
  CDS (1)..(648)

SEQ ID NO: 34900 - protein, 215 aa, Parachlamydia sp; identical to SEQ ID NO: 584

SEQ ID NO: 34901 - DNA, 636 bp, Listeria monocytogenes; identical to SEQ ID NO: 585
  CDS (1)..(636)

SEQ ID NO: 34902 - protein, 211 aa, Listeria monocytogenes; identical to SEQ ID NO: 586

SEQ ID NO: 34903 - DNA, 633 bp, Thermus thermophilus; identical to SEQ ID NO: 587
  CDS (1)..(633)

SEQ ID NO: 34904 - protein, 210 aa, Thermus thermophilus; identical to SEQ ID NO: 588

SEQ ID NO: 34905 - DNA, 654 bp, Mycobacterium paratuberculosis; identical to SEQ ID NO: 589
  CDS (1)..(654)

SEQ ID NO: 34906 - protein, 217 aa, Mycobacterium paratuberculosis; identical to SEQ ID NO: 590

SEQ ID NO: 34907 - DNA, 1134 bp, Mycobacterium paratuberculosis; identical to SEQ ID NO: 591
  CDS (1)..(1134)

SEQ ID NO: 34908 - protein, 377 aa, Mycobacterium paratuberculosis; identical to SEQ ID NO: 592

SEQ ID NO: 34909 - DNA, 627 bp, Lactobacillus johnsonii; identical to SEQ ID NO: 593
  CDS (1)..(627)

SEQ ID NO: 34910 - protein, 208 aa, Lactobacillus johnsonii; identical to SEQ ID NO: 594

SEQ ID NO: 34911 - DNA, 807 bp, Ashbya gossypii; identical to SEQ ID NO: 595
  CDS (1)..(807)

SEQ ID NO: 34912 - protein, 268 aa, Ashbya gossypii; identical to SEQ ID NO: 596

SEQ ID NO: 34913 - DNA, 687 bp, Mycobacterium tuberculosis; identical to SEQ ID NO: 597
  CDS (1)..(687)

SEQ ID NO: 34914 - protein, 228 aa, Mycobacterium tuberculosis; identical to SEQ ID NO: 598

SEQ ID NO: 34915 - DNA, 618 bp, Photorhabdus luminescens; identical to SEQ ID NO: 599
  CDS (1)..(618)

SEQ ID NO: 34916 - protein, 205 aa, Photorhabdus luminescens; identical to SEQ ID NO: 600

SEQ ID NO: 34917 - DNA, 588 bp, Anopheles gambiae str; identical to SEQ ID NO: 601
  CDS (1)..(588)

SEQ ID NO: 34918 - protein, 195 aa, Anopheles gambiae str; identical to SEQ ID NO: 602

SEQ ID NO: 34919 - DNA, 3762 bp, Neurospora crassa; identical to SEQ ID NO: 603
  CDS (1)..(3762)

SEQ ID NO: 34920 - protein, 1253 aa, Neurospora crassa; identical to SEQ ID NO: 604

SEQ ID NO: 34921 - DNA, 567 bp, Synechococcus sp; identical to SEQ ID NO: 605
  CDS (1)..(567)

SEQ ID NO: 34922 - protein, 188 aa, Synechococcus sp; identical to SEQ ID NO: 606

SEQ ID NO: 34923 - DNA, 612 bp, Rhodopirellula baltica; identical to SEQ ID NO: 607
  CDS (1)..(612)

SEQ ID NO: 34924 - protein, 203 aa, Rhodopirellula baltica; identical to SEQ ID NO: 608

SEQ ID NO: 34925 - DNA, 1329 bp, Prochlorococcus marinus subsp; identical to SEQ ID NO: 609
  CDS (1)..(1329)

SEQ ID NO: 34926 - protein, 442 aa, Prochlorococcus marinus subsp; identical to SEQ ID NO: 610

SEQ ID NO: 34927 - DNA, 1332 bp, Prochlorococcus marinus; identical to SEQ ID NO: 611
  CDS (1)..(1332)

SEQ ID NO: 34928 - protein, 443 aa, Prochlorococcus marinus; identical to SEQ ID NO: 612

SEQ ID NO: 34929 - DNA, 591 bp, Prochlorococcus marinus; identical to SEQ ID NO: 613
  CDS (1)..(591)

SEQ ID NO: 34930 - protein, 196 aa, Prochlorococcus marinus; identical to SEQ ID NO: 614

SEQ ID NO: 34931 - DNA, 618 bp, Streptomyces avermitilis; identical to SEQ ID NO: 615
  CDS (1)..(618)

SEQ ID NO: 34932 - protein, 205 aa, Streptomyces avermitilis; identical to SEQ ID NO: 616

SEQ ID NO: 34933 - DNA, 600 bp, Streptomyces avermitilis; identical to SEQ ID NO: 617
  CDS (1)..(600)

SEQ ID NO: 34934 - protein, 199 aa, Streptomyces avermitilis; identical to SEQ ID NO: 618

SEQ ID NO: 34935 - DNA, 612 bp, Streptomyces avermitilis; identical to SEQ ID NO: 619
  CDS (1)..(612)

SEQ ID NO: 34936 - protein, 203 aa, Streptomyces avermitilis; identical to SEQ ID NO: 620

SEQ ID NO: 34937 - DNA, 645 bp, Enterococcus faecalis; identical to SEQ ID NO: 621
  CDS (1)..(645)

SEQ ID NO: 34938 - protein, 214 aa, Enterococcus faecalis; identical to SEQ ID NO: 622

SEQ ID NO: 34939 - DNA, 666 bp, Lactobacillus plantarum; identical to SEQ ID NO: 623
  CDS (1)..(666)

SEQ ID NO: 34940 - protein, 221 aa, Lactobacillus plantarum; identical to SEQ ID NO: 624

SEQ ID NO: 34941 - DNA, 642 bp, Clostridium tetani; identical to SEQ ID NO: 625
  CDS (1)..(642)

SEQ ID NO: 34942 - protein, 213 aa, Clostridium tetani; identical to SEQ ID NO: 626

SEQ ID NO: 34943 - DNA, 600 bp, Bradyrhizobium japonicum; identical to SEQ ID NO: 627
  CDS (1)..(600)

SEQ ID NO: 34944 - protein, 199 aa, Bradyrhizobium japonicum; identical to SEQ ID NO: 628

SEQ ID NO: 34945 - DNA, 1407 bp, Synechococcus elongatus; identical to SEQ ID NO: 629
  CDS (1)..(1407)

SEQ ID NO: 34946 - protein, 468 aa, Synechococcus elongatus; identical to SEQ ID NO: 630

SEQ ID NO: 34947 - DNA, 582 bp, Oceanobacillus iheyensis; identical to SEQ ID NO: 631
  CDS (1)..(582)

SEQ ID NO: 34948 - protein, 193 aa, Oceanobacillus iheyensis; identical to SEQ ID NO: 632

SEQ ID NO: 34949 - DNA, 648 bp, Bifidobacterium longum; identical to SEQ ID NO: 633
  CDS (1)..(648)

SEQ ID NO: 34950 - protein, 215 aa, Bifidobacterium longum; identical to SEQ ID NO: 634

SEQ ID NO: 34951 - DNA, 1005 bp, Arabidopsis thaliana; identical to SEQ ID NO: 635
  CDS (1)..(1005)

SEQ ID NO: 34952 - protein, 334 aa, Arabidopsis thaliana; identical to SEQ ID NO: 636

SEQ ID NO: 34953 - DNA, 645 bp, Xanthomonas campestris; identical to SEQ ID NO: 637
  CDS (1)..(645)

SEQ ID NO: 34954 - protein, 214 aa, Xanthomonas campestris; identical to SEQ ID NO: 638

SEQ ID NO: 34955 - DNA, 645 bp, Xanthomonas axonopodis; identical to SEQ ID NO: 639
  CDS (1)..(645)

SEQ ID NO: 34956 - protein, 214 aa, Xanthomonas axonopodis; identical to SEQ ID NO: 640

SEQ ID NO: 34957 - DNA, 621 bp, Thermoanaerobacter tengcongensis; identical to SEQ ID NO: 641
  CDS (1)..(621)

SEQ ID NO: 34958 - protein, 206 aa, Thermoanaerobacter tengcongensis; identical to SEQ ID NO: 642

SEQ ID NO: 34959 - DNA, 582 bp, Rhizobium loti; identical to SEQ ID NO: 643
  CDS (1)..(582)

SEQ ID NO: 34960 - protein, 193 aa, Rhizobium loti; identical to SEQ ID NO: 644

SEQ ID NO: 34961 - DNA, 651 bp, Pasteurella multocida; identical to SEQ ID NO: 645
  CDS (1)..(651)

SEQ ID NO: 34962 - protein, 216 aa, Pasteurella multocida; identical to SEQ ID NO: 646

SEQ ID NO: 34963 - DNA, 597 bp, Streptomyces coelicolor; identical to SEQ ID NO: 647
  CDS (1)..(597)

SEQ ID NO: 34964 - protein, 198 aa, Streptomyces coelicolor; identical to SEQ ID NO: 648

SEQ ID NO: 34965 - DNA, 600 bp, Streptomyces coelicolor; identical to SEQ ID NO: 649
  CDS (1)..(600)

SEQ ID NO: 34966 - protein, 199 aa, Streptomyces coelicolor; identical to SEQ ID NO: 650

SEQ ID NO: 34967 - DNA, 660 bp, Gloeobacter violaceus; identical to SEQ ID NO: 651
  CDS (1)..(660)

SEQ ID NO: 34968 - protein, 219 aa, Gloeobacter violaceus; identical to SEQ ID NO: 652

SEQ ID NO: 34969 - DNA, 621 bp, Bartonella henselae; identical to SEQ ID NO: 653
  CDS (1)..(621)

SEQ ID NO: 34970 - protein, 206 aa, Bartonella henselae; identical to SEQ ID NO: 654

SEQ ID NO: 34971 - DNA, 681 bp, Parachlamydia sp; identical to SEQ ID NO: 655
  CDS (1)..(681)

SEQ ID NO: 34972 - protein, 226 aa, Parachlamydia sp; identical to SEQ ID NO: 656

SEQ ID NO: 34973 - DNA, 636 bp, Rhizobium meliloti; identical to SEQ ID NO: 657
  CDS (1)..(636)

SEQ ID NO: 34974 - protein, 211 aa, Rhizobium meliloti; identical to SEQ ID NO: 658

SEQ ID NO: 34975 - DNA, 648 bp, Escherichia coli O6; identical to SEQ ID NO: 659
  CDS (1)..(648)

SEQ ID NO: 34976 - protein, 215 aa, Escherichia coli O6; identical to SEQ ID NO: 660

SEQ ID NO: 34977 - DNA, 648 bp, Photorhabdus luminescens; identical to SEQ ID NO: 661
  CDS (1)..(648)

SEQ ID NO: 34978 - protein, 215 aa, Photorhabdus luminescens; identical to SEQ ID NO: 662

SEQ ID NO: 34979 - DNA, 648 bp, Salmonella typhimurium; identical to SEQ ID NO: 663
  CDS (1)..(648)

SEQ ID NO: 34980 - protein, 215 aa, Salmonella typhimurium; identical to SEQ ID NO: 664

SEQ ID NO: 34981 - DNA, 22 bp, Artificial sequence
  Primer sequence
atgccttcgctaacccccagat

SEQ ID NO: 34982 - DNA, 23 bp, Artificial sequence
  Primer sequence
ttacacatcgccatgctgggatt

SEQ ID NO: 34983 - protein, 289 aa, Artificial sequence
  Consensus
  Variant (2)..(2): Xaa in position 2 is any amino acid
  Variant (8)..(8): Xaa in position 8 is any amino acid
  Variant (10)..(10): Xaa in position 10 is any amino acid
  Variant (12)..(18): Xaa in position 12 to 18 is any amino acid
  Variant (20)..(21): Xaa in position 20 to 21 is any amino acid
  Variant (22)..(22): Xaa in position 22 is any or no amino acid
  Variant (24)..(25): Xaa in position 24 to 25 is any amino acid
  Variant (27)..(29): Xaa in position 27 to 29 is any amino acid
  Variant (31)..(33): Xaa in position 31 to 33 is any amino acid
  Variant (35)..(37): Xaa in position 35 to 37 is any amino acid
  Variant (39)..(40): Xaa in position 39 to 40 is any amino acid
  Variant (42)..(49): Xaa in position 42 to 49 is any amino acid
  Variant (50)..(60): Xaa in position 50 to 60 is any or no amino acid
  Variant (62)..(64): Xaa in position 62 to 64 is any amino acid
  Variant (66)..(68): Xaa in position 66 to 68 is any amino acid
  Variant (70)..(83): Xaa in position 70 to 83 is any amino acid
  Variant (84)..(116): Xaa in position 84 to 116 is any or no amino acid
  Variant (118)..(118): Xaa in position 118 is any amino acid
  Variant (120)..(122): Xaa in position 120 to 122 is any amino acid
  Variant (124)..(126): Xaa in position 124 to 126 is any amino acid
  Variant (128)..(153): Xaa in position 128 to 153 is any amino acid
  Variant (154)..(193): Xaa in position 154 to 193 is any or no amino acid
  Variant (195)..(206): Xaa in position 195 to 206 is any amino acid
  Variant (207)..(217): Xaa in position 207 to 217 is any or no amino acid
  Variant (221)..(221): Xaa in position 221 is any amino acid
  Variant (225)..(226): Xaa in position 225 to 226 is any amino acid
  Variant (228)..(229): Xaa in position 228 to 229 is any amino acid
  Variant (231)..(249): Xaa in position 231 to 249 is any amino acid
  Variant (250)..(285): Xaa in position 250 to 285 is any or no amino acid
  Variant (287)..(288): Xaa in position 287 to 288 is any amino acid
LXLVRHGXTXWXXXXXXXGXXXDXXLXXXGXXXAXXXGXXLXXXXXXXXXXXXXXXXXXXSXXXRXXXTXXXXXXXXXXXXXXXXXXXXXXXXXXXXXXXXXXXXXXXXXXXXXXXLXEXXXGXXXGXXXXXXXXXXXXXXXXXXXXXXXXXXXXXXXXXXXXXXXXXXXXXXXXXXXXXXXXXXXXXXXXXXRXXXXXXXXXXXXXXXXXXXXXXXVLVXAHGXXLXXLXXXXXXXXXXXXXXXXXXXXXXXXXXXXXXXXXXXXXXXXXXXXXXXXXXXXXXXIXXL

SEQ ID NO: 34984 - protein, 65 aa, Artificial sequence; identical to SEQ ID NO: 1307
  Consensus
  Variant (4)..(4): Xaa in position 4 is Glu, Gln, Lys or Ala
  Variant (5)..(5): Xaa in position 5 is Thr or Ser
  Variant (6)..(6): Xaa in position 6 is any amino acid
  Variant (7)..(7): Xaa in position 7 is Trp, Phe or Tyr
  Variant (8)..(8): Xaa in position 8 is Asn, Ser or Ala
  Variant (9)..(13): Xaa in position 9 to 13 is any amino acid
  Variant (14)..(14): Xaa in position 14 is Gln or Thr
  Variant (15)..(15): Xaa in position 15 is Gly or Ser
  Variant (16)..(16): Xaa in position 16 is any amino acid
  Variant (17)..(18): Xaa in position 17 to 18 is any or no amino acid
  Variant (19)..(19): Xaa in position 19 is Asp, Asn or Glu
  Variant (20)..(21): Xaa in position 20 to 21 is any amino acid
  Variant (23)..(25): Xaa in position 23 to 25 is any amino acid
  Variant (26)..(26): Xaa in position 26 is Gly or Ser
  Variant (27)..(29): Xaa in position 27 to 29 is any amino acid
  Variant (30)..(30): Xaa in position 30 is Ala, Met, Val or Ile
  Variant (31)..(36): Xaa in position 31 to 36 is any amino acid
  Variant (37)..(37): Xaa in position 37 is Leu, Ile, Val, Ala or Phe
  Variant (38)..(44): Xaa in position 38 to 44 is any amino acid
  Variant (45)..(55): Xaa in position 45 to 55 is any or no amino acid
  Variant (56)..(56): Xaa in position 56 is Thr, Ser, Ala or Val
  Variant (58)..(60): Xaa in position 58 to 60 is any amino acid
  Variant (62)..(62): Xaa in position 62 is Ala, Thr or Pro
  Variant (63)..(64): Xaa in position 63 to 64 is any amino acid

SEQ ID NO: 34985 - DNA, 1239 bp, Saccharomyces cerevisiae; identical to SEQ ID NO: 5653
  CDS (1)..(1239)

SEQ ID NO: 34986 - protein, 412 aa, Saccharomyces cerevisiae; identical to SEQ ID NO: 5654

SEQ ID NO: 34987 - DNA, 1719 bp, Rattus norvegicus (Norway rat); identical to SEQ ID NO: 5655
  CDS (30)..(1274)

SEQ ID NO: 34988 - protein, 414 aa, Rattus norvegicus (Norway rat); identical to SEQ ID NO: 5656

SEQ ID NO: 34989 - DNA, 1212 bp, Caulobacter crescentus; identical to SEQ ID NO: 5657
  CDS (1)..(1212)

SEQ ID NO: 34990 - protein, 403 aa, Caulobacter crescentus; identical to SEQ ID NO: 5658

SEQ ID NO: 34991 - DNA, 1551 bp, Arabidopsis thaliana (mouse-ear cress); identical to SEQ ID NO: 5659
  CDS (21)..(1271)

SEQ ID NO: 34992 - protein, 416 aa, Arabidopsis thaliana (mouse-ear cress); identical to SEQ ID NO: 5660

SEQ ID NO: 34993 - DNA, 1368 bp, Agrobacterium tumefaciens; identical to SEQ ID NO: 5661
  CDS (1)..(1368)

SEQ ID NO: 34994 - protein, 455 aa, Agrobacterium tumefaciens; identical to SEQ ID NO: 5662

SEQ ID NO: 34995 - DNA, 1230 bp, Mycobacterium tuberculosis; identical to SEQ ID NO: 5663
  CDS (1)..(1230)

SEQ ID NO: 34996 - protein, 409 aa, Mycobacterium tuberculosis; identical to SEQ ID NO: 5664

SEQ ID NO: 34997 - DNA, 1608 bp, Saccharomyces cerevisiae; identical to SEQ ID NO: 5665
  CDS (111)..(1397)

SEQ ID NO: 34998 - protein, 428 aa, Saccharomyces cerevisiae; identical to SEQ ID NO: 5666

SEQ ID NO: 34999 - DNA, 1242 bp, Sulfolobus solfataricus; identical to SEQ ID NO: 5667
  CDS (1)..(1242)

SEQ ID NO: 35000 - protein, 413 aa, Sulfolobus solfataricus; identical to SEQ ID NO: 5668

SEQ ID NO: 35001 - DNA, 1200 bp, Thermotoga maritima; identical to SEQ ID NO: 5669
  CDS (1)..(1200)

SEQ ID NO: 35002 - protein, 399 aa, Thermotoga maritima; identical to SEQ ID NO: 5670

SEQ ID NO: 35003 - DNA, 1221 bp, Sphingomonas yanoikuyae; identical to SEQ ID NO: 5671
  CDS (1)..(1221)

SEQ ID NO: 35004 - protein, 406 aa, Sphingomonas yanoikuyae; identical to SEQ ID NO: 5672

SEQ ID NO: 35005 - DNA, 1740 bp, Bos primigenius taurus (cattle); identical to SEQ ID NO: 5673
  CDS (67)..(1425)

SEQ ID NO: 35006 - protein, 452 aa, Bos primigenius taurus (cattle); identical to SEQ ID NO: 5674

SEQ ID NO: 35007 - DNA, 1569 bp, Solanum tuberosum (potato); identical to SEQ ID NO: 5675
  CDS (69)..(1319)

SEQ ID NO: 35008 - protein, 416 aa, Solanum tuberosum (potato); identical to SEQ ID NO: 5676

SEQ ID NO: 35009 - DNA, 1850 bp, Saccharomyces cerevisiae; identical to SEQ ID NO: 5677
  CDS (461)..(1723)

SEQ ID NO: 35010 - protein, 420 aa, Saccharomyces cerevisiae; identical to SEQ ID NO: 5678

SEQ ID NO: 35011 - DNA, 1584 bp, Nicotiana tabacum (common tobacco); identical to SEQ ID NO: 5679
  CDS (85)..(1332)

SEQ ID NO: 35012 - protein, 415 aa, Nicotiana tabacum (common tobacco); identical to SEQ ID NO: 5680

SEQ ID NO: 35013 - DNA, 1722 bp, Nicotiana tabacum (common tobacco); identical to SEQ ID NO: 5681
  CDS (76)..(1524)

SEQ ID NO: 35014 - protein, 482 aa, Nicotiana tabacum (common tobacco); identical to SEQ ID NO: 5682

SEQ ID NO: 35015 - DNA, 1308 bp, Caenorhabditis elegans; identical to SEQ ID NO: 5683
  CDS (1)..(1308)

SEQ ID NO: 35016 - protein, 435 aa, Caenorhabditis elegans; identical to SEQ ID NO: 5684

SEQ ID NO: 35017 - DNA, 1239 bp, Caenorhabditis elegans; identical to SEQ ID NO: 5685
  CDS (1)..(1239)

SEQ ID NO: 35018 - protein, 412 aa, Caenorhabditis elegans; identical to SEQ ID NO: 5686

SEQ ID NO: 35019 - DNA, 1257 bp, Schizosaccharomyces pombe; identical to SEQ ID NO: 5687
  CDS (1)..(1257)

SEQ ID NO: 35020 - protein, 418 aa, Schizosaccharomyces pombe; identical to SEQ ID NO: 5688

SEQ ID NO: 35021 - DNA, 1827 bp, Glycine max; identical to SEQ ID NO: 5689
  CDS (289)..(1539)

SEQ ID NO: 35022 - protein, 416 aa, Glycine max; identical to SEQ ID NO: 5690

SEQ ID NO: 35023 - DNA, 1645 bp, Eucalyptus globulus; identical to SEQ ID NO: 5691
  CDS (161)..(1411)

SEQ ID NO: 35024 - protein, 416 aa, Eucalyptus globulus; identical to SEQ ID NO: 5692

SEQ ID NO: 35025 - DNA, 1596 bp, Homo sapiens; identical to SEQ ID NO: 5693
  CDS (44)..(1303)

SEQ ID NO: 35026 - protein, 419 aa, Homo sapiens [sequence omitted]

SEQ ID NO: 35027 - DNA, 1233 bp, Debaryomyces hansenii; identical to SEQ ID NO: 5695
  CDS (1)..(1233)

SEQ ID NO: 35028 - protein, 410 aa, Debaryomyces hansenii; identical to SEQ ID NO: 5696

SEQ ID NO: 35029 - DNA, 1296 bp, Debaryomyces hansenii; identical to SEQ ID NO: 5697
  CDS (1)..(1296)

SEQ ID NO: 35030 - protein, 431 aa, Debaryomyces hansenii; identical to SEQ ID NO: 5698

SEQ ID NO: 35031 - DNA, 1326 bp, Yarrowia lipolytica; identical to SEQ ID NO: 5699
  CDS (1)..(1326)

SEQ ID NO: 35032 - protein, 441 aa, Yarrowia lipolytica; identical to SEQ ID NO: 5700

SEQ ID NO: 35033 - DNA, 1248 bp, Kluyveromyces lactis; identical to SEQ ID NO: 5701
  CDS (1)..(1248)

SEQ ID NO: 35034 - protein, 415 aa, Kluyveromyces lactis; identical to SEQ ID NO: 5702

SEQ ID NO: 35035 - DNA, 1290 bp, Kluyveromyces lactis; identical to SEQ ID NO: 5703
  CDS (1)..(1290)

SEQ ID NO: 35036 - protein, 429 aa, Kluyveromyces lactis; identical to SEQ ID NO: 5704

SEQ ID NO: 35037 - DNA, 1257 bp, Candida glabrata; identical to SEQ ID NO: 5705
  CDS (1)..(1257)

SEQ ID NO: 35038 - protein, 418 aa, Candida glabrata; identical to SEQ ID NO: 5706

SEQ ID NO: 35039 - DNA, 1272 bp, Candida glabrata; identical to SEQ ID NO: 5707
  CDS (1)..(1272)

SEQ ID NO: 35040 - protein, 423 aa, Candida glabrata; identical to SEQ ID NO: 5708

SEQ ID NO: 35041 - DNA, 1236 bp, Candida glabrata; identical to SEQ ID NO: 5709
  CDS (1)..(1236)

SEQ ID NO: 35042 - protein, 411 aa, Candida glabrata; identical to SEQ ID NO: 5710

SEQ ID NO: 35043 - DNA, 1215 bp, Bartonella quintana; identical to SEQ ID NO: 5711
  CDS (1)..(1215)

SEQ ID NO: 35044 - protein, 404 aa, Bartonella quintana; identical to SEQ ID NO: 5712

SEQ ID NO: 35045 - DNA, 1215 bp, Bartonella henselae; identical to SEQ ID NO: 5713
  CDS (1)..(1215)

SEQ ID NO: 35046 - protein, 404 aa, Bartonella henselae; identical to SEQ ID NO: 5714

SEQ ID NO: 35047 - DNA, 1212 bp, Rhizobium leguminosarum; identical to SEQ ID NO: 5715
  CDS (1)..(1212)

SEQ ID NO: 35048 - protein, 403 aa, Rhizobium leguminosarum; identical to SEQ ID NO: 5716

SEQ ID NO: 35049 - DNA, 1230 bp, Bdellovibrio bacteriovorus; identical to SEQ ID NO: 5717
  CDS (1)..(1230)

SEQ ID NO: 35050 - protein, 409 aa, Bdellovibrio bacteriovorus; identical to SEQ ID NO: 5718

SEQ ID NO: 35051 - DNA, 1227 bp, Rhodopseudomonas palustris; identical to SEQ ID NO: 5719
  CDS (1)..(1227)

SEQ ID NO: 35052 - protein, 408 aa, Rhodopseudomonas palustris; identical to SEQ ID NO: 5720

SEQ ID NO: 35053 - DNA, 1564 bp, Pisum sativum; identical to SEQ ID NO: 5721
  CDS (79)..(1317)

SEQ ID NO: 35054 - protein, 412 aa, Pisum sativum; identical to SEQ ID NO: 5722

SEQ ID NO: 35055 - DNA, 2254 bp, Ovis aries; identical to SEQ ID NO: 5723
  CDS (167)..(1411)

SEQ ID NO: 35056 - protein, 414 aa, Ovis aries; identical to SEQ ID NO: 5724

SEQ ID NO: 35057 - DNA, 1197 bp, Leptospira interrogans; identical to SEQ ID NO: 5725
  CDS (1)..(1197)

SEQ ID NO: 35058 - protein, 398 aa, Leptospira interrogans; identical to SEQ ID NO: 5726

SEQ ID NO: 35059 - DNA, 1239 bp, Mycobacterium paratuberculosis; identical to SEQ ID NO: 5727
  CDS (1)..(1239)

SEQ ID NO: 35060 - protein, 412 aa, Mycobacterium paratuberculosis; identical to SEQ ID NO: 5728

SEQ ID NO: 35061 - DNA, 1278 bp, Ashbya gossypii; identical to SEQ ID NO: 5729
  CDS (1)..(1278)

SEQ ID NO: 35062 - protein, 425 aa, Ashbya gossypii; identical to SEQ ID NO: 5730

SEQ ID NO: 35063 - DNA, 1248 bp, Ashbya gossypii; identical to SEQ ID NO: 5731
  CDS (1)..(1248)

SEQ ID NO: 35064 - protein, 415 aa, Ashbya gossypii; identical to SEQ ID NO: 5732

SEQ ID NO: 35065 - DNA, 1287 bp, Dictyostelium discoideum; identical to SEQ ID NO: 5733
  CDS (1)..(1287)

SEQ ID NO: 35066 - protein, 428 aa, Dictyostelium discoideum; identical to SEQ ID NO: 5734

SEQ ID NO: 35067 - DNA, 1594 bp, Oryza sativa; identical to SEQ ID NO: 5735
  CDS (66)..(1304)

SEQ ID NO: 35068 - protein, 412 aa, Oryza sativa; identical to SEQ ID NO: 5736

SEQ ID NO: 35069 - DNA, 1230 bp, Gloeobacter violaceus; identical to SEQ ID NO: 5737
  CDS (1)..(1230)

SEQ ID NO: 35070 - protein, 409 aa, Gloeobacter violaceus; identical to SEQ ID NO: 5738

SEQ ID NO: 35071 - DNA, 1410 bp, Plasmodium yoelii yoelii; identical to SEQ ID NO: 5739
  CDS (1)..(1410)

SEQ ID NO: 35072 - protein, 469 aa, Plasmodium yoelii yoelii; identical to SEQ ID NO: 5740

SEQ ID NO: 35073 - DNA, 1389 bp, Neurospora crassa; identical to SEQ ID NO: 5741
  CDS (1)..(1389)

SEQ ID NO: 35074 - protein, 462 aa, Neurospora crassa; identical to SEQ ID NO: 5742

SEQ ID NO: 35075 - DNA, 1765 bp, Oryza sativa; identical to SEQ ID NO: 5743
  CDS (83)..(1489)

SEQ ID NO: 35076 - protein, 468 aa, Oryza sativa; identical to SEQ ID NO: 5744

SEQ ID NO: 35077 - DNA, 1794 bp, Lupinus albus; identical to SEQ ID NO: 5745
  CDS (58)..(1515)

SEQ ID NO: 35078 - protein, 485 aa, Lupinus albus; identical to SEQ ID NO: 5746

SEQ ID NO: 35079 - DNA, 1583 bp, Lupinus albus; identical to SEQ ID NO: 5747
  CDS (43)..(1281)

SEQ ID NO: 35080 - protein, 412 aa, Lupinus albus; identical to SEQ ID NO: 5748

SEQ ID NO: 35081 - DNA, 1627 bp, Lupinus albus; identical to SEQ ID NO: 5749
  CDS (79)..(1317)

SEQ ID NO: 35082 - protein, 412 aa, Lupinus albus; identical to SEQ ID NO: 5750

SEQ ID NO: 35083 - DNA, 2305 bp, Homo sapiens; identical to SEQ ID NO: 5751
  CDS (196)..(1440)

SEQ ID NO: 35084 - protein, 414 aa, Homo sapiens [sequence omitted]

SEQ ID NO: 35085 - DNA, 1215 bp, Bradyrhizobium japonicum; identical to SEQ ID NO: 5753
  CDS (1)..(1215)

SEQ ID NO: 35086 - protein, 404 aa, Bradyrhizobium japonicum; identical to SEQ ID NO: 5754

SEQ ID NO: 35087 - DNA, 1215 bp, Brucella suis; identical to SEQ ID NO: 5755
  CDS (1)..(1215)

SEQ ID NO: 35088 - protein, 404 aa, Brucella suis; identical to SEQ ID NO: 5756

SEQ ID NO: 35089 - DNA, 1221 bp, Bifidobacterium longum; identical to SEQ ID NO: 5757
  CDS (1)..(1221)

SEQ ID NO: 35090 - protein, 406 aa, Bifidobacterium longum; identical to SEQ ID NO: 5758

SEQ ID NO: 35091 - DNA, 1407 bp, Plasmodium falciparum; identical to SEQ ID NO: 5759
  CDS (1)..(1407)

SEQ ID NO: 35092 - protein, 468 aa, Plasmodium falciparum; identical to SEQ ID NO: 5760

SEQ ID NO: 35093 - DNA, 1514 bp, Arabidopsis thaliana; identical to SEQ ID NO: 5761
  CDS (1)..(1458)

SEQ ID NO: 35094 - protein, 485 aa, Arabidopsis thaliana; identical to SEQ ID NO: 5762

SEQ ID NO: 35095 - DNA, 1212 bp, Thermoanaerobacter tengcongensis; identical to SEQ ID NO: 5763
  CDS (1)..(1212)

SEQ ID NO: 35096 - protein, 403 aa, Thermoanaerobacter tengcongensis; identical to SEQ ID NO: 5764

SEQ ID NO: 35097 - DNA, 1551 bp, Cucumis sativus; identical to SEQ ID NO: 5765
  CDS (62)..(1294)

SEQ ID NO: 35098 - protein, 410 aa, Cucumis sativus; identical to SEQ ID NO: 5766

SEQ ID NO: 35099 - DNA, 1610 bp, Arabidopsis thaliana; identical to SEQ ID NO: 5767
  CDS (165)..(1397)

SEQ ID NO: 35100 - protein, 410 aa, Arabidopsis thaliana; identical to SEQ ID NO: 5768

SEQ ID NO: 35101 - DNA, 1215 bp, Rhizobium meliloti; identical to SEQ ID NO: 5769
  CDS (1)..(1215)

SEQ ID NO: 35102 - protein, 404 aa, Rhizobium meliloti; identical to SEQ ID NO: 5770

SEQ ID NO: 35103 - DNA, 1561 bp, Prunus persica; identical to SEQ ID NO: 5771
  CDS (1)..(1245)

SEQ ID NO: 35104 - protein, 414 aa, Prunus persica; identical to SEQ ID NO: 5772

SEQ ID NO: 35105 - DNA, 1242 bp, Emericella nidulans; identical to SEQ ID NO: 5773
  CDS (1)..(1242)

SEQ ID NO: 35106 - protein, 413 aa, Emericella nidulans; identical to SEQ ID NO: 5774

SEQ ID NO: 35107 - DNA, 1212 bp, Rhizobium loti; identical to SEQ ID NO: 5775
  CDS (1)..(1212)

SEQ ID NO: 35108 - protein, 403 aa, Rhizobium loti; identical to SEQ ID NO: 5776

SEQ ID NO: 35109 - DNA, 1679 bp, Mus musculus; identical to SEQ ID NO: 5777
  CDS (46)..(1404)

SEQ ID NO: 35110 - protein, 452 aa, Mus musculus; identical to SEQ ID NO: 5778

SEQ ID NO: 35111 - DNA, 1227 bp, Oryza sativa; identical to SEQ ID NO: 5779
  CDS (1)..(1227)

SEQ ID NO: 35112 - protein, 408 aa, Oryza sativa; identical to SEQ ID NO: 5780

SEQ ID NO: 35113 - DNA, 1554 bp, Solanum tuberosum; identical to SEQ ID NO: 5781
  CDS (61)..(1473)

SEQ ID NO: 35114 - protein, 470 aa, Solanum tuberosum; identical to SEQ ID NO: 5782

SEQ ID NO: 35115 - DNA, 1708 bp, Citrus limon; identical to SEQ ID NO: 5783
  misc_feature (1533)..(1533): n is a, c, g, or t
  CDS (155)..(1399)

SEQ ID NO: 35116 - protein, 414 aa, Citrus limon; identical to SEQ ID NO: 5784

SEQ ID NO: 35117 - DNA, 1782 bp, Drosophila melanogaster; identical to SEQ ID NO: 5785
  CDS (430)..(1782)

SEQ ID NO: 35118 - protein, 450 aa, Drosophila melanogaster; identical to SEQ ID NO: 5786

SEQ ID NO: 35119 - DNA, 1503 bp, Oryza sativa; identical to SEQ ID NO: 5787
  CDS (84)..(1322)

SEQ ID NO: 35120 - protein, 412 aa, Oryza sativa; identical to SEQ ID NO: 5788

SEQ ID NO: 35121 - DNA, 1859 bp, Oryza sativa; identical to SEQ ID NO: 5789
  CDS (201)..(1445)

SEQ ID NO: 35122 - protein, 414 aa, Oryza sativa; identical to SEQ ID NO: 5790

SEQ ID NO: 35123 - DNA, 1488 bp, Daucus carota; identical to SEQ ID NO: 5791
  CDS (91)..(1341)

SEQ ID NO: 35124 - protein, 416 aa, Daucus carota; identical to SEQ ID NO: 5792

SEQ ID NO: 35125 - DNA, 1512 bp, Daucus carota; identical to SEQ ID NO: 5793
  CDS (93)..(1331)

SEQ ID NO: 35126 - protein, 412 aa, Daucus carota; identical to SEQ ID NO: 5794

SEQ ID NO: 35127 - DNA, 1600 bp, Candida tropicalis; identical to SEQ ID NO: 5795
  CDS (201)..(1493)

SEQ ID NO: 35128 - protein, 430 aa, Candida tropicalis; identical to SEQ ID NO: 5796

SEQ ID NO: 35129 - DNA, 1560 bp, Glycine max; identical to SEQ ID NO: 5797
  CDS (87)..(1328)

SEQ ID NO: 35130 - protein, 413 aa, Glycine max; identical to SEQ ID NO: 5798

SEQ ID NO: 35131 - DNA, 1985 bp, Aspergillus niger; identical to SEQ ID NO: 5799
  CDS (288)..(1784)

SEQ ID NO: 35132 - protein, 498 aa, Aspergillus niger; identical to SEQ ID NO: 5800

SEQ ID NO: 35133 - DNA, 1727 bp, Homo sapiens; identical to SEQ ID NO: 5801
  CDS (67)..(1425)

SEQ ID NO: 35134 - protein, 452 aa, Homo sapiens; identical to SEQ ID NO: 5802

SEQ ID NO: 35135 - DNA, 1863 bp, Mus musculus; identical to SEQ ID NO: 5803
  CDS (24)..(1595)

SEQ ID NO: 35136 - protein, 523 aa, Mus musculus; identical to SEQ ID NO: 5804

SEQ ID NO: 35137 - DNA, 1740 bp, Brachydanio rerio; identical to SEQ ID NO: 5805
  CDS (80)..(1429)

SEQ ID NO: 35138 - protein, 449 aa, Brachydanio rerio; identical to SEQ ID NO: 5806

SEQ ID NO: 35139 - DNA, 25 bp, Artificial sequence
  Primer sequence
atgacaaagattaaggtagctaacc

SEQ ID NO: 35140 - DNA, 23 bp, Artificial sequence
  Primer sequence
ttacaatgcagctgcctcgaact

SEQ ID NO: 35141 - protein, 367 aa, Artificial sequence
  Consensus
  Variant (4)..(8): Xaa in position 4 to 8 is any amino acid
  Variant (10)..(29): Xaa in position 10 to 29 is any amino acid
  Variant (31)..(34): Xaa in position 31 to 34 is any amino acid
  Variant (36)..(37): Xaa in position 36 to 37 is any amino acid
  Variant (39)..(39): Xaa in position 39 is any amino acid
  Variant (41)..(42): Xaa in position 41 to 42 is any amino acid
  Variant (44)..(57): Xaa in position 44 to 57 is any amino acid
  Variant (65)..(67): Xaa in position 65 to 67 is any amino acid
  Variant (69)..(70): Xaa in position 69 to 70 is any amino acid
  Variant (72)..(73): Xaa in position 72 to 73 is any amino acid
  Variant (75)..(77): Xaa in position 75 to 77 is any amino acid
  Variant (79)..(79): Xaa in position 79 is any amino acid
  Variant (83)..(83): Xaa in position 83 is any amino acid
  Variant (85)..(85): Xaa in position 85 is any amino acid
  Variant (87)..(90): Xaa in position 87 to 90 is any amino acid
  Variant (92)..(93): Xaa in position 92 to 93 is any amino acid
  Variant (96)..(109): Xaa in position 96 to 109 is any amino acid
  Variant (111)..(113): Xaa in position 111 to 113 is any amino acid
  Variant (115)..(117): Xaa in position 115 to 117 is any amino acid
  Variant (121)..(122): Xaa in position 121 to 122 is any amino acid
  Variant (124)..(124): Xaa in position 124 is any amino acid
  Variant (126)..(173): Xaa in position 126 to 173 is any amino acid
  Variant (175)..(177): Xaa in position 175 to 177 is any amino acid
  Variant (179)..(181): Xaa in position 179 to 181 is any amino acid
  Variant (184)..(200): Xaa in position 184 to 200 is any amino acid
  Variant (203)..(203): Xaa in position 203 is any amino acid
  Variant (206)..(206): Xaa in position 206 is any amino acid
  Variant (208)..(208): Xaa in position 208 is any amino acid
  Variant (210)..(212): Xaa in position 210 to 212 is any amino acid
  Variant (214)..(216): Xaa in position 214 to 216 is any amino acid
  Variant (218)..(235): Xaa in position 218 to 235 is any amino acid
  Variant (237)..(239): Xaa in position 237 to 239 is any amino acid
  Variant (244)..(245): Xaa in position 244 to 245 is any amino acid
  Variant (247)..(252): Xaa in position 247 to 252 is any amino acid
  Variant (254)..(257): Xaa in position 254 to 257 is any amino acid
  Variant (259)..(261): Xaa in position 259 to 261 is any amino acid
  Variant (263)..(263): Xaa in position 263 is any amino acid
  Variant (265)..(267): Xaa in position 265 to 267 is any amino acid
  Variant (270)..(271): Xaa in position 270 to 271 is any amino acid
  Variant (273)..(275): Xaa in position 273 to 275 is any amino acid
  Variant (279)..(280): Xaa in position 279 to 280 is any amino acid
  Variant (282)..(282): Xaa in position 282 is any amino acid
  Variant (284)..(284): Xaa in position 284 is any amino acid
  Variant (286)..(289): Xaa in position 286 to 289 is any amino acid
  Variant (291)..(295): Xaa in position 291 to 295 is any amino acid
  Variant (298)..(298): Xaa in position 298 is any amino acid
  Variant (303)..(304): Xaa in position 303 to 304 is any amino acid
  Variant (306)..(314): Xaa in position 306 to 314 is any amino acid
  Variant (318)..(320): Xaa in position 318 to 320 is any amino acid
  Variant (322)..(322): Xaa in position 322 is any amino acid
  Variant (327)..(332): Xaa in position 327 to 332 is any amino acid
  Variant (334)..(336): Xaa in position 334 to 336 is any amino acid
  Variant (338)..(349): Xaa in position 338 to 349 is any amino acid
  Variant (351)..(366): Xaa in position 351 to 366 is any amino acid
GDEXXXXXWXXXXXXXXXXXXXXXXXXXXLXXXXRXXTXDXXTXXXXXXXXXXXXXXKCATITPXXXRXXEXXLXXXWXSPNXTXRXXXXGXXFRXXXXXXXXXXXXXXWXXXIXXXRHAXXDXYXXXXXXXXXXXXXXXXXXXXXXXXXXXXXXXXXXXXXXXXXXXXXXXXNXXXSXXXFAXXXXXXXXXXXXXXXXXTKXTIXKXYXXXFXXXFXXXXXXXXXXXXXXXXXXYXXXLIDDXXAXXXXXXGXXXXAXXXYXGXXXSDXXAXXXGSLXXMXSXLXXXXGXXXXXEAXHGTVXXHXXXXXXXXXTSTXXXAXIFAWXXXXXXRXXXDXXXXXXXXXXXXEXXXXXXXXXXXXXXXXL

SEQ ID NO: 35142 - protein, 410 aa, Artificial sequence
  Consensus
  Variant (3)..(3): Xaa in position 3 is any amino acid
  Variant (5)..(6): Xaa in position 5 to 6 is any amino acid
  Variant (8)..(8): Xaa in position 8 is any amino acid
  Variant (11)..(11): Xaa in position 11 is any amino acid
  Variant (19)..(19): Xaa in position 19 is any amino acid
  Variant (22)..(23): Xaa in position 22 to 23 is any amino acid
  Variant (26)..(26): Xaa in position 26 is any amino acid
  Variant (30)..(30): Xaa in position 30 is any amino acid
  Variant (32)..(38): Xaa in position 32 to 38 is any amino acid
  Variant (40)..(40): Xaa in position 40 is any amino acid
  Variant (43)..(46): Xaa in position 43 to 46 is any amino acid
  Variant (49)..(49): Xaa in position 49 is any amino acid
  Variant (51)..(51): Xaa in position 51 is any amino acid
  Variant (53)..(53): Xaa in position 53 is any amino acid
  Variant (56)..(58): Xaa in position 56 to 58 is any amino acid
  Variant (60)..(60): Xaa in position 60 is any amino acid
  Variant (62)..(63): Xaa in position 62 to 63 is any amino acid
  Variant (65)..(66): Xaa in position 65 to 66 is any amino acid
  Variant (68)..(69): Xaa in position 68 to 69 is any amino acid
  Variant (79)..(79): Xaa in position 79 is any amino acid
  Variant (82)..(82): Xaa in position 82 is any amino acid
  Variant (85)..(85): Xaa in position 85 is any amino acid
  Variant (88)..(88): Xaa in position 88 is any amino acid
  Variant (91)..(91): Xaa in position 91 is any amino acid
  Variant (102)..(102): Xaa in position 102 is any amino acid
  Variant (111)..(115): Xaa in position 111 to 115 is any amino acid
  Variant (121)..(121): Xaa in position 121 is any amino acid
  Variant (123)..(123): Xaa in position 123 is any amino acid
  Variant (127)..(127): Xaa in position 127 is any amino acid
  Variant (133)..(133): Xaa in position 133 is any amino acid
  Variant (138)..(138): Xaa in position 138 is any amino acid
  Variant (142)..(147): Xaa in position 142 to 147 is any amino acid
  Variant (149)..(168): Xaa in position 149 to 168 is any amino acid
  Variant (170)..(178): Xaa in position 170 to 178 is any amino acid
  Variant (181)..(183): Xaa in position 181 to 183 is any amino acid
  Variant (187)..(187): Xaa in position 187 is any amino acid
  Variant (189)..(189): Xaa in position 189 is any amino acid
  Variant (192)..(193): Xaa in position 192 to 193 is any amino acid
  Variant (196)..(207): Xaa in position 196 to 207 is any amino acid
  Variant (209)..(209): Xaa in position 209 is any amino acid
  Variant (211)..(211): Xaa in position 211 is any amino acid
  Variant (220)..(220): Xaa in position 220 is any amino acid
  Variant (230)..(237): Xaa in position 230 to 237 is any amino acid
  Variant (239)..(240): Xaa in position 239 to 240 is any amino acid
  Variant (242)..(247): Xaa in position 242 to 247 is any amino acid
  Variant (259)..(261): Xaa in position 259 to 261 is any amino acid
  Variant (263)..(264): Xaa in position 263 to 264 is any amino acid
  Variant (267)..(269): Xaa in position 267 to 269 is any amino acid
  Variant (271)..(271): Xaa in position 271 is any amino acid
  Variant (282)..(283): Xaa in position 282 to 283 is any amino acid
  Variant (287)..(287): Xaa in position 287 is any amino acid
  Variant (298)..(299): Xaa in position 298 to 299 is any amino acid
  Variant (304)..(305): Xaa in position 304 to 305 is any amino acid
  Variant (307)..(307): Xaa in position 307 is any amino acid
  Variant (318)..(318): Xaa in position 318 is any amino acid
  Variant (320)..(321): Xaa in position 320 to 321 is any amino acid
  Variant (323)..(323): Xaa in position 323 is any amino acid
  Variant (325)..(326): Xaa in position 325 to 326 is any amino acid
  Variant (331)..(331): Xaa in position 331 is any amino acid
  Variant (339)..(339): Xaa in position 339 is any amino acid
  Variant (343)..(344): Xaa in position 343 to 344 is any amino acid
  Variant (346)..(347): Xaa in position 346 to 347 is any amino acid
  Variant (350)..(356): Xaa in position 350 to 356 is any amino acid
  Variant (358)..(360): Xaa in position 358 to 360 is any amino acid
  Variant (363)..(367): Xaa in position 363 to 367 is any amino acid
  Variant (370)..(374): Xaa in position 370 to 374 is any amino acid
  Variant (381)..(398): Xaa in position 381 to 398 is any amino acid
  Variant (400)..(401): Xaa in position 400 to 401 is any amino acid
  Variant (403)..(409): Xaa in position 403 to 409 is any amino acid
KIXVXXPXVEXDGDEMTRXIWXXIKXKLIXPXXXXXXXYXDLXXXXRDXTXDXVTXXXAXAXXKXXVXXKCATITPDEXRVXEFXLKXMWXSPNGTIRNILXGTVFREPIXXXXXPRLVPXWXKPIXIGRHAXGDQYXATDXXXXXXGXXXXXXXXXXXXXXXXXXXXVXXXXXXXXXGVXXXMYNXDXSIXXFAXXXXXXXXXXXXPXYXSTKNTILKXYDGRFKDIFXXXXXXXXKXXFXXXXXXYEHRLIDDMVAXXXKXXGGXXXAXKNYDGDVQSDXXAQGXGSLGLMTSVLXXPDGKXXEXEAAHGTVTRHXRXXQXGXXTSTNXIASIFAWXRGLXXRXXLDXXXXXXXFXXXLEXXXXXTVXXXXXMTKDLAXXXXXXXXXXXXXXXXXXTXXFXXXXXXXL

SEQ ID NO: 35143 - protein, 137 aa, Artificial sequence; identical to SEQ ID NO: 6194
  Consensus
  Variant (1)..(1): Xaa in position 1 is Lys, Arg or Gln
  Variant (2)..(2): Xaa in position 2 is Ile, Lys, Val or Leu
  Variant (3)..(6): Xaa in position 3 to 6 is any amino acid
  Variant (7)..(7): Xaa in position 7 is Pro, Ser or Thr
  Variant (8)..(8): Xaa in position 8 is Ile, Val or Leu
  Variant (9)..(9): Xaa in position 9 is Val or Ala
  Variant (10)..(10): Xaa in position 10 is Glu or Asp
  Variant (11)..(11): Xaa in position 11 is Met, Leu, Ile or Val
  Variant (12)..(12): Xaa in position 12 is Asp, Gln or Leu
  Variant (16)..(16): Xaa in position 16 is Met or Gln
  Variant (17)..(17): Xaa in position 17 is Thr or Ala
  Variant (18)..(18): Xaa in position 18 is Arg or Lys
  Variant (19)..(19): Xaa in position 19 is Ile or Val
  Variant (20)..(20): Xaa in position 20 is Ile, Phe or Met
  Variant (22)..(23): Xaa in position 22 to 23 is any amino acid
  Variant (24)..(24): Xaa in position 24 is Ile or Val
  Variant (25)..(25): Xaa in position 25 is Lys, Arg or Gln
  Variant (26)..(27): Xaa in position 26 to 27 is any amino acid
  Variant (28)..(28): Xaa in position 28 is Leu or Phe
  Variant (29)..(29): Xaa in position 29 is Ile, Val or Leu
  Variant (30)..(30): Xaa in position 30 is any amino acid
  Variant (31)..(31): Xaa in position 31 is Pro or Thr
  Variant (32)..(32): Xaa in position 32 is Tyr, Phe, His or Asn
  Variant (33)..(33): Xaa in position 33 is Leu, Val or Met
  Variant (34)..(34): Xaa in position 34 is Asp, Glu or Asn
  Variant (35)..(35): Xaa in position 35 is Leu, Val, Ile or Met
  Variant (36)..(38): Xaa in position 36 to 38 is any amino acid
  Variant (39)..(39): Xaa in position 39 is Tyr, Phe, Ser or Thr
  Variant (40)..(40): Xaa in position 40 is Tyr or Phe
  Variant (41)..(41): Xaa in position 41 is Asp or Ser
  Variant (43)..(43): Xaa in position 43 is Gly or Ser
  Variant (44)..(44): Xaa in position 44 is Ile, Leu, Val or Met
  Variant (45)..(46): Xaa in position 45 to 46 is any amino acid
  Variant (48)..(48): Xaa in position 48 is Asp or Asn
  Variant (49)..(49): Xaa in position 49 is any amino acid
  Variant (51)..(51): Xaa in position 51 is any amino acid
  Variant (53)..(53): Xaa in position 53 is Gln, Lys or Arg
  Variant (54)..(54): Xaa in position 54 is Val or Ile
  Variant (56)..(56): Xaa in position 56 is any amino acid
  Variant (57)..(57): Xaa in position 57 is Asp or Glu
  Variant (58)..(58): Xaa in position 58 is Ser, Ala or Thr
  Variant (59)..(59): Xaa in position 59 is Ala or Ser
  Variant (60)..(60): Xaa in position 60 is any amino acid
  Variant (61)..(61): Xaa in position 61 is Ala or Glu
  Variant (62)..(62): Xaa in position 62 is any amino acid
  Variant (63)..(63): Xaa in position 63 is Lys, Leu, Gln or Met
  Variant (64)..(64): Xaa in position 64 is Lys, Glu, Gln or Arg
  Variant (65)..(65): Xaa in position 65 is Tyr, His or Val
  Variant (66)..(66): Xaa in position 66 is any amino acid
  Variant (67)..(67): Xaa in position 67 is Val, Met or Ile
  Variant (68)..(68): Xaa in position 68 is Gly or Ala
  Variant (69)..(69): Xaa in position 69 is Val or Ile
  Variant (77)..(77): Xaa in position 77 is Asp or Asn
  Variant (78)..(78): Xaa in position 78 is Glu, Ala, Ser or Gln
  Variant (79)..(79): Xaa in position 79 is any amino acid
  Variant (81)..(81): Xaa in position 81 is Val, Met, Ile or Leu
  Variant (82)..(82): Xaa in position 82 is any amino acid
  Variant (84)..(84): Xaa in position 84 is Phe or Tyr
  Variant (85)..(85): Xaa in position 85 is any amino acid
  Variant (88)..(88): Xaa in position 88 is any amino acid
  Variant (91)..(91): Xaa in position 91 is Lys, Arg or Leu
  Variant (95)..(95): Xaa in position 95 is Gly or Ala
  Variant (97)..(97): Xaa in position 97 is Ile or Leu
  Variant (99)..(99): Xaa in position 99 is Asn, Ser or Ala
  Variant (100)..(100): Xaa in position 100 is Ile, Ala or Tyr
  Variant (101)..(101): Xaa in position 101 is Leu or Ile
  Variant (102)..(102): Xaa in position 102 is Gly, Asn or Asp
  Variant (104)..(104): Xaa in position 104 is Thr or Val
  Variant (105)..(105): Xaa in position 105 is Val or Ile
  Variant (108)..(108): Xaa in position 108 is any amino acid
  Variant (109)..(109): Xaa in position 109 is Pro, Ala or Ser
  Variant (111)..(111): Xaa in position 111 is Ile, Val, Leu or Met
  Variant (112)..(112): Xaa in position 112 is Cys, Ile, Val or Met
  Variant (113)..(114): Xaa in position 113 to 114 is any amino acid
  Variant (115)..(115): Xaa in position 115 is Ile, Val or Leu
  Variant (117)..(117): Xaa in position 117 is Arg, Lys or Pro
  Variant (118)..(118): Xaa in position 118 is Leu, Ile, Ala or Tyr
  Variant (119)..(119): Xaa in position 119 is Val, Ile or Leu
  Variant (120)..(121): Xaa in position 120 to 121 is any amino acid
  Variant (123)..(124): Xaa in position 123 to 124 is any amino acid
  Variant (125)..(125): Xaa in position 125 is Pro or Ala
  Variant (127)..(127): Xaa in position 127 is Ile, Cys, Val or Thr
  Variant (128)..(128): Xaa in position 128 is Ile or Val
  Variant (129)..(129): Xaa in position 129 is Gly or Ala
  Variant (133)..(133): Xaa in position 133 is Phe, His or Tyr
  Variant (134)..(134): Xaa in position 134 is Gly or Ala
  Variant (136)..(136): Xaa in position 136 is Gln, Ile or Leu

SEQ ID NO: 35144 - protein, 166 aa, Artificial sequence; identical to SEQ ID NO: 6195
  Consensus
  Variant (1)..(1): Xaa in position 1 is Met or Gln
  Variant (2)..(2): Xaa in position 2 is Tyr, His or Phe
  Variant (4)..(6): Xaa in position 4 to 6 is any amino acid
  Variant (8)..(8): Xaa in position 8 is Ile or Val
  Variant (9)..(10): Xaa in position 9 to 10 is any amino acid
  Variant (13)..(13): Xaa in position 13 is any amino acid
  Variant (14)..(14): Xaa in position 14 is Ala or Ser
  Variant (15)..(15): Xaa in position 15 is Ser or Cys
  Variant (16)..(16): Xaa in position 16 is Phe, Met, Leu or Ile
  Variant (17)..(18): Xaa in position 17 to 18 is any amino acid
  Variant (19)..(19): Xaa in position 19 is Ala, Gly or Ser
  Variant (20)..(20): Xaa in position 20 is Leu, Tyr, Ile or Phe
  Variant (21)..(25): Xaa in position 21 to 25 is any amino acid
  Variant (26)..(26): Xaa in position 26 is Leu, Val or Ile
  Variant (27)..(27): Xaa in position 27 is Tyr, Phe or Trp
  Variant (28)..(28): Xaa in position 28 is Leu, Met, Phe or Ser
  Variant (29)..(29): Xaa in position 29 is Ser, Thr or Ala
  Variant (32)..(32): Xaa in position 32 is Asn, Asp or Ser
  Variant (35)..(35): Xaa in position 35 is Leu, Ser or Met
  Variant (37)..(37): Xaa in position 37 is any amino acid
  Variant (39)..(39): Xaa in position 39 is Asp or His
  Variant (40)..(40): Xaa in position 40 is Gly, Ala or His
  Variant (41)..(41): Xaa in position 41 is any amino acid
  Variant (43)..(43): Xaa in position 43 is Lys or Arg
  Variant (44)..(44): Xaa in position 44 is Asp or Ala
  Variant (45)..(45): Xaa in position 45 is Ile, Val, Leu or Thr
  Variant (47)..(49): Xaa in position 47 to 49 is any amino acid
  Variant (50)..(50): Xaa in position 50 is Tyr, Phe, Ala or Val
  Variant (51)..(56): Xaa in position 51 to 56 is any amino acid
  Variant (57)..(57): Xaa in position 57 is any or no amino acid
  Variant (58)..(58): Xaa in position 58 is Phe, Tyr or Leu
  Variant (59)..(61): Xaa in position 59 to 61 is any amino acid
  Variant (62)..(62): Xaa in position 62 is Gly, Lys, Asn or Ser
  Variant (63)..(63): Xaa in position 63 is Ile, Leu or Val
  Variant (64)..(64): Xaa in position 64 is any amino acid
  Variant (66)..(66): Xaa in position 66 is any amino acid
  Variant (67)..(67): Xaa in position 67 is His or Tyr
  Variant (68)..(68): Xaa in position 68 is any amino acid
  Variant (73)..(73): Xaa in position 73 is Met or Ala
  Variant (74)..(74): Xaa in position 74 is Val or Ala
  Variant (76)..(77): Xaa in position 76 to 77 is any amino acid
  Variant (78)..(78): Xaa in position 78 is Leu, Ile, Met or Val
  Variant (79)..(79): Xaa in position 79 is Lys or Arg
  Variant (80)..(80): Xaa in position 80 is Ser or Trp
  Variant (81)..(81): Xaa in position 81 is any amino acid
  Variant (83)..(83): Xaa in position 83 is Gly or Ala
  Variant (84)..(84): Xaa in position 84 is Tyr, Phe or Met
  Variant (85)..(85): Xaa in position 85 is Val, Ile or Leu
  Variant (86)..(86): Xaa in position 86 is Trp, Met, Ile or Leu
  Variant (88)..(88): Xaa in position 88 is Cys, Leu, Met or Phe
  Variant (89)..(89): Xaa in position 89 is Lys or Met
  Variant (92)..(92): Xaa in position 92 is Asp or Glu
  Variant (95)..(95): Xaa in position 95 is Val or Ile
  Variant (96)..(96): Xaa in position 96 is Gln, Met or Glu
  Variant (99)..(99): Xaa in position 99 is any amino acid
  Variant (100)..(100): Xaa in position 100 is Val, Leu or Ile
  Variant (102)..(102): Xaa in position 102 is Gln, Ser or Thr
  Variant (103)..(103): Xaa in position 103 is Gly or Ala
  Variant (104)..(104): Xaa in position 104 is Phe or Tyr
  Variant (108)..(108): Xaa in position 108 is Gly or Ala
  Variant (109)..(109): Xaa in position 109 is Leu or Met
  Variant (111)..(111): Xaa in position 111 is Thr or Ser
  Variant (113)..(113): Xaa in position 113 is Val, Ile, Thr or Ala
  Variant (115)..(116): Xaa in position 115 to 116 is any amino acid
  Variant (117)..(117): Xaa in position 117 is Pro, Ser or Ala
  Variant (118)..(118): Xaa in position 118 is Asp, Thr or Asn
  Variant (120)..(121): Xaa in position 120 to 121 is any amino acid
  Variant (122)..(122): Xaa in position 122 is any or no amino acid
  Variant (123)..(123): Xaa in position 123 is Glu, Ala, Ile or Val
  Variant (124)..(124): Xaa in position 124 is any amino acid
  Variant (127)..(127): Xaa in position 127 is Ala or Ser
  Variant (133)..(133): Xaa in position 133 is Arg or Lys
  Variant (135)..(135): Xaa in position 135 is Tyr or Phe
  Variant (136)..(136): Xaa in position 136 is Arg, Tyr or Met
  Variant (137)..(137): Xaa in position 137 is any amino acid
  Variant (138)..(138): Xaa in position 138 is His, Tyr or Trp
  Variant (139)..(139): Xaa in position 139 is Gln or Leu
  Variant (140)..(140): Xaa in position 140 is Lys, Gln, Ala or Arg
  Variant (141)..(141): Xaa in position 141 is Gly or Asn
  Variant (142)..(143): Xaa in position 142 to 143 is any amino acid
  Variant (148)..(148): Xaa in position 148 is Ser or Pro
  Variant (149)..(149): Xaa in position 149 is Ile or Val
  Variant (151)..(151): Xaa in position 151 is Ser or Thr
  Variant (156)..(156): Xaa in position 156 is Thr, Ser or Ala
  Variant (157)..(157): Xaa in position 157 is any amino acid
  Variant (158)..(158): Xaa in position 158 is Gly or Ala
  Variant (159)..(159): Xaa in position 159 is Leu or Ile
  Variant (160)..(161): Xaa in position 160 to 161 is any amino acid
  Variant (163)..(163): Xaa in position 163 is Ala or Gly
  Variant (164)..(164): Xaa in position 164 is any amino acid
  Variant (165)..(165): Xaa in position 165 is Leu, Phe or Val

SEQ ID NO: 35145 - DNA, 1518 bp, Saccharomyces cerevisiae; identical to SEQ ID NO: 2533
  CDS (1)..(1518)

SEQ ID NO: 35146 - protein, 505 aa, Saccharomyces cerevisiae; identical to SEQ ID NO: 2534

SEQ ID NO: 35147 - DNA, 1548 bp, Mus musculus (house mouse); identical to SEQ ID NO: 2535
  CDS (1)..(1548)

SEQ ID NO: 35148 - protein, 515 aa, Mus musculus (house mouse); identical to SEQ ID NO: 2536

SEQ ID NO: 35149 - DNA, 1593 bp, Fugu rubripes (Japanese pufferfish); identical to SEQ ID NO: 2537
  CDS (1)..(1593)

SEQ ID NO: 35150 - protein, 530 aa, Fugu rubripes (Japanese pufferfish); identical to SEQ ID NO: 2538

SEQ ID NO: 35151 - DNA, 1506 bp, Vibrio cholerae; identical to SEQ ID NO: 2539
  CDS (1)..(1506)

SEQ ID NO: 35152 - protein, 501 aa, Vibrio cholerae; identical to SEQ ID NO: 2540

SEQ ID NO: 35153 - DNA, 1470 bp, Pseudomonas aeruginosa; identical to SEQ ID NO: 2541
  CDS (1)..(1470)

SEQ ID NO: 35154 - protein, 489 aa, Pseudomonas aeruginosa; identical to SEQ ID NO: 2542

SEQ ID NO: 35155 - DNA, 1485 bp, Staphylococcus aureus; identical to SEQ ID NO: 2543
  CDS (1)..(1485)

SEQ ID NO: 35156 - protein, 494 aa, Staphylococcus aureus; identical to SEQ ID NO: 2544

SEQ ID NO: 35157 - DNA, 1488 bp, Streptococcus pneumoniae; identical to SEQ ID NO: 2545
  CDS (1)..(1488)

SEQ ID NO: 35158 - protein, 495 aa, Streptococcus pneumoniae; identical to SEQ ID NO: 2546

SEQ ID NO: 35159 - DNA, 1476 bp, Salmonella enterica subsp. enterica serovar Typhi; identical to SEQ ID NO: 2547
  CDS (1)..(1476)

SEQ ID NO: 35160 - protein, 491 aa, Salmonella enterica subsp. enterica serovar Typhi; identical to SEQ ID NO: 2548

SEQ ID NO: 35161 - DNA, 1476 bp, Agrobacterium tumefaciens; identical to SEQ ID NO: 2549
  CDS (1)..(1476)

SEQ ID NO: 35162 - protein, 491 aa, Agrobacterium tumefaciens; identical to SEQ ID NO: 2550

SEQ ID NO: 35163 - DNA, 1530 bp, Nostoc sp. PCC 7120; identical to SEQ ID NO: 2551
  CDS (1)..(1530)

SEQ ID NO: 35164 - protein, 509 aa, Nostoc sp. PCC 7120; identical to SEQ ID NO: 2552

SEQ ID NO: 35165 - DNA, 1386 bp, Agrobacterium tumefaciens; identical to SEQ ID NO: 2553
  CDS (1)..(1386)

SEQ ID NO: 35166 - protein, 461 aa, Agrobacterium tumefaciens; identical to SEQ ID NO: 2554

SEQ ID NO: 35167 - DNA, 1476 bp, Brucella melitensis; identical to SEQ ID NO: 2555
  CDS (1)..(1476)

SEQ ID NO: 35168 - protein, 491 aa, Brucella melitensis; identical to SEQ ID NO: 2556

SEQ ID NO: 35169 - DNA, 1458 bp, Zymomonas mobilis; identical to SEQ ID NO: 2557
  CDS (1)..(1458)

SEQ ID NO: 35170 - protein, 485 aa, Zymomonas mobilis; identical to SEQ ID NO: 2558

SEQ ID NO: 35171 - DNA, 1470 bp, Bacillus subtilis; identical to SEQ ID NO: 2559
  CDS (1)..(1470)

SEQ ID NO: 35172 - protein, 489 aa, Bacillus subtilis; identical to SEQ ID NO: 2560

SEQ ID NO: 35173 - DNA, 1401 bp, Mycobacterium tuberculosis; identical to SEQ ID NO: 2561
  CDS (1)..(1401)

SEQ ID NO: 35174 - protein, 466 aa, Mycobacterium tuberculosis; identical to SEQ ID NO: 2562

SEQ ID NO: 35175 - DNA, 1545 bp, Mycobacterium tuberculosis; identical to SEQ ID NO: 2563
  CDS (1)..(1545)

SEQ ID NO: 35176 - protein, 514 aa, Mycobacterium tuberculosis; identical to SEQ ID NO: 2564

SEQ ID NO: 35177 - DNA, 1320 bp, Chlamydia trachomatis; identical to SEQ ID NO: 2565
  CDS (1)..(1320)

SEQ ID NO: 35178 - protein, 439 aa, Chlamydia trachomatis; identical to SEQ ID NO: 2566

SEQ ID NO: 35179 - DNA, 1773 bp, Deinococcus radiodurans; identical to SEQ ID NO: 2567
  CDS (1)..(1773)

SEQ ID NO: 35180 - protein, 590 aa, Deinococcus radiodurans; identical to SEQ ID NO: 2568

SEQ ID NO: 35181 - DNA, 1467 bp, Pseudomonas aeruginosa; identical to SEQ ID NO: 2569
  CDS (1)..(1467)

SEQ ID NO: 35182 - protein, 488 aa, Pseudomonas aeruginosa; identical to SEQ ID NO: 2570

SEQ ID NO: 35183 - DNA, 1422 bp, Caulobacter crescentus; identical to SEQ ID NO: 2571
  CDS (1)..(1422)

SEQ ID NO: 35184 - protein, 473 aa, Caulobacter crescentus; identical to SEQ ID NO: 2572

SEQ ID NO: 35185 - DNA, 1437 bp, Borrelia burgdorferi (Lyme disease spirochete); identical to SEQ ID NO: 2573
  CDS (1)..(1437)

SEQ ID NO: 35186 - protein, 478 aa, Borrelia burgdorferi (Lyme disease spirochete); identical to SEQ ID NO: 2574

SEQ ID NO: 35187 - DNA, 1539 bp, Chlamydophila pneumoniae, Chlamydia pneumoniae; identical to SEQ ID NO: 2575
  CDS (1)..(1539)

SEQ ID NO: 35188 - protein, 512 aa, Chlamydophila pneumoniae, Chlamydia pneumoniae; identical to SEQ ID NO: 2576

SEQ ID NO: 35189 - DNA, 1476 bp, Escherichia coli; identical to SEQ ID NO: 2577
  CDS (1)..(1476)

SEQ ID NO: 35190 - protein, 491 aa, Escherichia coli; identical to SEQ ID NO: 2578

SEQ ID NO: 35191 - DNA, 1548 bp, Treponema pallidum subsp. pallidum (syphilis spirochete); identical to SEQ ID NO: 2579
  CDS (1)..(1548)

SEQ ID NO: 35192 - protein, 515 aa, Treponema pallidum subsp. pallidum (syphilis spirochete); identical to SEQ ID NO: 2580

SEQ ID NO: 35193 - DNA, 1476 bp, Buchnera sp; identical to SEQ ID NO: 2581
  CDS (1)..(1476)

SEQ ID NO: 35194 - protein, 491 aa, Buchnera sp; identical to SEQ ID NO: 2582

SEQ ID NO: 35195 - DNA, 1512 bp, Lactococcus lactis subsp. lactis; identical to SEQ ID NO: 2583
  CDS (1)..(1512)

SEQ ID NO: 35196 - protein, 503 aa, Lactococcus lactis subsp. lactis; identical to SEQ ID NO: 2584

SEQ ID NO: 35197 - DNA, 1572 bp, Drosophila melanogaster; identical to SEQ ID NO: 2585
  CDS (1)..(1572)

SEQ ID NO: 35198 - protein, 523 aa, Drosophila melanogaster; identical to SEQ ID NO: 2586

SEQ ID NO: 35199 - DNA, 1575 bp, Synechococcus sp; identical to SEQ ID NO: 2587
  CDS (1)..(1575)

SEQ ID NO: 35200 - protein, 524 aa, Synechococcus sp; identical to SEQ ID NO: 2588

SEQ ID NO: 35201 - DNA, 1485 bp, Haemophilus influenzae; identical to SEQ ID NO: 2589
  CDS (1)..(1485)

SEQ ID NO: 35202 - protein, 494 aa, Haemophilus influenzae; identical to SEQ ID NO: 2590

SEQ ID NO: 35203 - DNA, 1446 bp, Neisseria meningitidis; identical to SEQ ID NO: 2591
  CDS (1)..(1446)

SEQ ID NO: 35204 - protein, 481 aa, Neisseria meningitidis; identical to SEQ ID NO: 2592

SEQ ID NO: 35205 - DNA, 1278 bp, Helicobacter pylori; identical to SEQ ID NO: 2593
  CDS (1)..(1278)

SEQ ID NO: 35206 - protein, 425 aa, Helicobacter pylori; identical to SEQ ID NO: 2594

SEQ ID NO: 35207 - DNA, 1434 bp, Xylella fastidiosa; identical to SEQ ID NO: 2595
  CDS (1)..(1434)

SEQ ID NO: 35208 - protein, 477 aa, Xylella fastidiosa; identical to SEQ ID NO: 2596

SEQ ID NO: 35209 - DNA, 1296 bp, Aquifex aeolicus; identical to SEQ ID NO: 2597
  CDS (1)..(1296)

SEQ ID NO: 35210 - protein, 431 aa, Aquifex aeolicus; identical to SEQ ID NO: 2598

SEQ ID NO: 35211 - DNA, 1491 bp, Thermotoga maritima; identical to SEQ ID NO: 2599
  CDS (1)..(1491)

SEQ ID NO: 35212 - protein, 496 aa, Thermotoga maritima; identical to SEQ ID NO: 2600

SEQ ID NO: 35213 - DNA, 1494 bp, Kluyveromyces marxianus var. lactis, Candida sphaerica; identical to SEQ ID NO: 2601
  CDS (1)..(1494)

SEQ ID NO: 35214 - protein, 497 aa, Kluyveromyces marxianus var. lactis, Candida sphaerica; identical to SEQ ID NO: 2602

SEQ ID NO: 35215 - DNA, 2813 bp, Erwinia chrysanthemi; identical to SEQ ID NO: 2603
  CDS (322)..(1797)

SEQ ID NO: 35216 - protein, 491 aa, Erwinia chrysanthemi; identical to SEQ ID NO: 2604

SEQ ID NO: 35217 - DNA, 3244 bp, Plasmodium falciparum; identical to SEQ ID NO: 2605
  CDS (184)..(2916)

SEQ ID NO: 35218 - protein, 910 aa, Plasmodium falciparum; identical to SEQ ID NO: 2606

SEQ ID NO: 35219 - DNA, 1785 bp, Medicago sativa (alfalfa); identical to SEQ ID NO: 2607
  CDS (38)..(1585)

SEQ ID NO: 35220 - protein, 515 aa, Medicago sativa (alfalfa); identical to SEQ ID NO: 2608

SEQ ID NO: 35221 - DNA, 1689 bp, Solanum tuberosum (potato); identical to SEQ ID NO: 2609
  CDS (46)..(1581)

SEQ ID NO: 35222 - protein, 511 aa, Solanum tuberosum (potato); identical to SEQ ID NO: 2610

SEQ ID NO: 35223 - DNA, 1530 bp, Synechocystis sp; identical to SEQ ID NO: 2611
  CDS (1)..(1530)

SEQ ID NO: 35224 - protein, 509 aa, Synechocystis sp; identical to SEQ ID NO: 2612

SEQ ID NO: 35225 - DNA, 1953 bp, Nicotiana tabacum (common tobacco); identical to SEQ ID NO: 2613
  CDS (43)..(1824)

SEQ ID NO: 35226 - protein, 593 aa, Nicotiana tabacum (common tobacco); identical to SEQ ID NO: 2614

SEQ ID NO: 35227 - DNA, 1869 bp, Nicotiana tabacum (common tobacco); identical to SEQ ID NO: 2615
  CDS (22)..(1788)

SEQ ID NO: 35228 - protein, 588 aa, Nicotiana tabacum (common tobacco); identical to SEQ ID NO: 2616

SEQ ID NO: 35229 - DNA, 2058 bp, Solanum tuberosum (potato); identical to SEQ ID NO: 2617
  CDS (41)..(1774)

SEQ ID NO: 35230 - protein, 577 aa, Solanum tuberosum (potato); identical to SEQ ID NO: 2618

SEQ ID NO: 35231 - DNA, 2049 bp, Spinacia oleracea (spinach); identical to SEQ ID NO: 2619
  CDS (147)..(1871)

SEQ ID NO: 35232 - protein, 574 aa, Spinacia oleracea (spinach); identical to SEQ ID NO: 2620

SEQ ID NO: 35233 - DNA, 2359 bp, Petroselinum crispum (parsley); identical to SEQ ID NO: 2621
  CDS (172)..(1986)

SEQ ID NO: 35234 - protein, 604 aa, Petroselinum crispum (parsley); identical to SEQ ID NO: 2622

SEQ ID NO: 35235 - DNA, 1848 bp, Petroselinum crispum (parsley); identical to SEQ ID NO: 2623
  CDS (41)..(1528)

SEQ ID NO: 35236 - protein, 495 aa, Petroselinum crispum (parsley); identical to SEQ ID NO: 2624

SEQ ID NO: 35237 - DNA, 1957 bp, Petroselinum crispum (parsley); identical to SEQ ID NO: 2625
  CDS (74)..(1678)

SEQ ID NO: 35238 - protein, 534 aa, Petroselinum crispum (parsley); identical to SEQ ID NO: 2626

SEQ ID NO: 35239 - DNA, 1569 bp, Caenorhabditis elegans; identical to SEQ ID NO: 2627
  CDS (1)..(1569)

SEQ ID NO: 35240 - protein, 522 aa, Caenorhabditis elegans; identical to SEQ ID NO: 2628

SEQ ID NO: 35241 - DNA, 1779 bp, Streptomyces coelicolor; identical to SEQ ID NO: 2629
  CDS (1)..(1779)

SEQ ID NO: 35242 - protein, 592 aa, Streptomyces coelicolor; identical to SEQ ID NO: 2630

SEQ ID NO: 35243 - DNA, 1524 bp, Streptomyces coelicolor; identical to SEQ ID NO: 2631
  CDS (1)..(1524)

SEQ ID NO: 35244 - protein, 507 aa, Streptomyces coelicolor; identical to SEQ ID NO: 2632

SEQ ID NO: 35245 - DNA, 1422 bp, Schizosaccharomyces pombe; identical to SEQ ID NO: 2633
  CDS (1)..(1422)

SEQ ID NO: 35246 - protein, 473 aa, Schizosaccharomyces pombe; identical to SEQ ID NO: 2634

SEQ ID NO: 35247 - DNA, 1503 bp, Schizosaccharomyces pombe; identical to SEQ ID NO: 2635
  CDS (1)..(1503)

SEQ ID NO: 35248 - protein, 500 aa, Schizosaccharomyces pombe; identical to SEQ ID NO: 2636

SEQ ID NO: 35249 - DNA, 1428 bp, Schizosaccharomyces pombe; identical to SEQ ID NO: 2637
  CDS (1)..(1428)

SEQ ID NO: 35250 - protein, 475 aa, Schizosaccharomyces pombe; identical to SEQ ID NO: 2638

SEQ ID NO: 35251 - DNA, 1461 bp, Leuconostoc mesenteroides; identical to SEQ ID NO: 2639
  CDS (1)..(1461)

SEQ ID NO: 35252 - protein, 486 aa, Leuconostoc mesenteroides; identical to SEQ ID NO: 2640

SEQ ID NO: 35253 - DNA, 3038 bp, Corynebacterium glutamicum; identical to SEQ ID NO: 2641
  CDS (115)..(1659)

SEQ ID NO: 35254 - protein, 514 aa, Corynebacterium glutamicum; identical to SEQ ID NO: 2642

SEQ ID NO: 35255 - DNA, 1852 bp, Nicotiana tabacum; identical to SEQ ID NO: 2643
  CDS (102)..(1634)

SEQ ID NO: 35256 - protein, 510 aa, Nicotiana tabacum; identical to SEQ ID NO: 2644

SEQ ID NO: 35257 - DNA, 1821 bp, Nicotiana tabacum; identical to SEQ ID NO: 2645
  CDS (88)..(1623)

SEQ ID NO: 35258 - protein, 511 aa, Nicotiana tabacum; identical to SEQ ID NO: 2646

SEQ ID NO: 35259 - DNA, 1808 bp, Chlamydia trachomatis; identical to SEQ ID NO: 2647
  CDS (105)..(1643)

SEQ ID NO: 35260 - protein, 512 aa, Chlamydia trachomatis; identical to SEQ ID NO: 2648

SEQ ID NO: 35261 - DNA, 2750 bp, Plasmodium falciparum; identical to SEQ ID NO: 2649
  CDS (48)..(2258)

SEQ ID NO: 35262 - protein, 736 aa, Plasmodium falciparum; identical to SEQ ID NO: 2650

SEQ ID NO: 35263 - DNA, 1509 bp, Debaryomyces hansenii; identical to SEQ ID NO: 2651
  CDS (1)..(1509)

SEQ ID NO: 35264 - protein, 502 aa, Debaryomyces hansenii; identical to SEQ ID NO: 2652

SEQ ID NO: 35265 - DNA, 1503 bp, Candida glabrata; identical to SEQ ID NO: 2653
  CDS (1)..(1503)

SEQ ID NO: 35266 - protein, 500 aa, Candida glabrata; identical to SEQ ID NO: 2654

SEQ ID NO: 35267 - DNA, 1485 bp, Bacillus thuringiensis serovar konkukian str; identical to SEQ ID NO: 2655
  CDS (1)..(1485)

SEQ ID NO: 35268 - protein, 494 aa, Bacillus thuringiensis serovar konkukian str; identical to SEQ ID NO: 2656

SEQ ID NO: 35269 - DNA, 1554 bp, Oryza sativa; identical to SEQ ID NO: 2657
  CDS (1)..(1554)

SEQ ID NO: 35270 - protein, 517 aa, Oryza sativa; identical to SEQ ID NO: 2658

SEQ ID NO: 35271 - DNA, 1500 bp, Photobacterium profundum; identical to SEQ ID NO: 2659
  CDS (1)..(1500)

SEQ ID NO: 35272 - protein, 499 aa, Photobacterium profundum; identical to SEQ ID NO: 2660

SEQ ID NO: 35273 - DNA, 1551 bp, Parachlamydia sp; identical to SEQ ID NO: 2661
  CDS (1)..(1551)

SEQ ID NO: 35274 - protein, 516 aa, Parachlamydia sp; identical to SEQ ID NO: 2662

SEQ ID NO: 35275 - DNA, 1515 bp, Rhodopseudomonas palustris; identical to SEQ ID NO: 2663
  CDS (1)..(1515)

SEQ ID NO: 35276 - protein, 504 aa, Rhodopseudomonas palustris; identical to SEQ ID NO: 2664

SEQ ID NO: 35277 - DNA, 1650 bp, Corynebacterium diphtheriae; identical to SEQ ID NO: 2665
  CDS (1)..(1650)

SEQ ID NO: 35278 - protein, 549 aa, Corynebacterium diphtheriae; identical to SEQ ID NO: 2666

SEQ ID NO: 35279 - DNA, 1446 bp, uncultured bacterium 581; identical to SEQ ID NO: 2667
  CDS (1)..(1446)

SEQ ID NO: 35280 - protein, 481 aa, uncultured bacterium 581; identical to SEQ ID NO: 2668

SEQ ID NO: 35281 - DNA, 1602 bp, Nonomuraea sp; identical to SEQ ID NO: 2669
  CDS (1)..(1602)

SEQ ID NO: 35282 - protein, 533 aa, Nonomuraea sp; identical to SEQ ID NO: 2670

SEQ ID NO: 35283 - DNA, 1476 bp, Listeria monocytogenes; identical to SEQ ID NO: 2671
  CDS (1)..(1476)

SEQ ID NO: 35284 - protein, 491 aa, Listeria monocytogenes; identical to SEQ ID NO: 2672

SEQ ID NO: 35285 - DNA, 1485 bp, Bacillus cereus; identical to SEQ ID NO: 2673
  CDS (1)..(1485)

SEQ ID NO: 35286 - protein, 494 aa, Bacillus cereus; identical to SEQ ID NO: 2674

SEQ ID NO: 35287 - DNA, 1410 bp, Mycobacterium paratuberculosis; identical to SEQ ID NO: 2675
  CDS (1)..(1410)

SEQ ID NO: 35288 - protein, 469 aa, Mycobacterium paratuberculosis; identical to SEQ ID NO: 2676

SEQ ID NO: 35289 - DNA, 2454 bp, Mycobacterium paratuberculosis; identical to SEQ ID NO: 2677
  CDS (1)..(2454)

SEQ ID NO: 35290 - protein, 817 aa, Mycobacterium paratuberculosis; identical to SEQ ID NO: 2678

SEQ ID NO: 35291 - DNA, 1545 bp, Mycobacterium paratuberculosis; identical to SEQ ID NO: 2679
  CDS (1)..(1545)

SEQ ID NO: 35292 - protein, 514 aa, Mycobacterium paratuberculosis; identical to SEQ ID NO: 2680

SEQ ID NO: 35293 - DNA, 1449 bp, Lactobacillus johnsonii; identical to SEQ ID NO: 2681
  CDS (1)..(1449)

SEQ ID NO: 35294 - protein, 482 aa, Lactobacillus johnsonii; identical to SEQ ID NO: 2682

SEQ ID NO: 35295 - DNA, 1539 bp, Ashbya gossypii; identical to SEQ ID NO: 2683
  CDS (1)..(1539)

SEQ ID NO: 35296 - protein, 512 aa, Ashbya gossypii; identical to SEQ ID NO: 2684

SEQ ID NO: 35297 - DNA, 1734 bp, Oryza sativa; identical to SEQ ID NO: 2685
  CDS (1)..(1734)

SEQ ID NO: 35298 - protein, 577 aa, Oryza sativa; identical to SEQ ID NO: 2686

SEQ ID NO: 35299 - DNA, 1467 bp, Gluconobacter oxydans; identical to SEQ ID NO: 2687
  CDS (1)..(1467)

SEQ ID NO: 35300 - protein, 488 aa, Gluconobacter oxydans; identical to SEQ ID NO: 2688

SEQ ID NO: 35301 - DNA, 1581 bp, Vibrio vulnificus; identical to SEQ ID NO: 2689
  CDS (1)..(1581)

SEQ ID NO: 35302 - protein, 526 aa, Vibrio vulnificus; identical to SEQ ID NO: 2690

SEQ ID NO: 35303 - DNA, 1476 bp, Photorhabdus luminescens; identical to SEQ ID NO: 2691
  CDS (1)..(1476)

SEQ ID NO: 35304 - protein, 491 aa, Photorhabdus luminescens; identical to SEQ ID NO: 2692

SEQ ID NO: 35305 - DNA, 1539 bp, Gloeobacter violaceus; identical to SEQ ID NO: 2693
  CDS (1)..(1539)

SEQ ID NO: 35306 - protein, 512 aa, Gloeobacter violaceus; identical to SEQ ID NO: 2694

SEQ ID NO: 35307 - DNA, 1539 bp, Gloeobacter violaceus; identical to SEQ ID NO: 2695
  CDS (1)..(1539)

SEQ ID NO: 35308 - protein, 512 aa, Gloeobacter violaceus; identical to SEQ ID NO: 2696

SEQ ID NO: 35309 - DNA, 1479 bp, Chromobacterium violaceum; identical to SEQ ID NO: 2697
  CDS (1)..(1479)

SEQ ID NO: 35310 - protein, 492 aa, Chromobacterium violaceum; identical to SEQ ID NO: 2698

SEQ ID NO: 35311 - DNA, 2229 bp, Giardia lamblia ATCC 50803; identical to SEQ ID NO: 2699
  CDS (1)..(2229)

SEQ ID NO: 35312 - protein, 742 aa, Giardia lamblia ATCC 50803; identical to SEQ ID NO: 2700

SEQ ID NO: 35313 - DNA, 2850 bp, Plasmodium yoelii yoelii; identical to SEQ ID NO: 2701
  CDS (1)..(2850)

SEQ ID NO: 35314 - protein, 949 aa, Plasmodium yoelii yoelii; identical to SEQ ID NO: 2702

SEQ ID NO: 35315 - DNA, 1476 bp, Neurospora crassa; identical to SEQ ID NO: 2703
  CDS (1)..(1476)

SEQ ID NO: 35316 - protein, 491 aa, Neurospora crassa; identical to SEQ ID NO: 2704

SEQ ID NO: 35317 - DNA, 1524 bp, Synechococcus sp; identical to SEQ ID NO: 2705
  CDS (1)..(1524)

SEQ ID NO: 35318 - protein, 507 aa, Synechococcus sp; identical to SEQ ID NO: 2706

SEQ ID NO: 35319 - DNA, 1455 bp, Rhodopirellula baltica; identical to SEQ ID NO: 2707
  CDS (1)..(1455)

SEQ ID NO: 35320 - protein, 484 aa, Rhodopirellula baltica; identical to SEQ ID NO: 2708

SEQ ID NO: 35321 - DNA, 1524 bp, Prochlorococcus marinus subsp; identical to SEQ ID NO: 2709
  CDS (1)..(1524)

SEQ ID NO: 35322 - protein, 507 aa, Prochlorococcus marinus subsp; identical to SEQ ID NO: 2710

SEQ ID NO: 35323 - DNA, 1524 bp, Prochlorococcus marinus; identical to SEQ ID NO: 2711
  CDS (1)..(1524)

SEQ ID NO: 35324 - protein, 507 aa, Prochlorococcus marinus; identical to SEQ ID NO: 2712

SEQ ID NO: 35325 - DNA, 1521 bp, Prochlorococcus marinus; identical to SEQ ID NO: 2713
  CDS (1)..(1521)

SEQ ID NO: 35326 - protein, 506 aa, Prochlorococcus marinus; identical to SEQ ID NO: 2714

SEQ ID NO: 35327 - DNA, 1488 bp, Haemophilus ducreyi; identical to SEQ ID NO: 2715
  CDS (1)..(1488)

SEQ ID NO: 35328 - protein, 495 aa, Haemophilus ducreyi; identical to SEQ ID NO: 2716

SEQ ID NO: 35329 - DNA, 1497 bp, Candidatus Blochmannia floridanus; identical to SEQ ID NO: 2717
  CDS (1)..(1497)

SEQ ID NO: 35330 - protein, 498 aa, Candidatus Blochmannia floridanus; identical to SEQ ID NO: 2718

SEQ ID NO: 35331 - DNA, 1768 bp, Oryza sativa; identical to SEQ ID NO: 2719
  CDS (2)..(1768)

SEQ ID NO: 35332 - protein, 588 aa, Oryza sativa; identical to SEQ ID NO: 2720

SEQ ID NO: 35333 - DNA, 1548 bp, Bos indicus; identical to SEQ ID NO: 2721
  CDS (1)..(1548)

SEQ ID NO: 35334 - protein, 515 aa, Bos indicus; identical to SEQ ID NO: 2722

SEQ ID NO: 35335 - DNA, 1536 bp, Chlamydophila caviae; identical to SEQ ID NO: 2723
  CDS (1)..(1536)

SEQ ID NO: 35336 - protein, 511 aa, Chlamydophila caviae; identical to SEQ ID NO: 2724

SEQ ID NO: 35337 - DNA, 1524 bp, Streptomyces avermitilis; identical to SEQ ID NO: 2725
  CDS (1)..(1524)

SEQ ID NO: 35338 - protein, 507 aa, Streptomyces avermitilis; identical to SEQ ID NO: 2726

SEQ ID NO: 35339 - DNA, 1647 bp, Streptomyces avermitilis; identical to SEQ ID NO: 2727
  CDS (1)..(1647)

SEQ ID NO: 35340 - protein, 548 aa, Streptomyces avermitilis; identical to SEQ ID NO: 2728

SEQ ID NO: 35341 - DNA, 1491 bp, Nitrosomonas europaea; identical to SEQ ID NO: 2729
  CDS (1)..(1491)

SEQ ID NO: 35342 - protein, 496 aa, Nitrosomonas europaea; identical to SEQ ID NO: 2730

SEQ ID NO: 35343 - DNA, 1524 bp, Enterococcus faecalis; identical to SEQ ID NO: 2731
  CDS (1)..(1524)

SEQ ID NO: 35344 - protein, 507 aa, Enterococcus faecalis; identical to SEQ ID NO: 2732

SEQ ID NO: 35345 - DNA, 1464 bp, Tropheryma whipplei; identical to SEQ ID NO: 2733
  CDS (1)..(1464)

SEQ ID NO: 35346 - protein, 487 aa, Tropheryma whipplei; identical to SEQ ID NO: 2734

SEQ ID NO: 35347 - DNA, 2145 bp, Leishmania mexicana; identical to SEQ ID NO: 2735
  CDS (298)..(1986)

SEQ ID NO: 35348 - protein, 562 aa, Leishmania mexicana; identical to SEQ ID NO: 2736

SEQ ID NO: 35349 - DNA, 1494 bp, Dictyostelium discoideum; identical to SEQ ID NO: 2737
  CDS (1)..(1494)

SEQ ID NO: 35350 - protein, 497 aa, Dictyostelium discoideum; identical to SEQ ID NO: 2738

SEQ ID NO: 35351 - DNA, 1503 bp, Xylella fastidiosa; identical to SEQ ID NO: 2739
  CDS (1)..(1503)

SEQ ID NO: 35352 - protein, 500 aa, Xylella fastidiosa; identical to SEQ ID NO: 2740

SEQ ID NO: 35353 - DNA, 1506 bp, Vibrio parahaemolyticus; identical to SEQ ID NO: 2741
  CDS (1)..(1506)

SEQ ID NO: 35354 - protein, 501 aa, Vibrio parahaemolyticus; identical to SEQ ID NO: 2742

SEQ ID NO: 35355 - DNA, 1533 bp, Pseudomonas syringae; identical to SEQ ID NO: 2743
  CDS (1)..(1533)

SEQ ID NO: 35356 - protein, 510 aa, Pseudomonas syringae; identical to SEQ ID NO: 2744

SEQ ID NO: 35357 - DNA, 1470 bp, Pseudomonas syringae; identical to SEQ ID NO: 2745
  CDS (1)..(1470)

SEQ ID NO: 35358 - protein, 489 aa, Pseudomonas syringae; identical to SEQ ID NO: 2746

SEQ ID NO: 35359 - DNA, 1458 bp, Pseudomonas putida; identical to SEQ ID NO: 2747
  CDS (1)..(1458)

SEQ ID NO: 35360 - protein, 485 aa, Pseudomonas putida; identical to SEQ ID NO: 2748

SEQ ID NO: 35361 - DNA, 1506 bp, Pseudomonas putida; identical to SEQ ID NO: 2749
  CDS (1)..(1506)

SEQ ID NO: 35362 - protein, 501 aa, Pseudomonas putida; identical to SEQ ID NO: 2750

SEQ ID NO: 35363 - DNA, 1470 bp, Pseudomonas putida; identical to SEQ ID NO: 2751
  CDS (1)..(1470)

SEQ ID NO: 35364 - protein, 489 aa, Pseudomonas putida; identical to SEQ ID NO: 2752

SEQ ID NO: 35365 - DNA, 1485 bp, Lactobacillus plantarum; identical to SEQ ID NO: 2753
  CDS (1)..(1485)

SEQ ID NO: 35366 - protein, 494 aa, Lactobacillus plantarum; identical to SEQ ID NO: 2754

SEQ ID NO: 35367 - DNA, 1440 bp, Clostridium tetani; identical to SEQ ID NO: 2755
  CDS (1)..(1440)

SEQ ID NO: 35368 - protein, 479 aa, Clostridium tetani; identical to SEQ ID NO: 2756

SEQ ID NO: 35369 - DNA, 1512 bp, Bradyrhizobium japonicum; identical to SEQ ID NO: 2757
  CDS (1)..(1512)

SEQ ID NO: 35370 - protein, 503 aa, Bradyrhizobium japonicum; identical to SEQ ID NO: 2758

SEQ ID NO: 35371 - DNA, 1497 bp, Bacteroides thetaiotaomicron; identical to SEQ ID NO: 2759
  CDS (1)..(1497)

SEQ ID NO: 35372 - protein, 498 aa, Bacteroides thetaiotaomicron; identical to SEQ ID NO: 2760

SEQ ID NO: 35373 - DNA, 4583 bp, Mus musculus; identical to SEQ ID NO: 2761
  CDS (119)..(2488)

SEQ ID NO: 35374 - protein, 789 aa, Mus musculus; identical to SEQ ID NO: 2762

SEQ ID NO: 35375 - DNA, 1485 bp, Staphylococcus epidermidis; identical to SEQ ID NO: 2763
  CDS (1)..(1485)

SEQ ID NO: 35376 - protein, 494 aa, Staphylococcus epidermidis; identical to SEQ ID NO: 2764

SEQ ID NO: 35377 - DNA, 1590 bp, Yersinia pestis; identical to SEQ ID NO: 2765
  CDS (1)..(1590)

SEQ ID NO: 35378 - protein, 529 aa, Yersinia pestis; identical to SEQ ID NO: 2766

SEQ ID NO: 35379 - DNA, 1530 bp, Synechococcus elongatus; identical to SEQ ID NO: 2767
  CDS (1)..(1530)

SEQ ID NO: 35380 - protein, 509 aa, Synechococcus elongatus; identical to SEQ ID NO: 2768

SEQ ID NO: 35381 - DNA, 1473 bp, Shewanella oneidensis; identical to SEQ ID NO: 2769
  CDS (1)..(1473)

SEQ ID NO: 35382 - protein, 490 aa, Shewanella oneidensis; identical to SEQ ID NO: 2770

SEQ ID NO: 35383 - DNA, 1476 bp, Oceanobacillus iheyensis; identical to SEQ ID NO: 2771
  CDS (1)..(1476)

SEQ ID NO: 35384 - protein, 491 aa, Oceanobacillus iheyensis; identical to SEQ ID NO: 2772

SEQ ID NO: 35385 - DNA, 1344 bp, Corynebacterium efficiens; identical to SEQ ID NO: 2773
  CDS (1)..(1344)

SEQ ID NO: 35386 - protein, 447 aa, Corynebacterium efficiens; identical to SEQ ID NO: 2774

SEQ ID NO: 35387 - DNA, 1545 bp, Corynebacterium efficiens; identical to SEQ ID NO: 2775
  CDS (1)..(1545)

SEQ ID NO: 35388 - protein, 514 aa, Corynebacterium efficiens; identical to SEQ ID NO: 2776

SEQ ID NO: 35389 - DNA, 1668 bp, Bifidobacterium longum; identical to SEQ ID NO: 2777
  CDS (1)..(1668)

SEQ ID NO: 35390 - protein, 555 aa, Bifidobacterium longum; identical to SEQ ID NO: 2778

SEQ ID NO: 35391 - DNA, 1284 bp, Rhodococcus opacus; identical to SEQ ID NO: 2779
  CDS (1)..(1284)

SEQ ID NO: 35392 - protein, 427 aa, Rhodococcus opacus; identical to SEQ ID NO: 2780

SEQ ID NO: 35393 - DNA, 2879 bp, Leishmania guyanensis; identical to SEQ ID NO: 2781
  misc_feature (1992)..(2321): n is a, c, g, or t
  misc_feature (2700)..(2700): n is a, c, g, or t
  misc_feature (2840)..(2840): n is a, c, g, or t
  CDS (205)..(1893)

SEQ ID NO: 35394 - protein, 562 aa, Leishmania guyanensis; identical to SEQ ID NO: 2782

SEQ ID NO: 35395 - DNA, 1689 bp, Leishmania mexicana; identical to SEQ ID NO: 2783
  misc_feature (227)..(444): n is a, c, g, or t
  misc_feature (1475)..(1528): n is a, c, g, or t
  CDS (1)..(1689)

SEQ ID NO: 35396 - protein, 562 aa, Leishmania mexicana; identical to SEQ ID NO: 2784
  misc_feature (76)..(148): Xaa can be any naturally occuring amino acid
  misc_feature (187)..(187): Xaa can be any naturally occuring amino acid
  misc_feature (197)..(197): Xaa can be any naturally occuring amino acid
  misc_feature (224)..(224): Xaa can be any naturally occuring amino acid
  misc_feature (243)..(243): Xaa can be any naturally occuring amino acid
  misc_feature (250)..(250): Xaa can be any naturally occuring amino acid
  misc_feature (492)..(510): Xaa can be any naturally occuring amino acid

SEQ ID NO: 35397 - DNA, 2916 bp, Leishmania amazonensis; identical to SEQ ID NO: 2785
  misc_feature (2191)..(2311): n is a, c, g, or t
  CDS (207)..(1895)

SEQ ID NO: 35398 - protein, 562 aa, Leishmania amazonensis; identical to SEQ ID NO: 2786
  misc_feature (463)..(463): Xaa can be any naturally occuring amino acid
  misc_feature (481)..(481): Xaa can be any naturally occuring amino acid

SEQ ID NO: 35399 - DNA, 1440 bp, Chlorobium tepidum; identical to SEQ ID NO: 2787
  CDS (1)..(1440)

SEQ ID NO: 35400 - protein, 479 aa, Chlorobium tepidum; identical to SEQ ID NO: 2788

SEQ ID NO: 35401 - DNA, 2187 bp, Methylobacterium extorquens; identical to SEQ ID NO: 2789
  CDS (640)..(2187)

SEQ ID NO: 35402 - protein, 515 aa, Methylobacterium extorquens; identical to SEQ ID NO: 2790

SEQ ID NO: 35403 - DNA, 1476 bp, Bartonella henselae; identical to SEQ ID NO: 2791
  CDS (1)..(1476)

SEQ ID NO: 35404 - protein, 491 aa, Bartonella henselae; identical to SEQ ID NO: 2792

SEQ ID NO: 35405 - DNA, 2266 bp, Toxoplasma gondii; identical to SEQ ID NO: 2793
  CDS (169)..(1851)

SEQ ID NO: 35406 - protein, 560 aa, Toxoplasma gondii; identical to SEQ ID NO: 2794

SEQ ID NO: 35407 - DNA, 1923 bp, Xanthomonas campestris; identical to SEQ ID NO: 2795
  CDS (1)..(1923)

SEQ ID NO: 35408 - protein, 640 aa, Xanthomonas campestris; identical to SEQ ID NO: 2796

SEQ ID NO: 35409 - DNA, 1431 bp, Xanthomonas campestris; identical to SEQ ID NO: 2797
  CDS (1)..(1431)

SEQ ID NO: 35410 - protein, 476 aa, Xanthomonas campestris; identical to SEQ ID NO: 2798

SEQ ID NO: 35411 - DNA, 1839 bp, Xanthomonas axonopodis; identical to SEQ ID NO: 2799
  CDS (1)..(1839)

SEQ ID NO: 35412 - protein, 612 aa, Xanthomonas axonopodis; identical to SEQ ID NO: 2800

SEQ ID NO: 35413 - DNA, 1431 bp, Xanthomonas axonopodis; identical to SEQ ID NO: 2801
  CDS (1)..(1431)

SEQ ID NO: 35414 - protein, 476 aa, Xanthomonas axonopodis; identical to SEQ ID NO: 2802

SEQ ID NO: 35415 - DNA, 1458 bp, Thermoanaerobacter tengcongensis; identical to SEQ ID NO: 2803
  CDS (1)..(1458)

SEQ ID NO: 35416 - protein, 485 aa, Thermoanaerobacter tengcongensis; identical to SEQ ID NO: 2804

SEQ ID NO: 35417 - DNA, 1762 bp, Oryza sativa; identical to SEQ ID NO: 2805
  CDS (41)..(1558)

SEQ ID NO: 35418 - protein, 505 aa, Oryza sativa; identical to SEQ ID NO: 2806

SEQ ID NO: 35419 - DNA, 1305 bp, Encephalitozoon cuniculi; identical to SEQ ID NO: 2807
  CDS (1)..(1305)

SEQ ID NO: 35420 - protein, 434 aa, Encephalitozoon cuniculi; identical to SEQ ID NO: 2808

SEQ ID NO: 35421 - DNA, 2125 bp, Drosophila melanogaster; identical to SEQ ID NO: 2809
  CDS (158)..(1738)

SEQ ID NO: 35422 - protein, 526 aa, Drosophila melanogaster; identical to SEQ ID NO: 2810

SEQ ID NO: 35423 - DNA, 1470 bp, Ralstonia solanacearum; identical to SEQ ID NO: 2811
  CDS (1)..(1470)

SEQ ID NO: 35424 - protein, 489 aa, Ralstonia solanacearum; identical to SEQ ID NO: 2812

SEQ ID NO: 35425 - DNA, 1521 bp, Enterococcus mundtii; identical to SEQ ID NO: 2813
  CDS (1)..(1521)

SEQ ID NO: 35426 - protein, 506 aa, Enterococcus mundtii; identical to SEQ ID NO: 2814

SEQ ID NO: 35427 - DNA, 2230 bp, Homo sapiens; identical to SEQ ID NO: 2815
  CDS (54)..(1601)

SEQ ID NO: 35428 - protein, 515 aa, Homo sapiens [sequence omitted]

SEQ ID NO: 35429 - DNA, 1470 bp, Rhizobium loti; identical to SEQ ID NO: 2817
  CDS (1)..(1470)

SEQ ID NO: 35430 - protein, 489 aa, Rhizobium loti; identical to SEQ ID NO: 2818

SEQ ID NO: 35431 - DNA, 1428 bp, Rhizobium loti; identical to SEQ ID NO: 2819
  CDS (1)..(1428)

SEQ ID NO: 35432 - protein, 475 aa, Rhizobium loti; identical to SEQ ID NO: 2820

SEQ ID NO: 35433 - DNA, 3584 bp, Plasmodium berghei; identical to SEQ ID NO: 2821
  CDS (370)..(3222)

SEQ ID NO: 35434 - protein, 950 aa, Plasmodium berghei; identical to SEQ ID NO: 2822

SEQ ID NO: 35435 - DNA, 1491 bp, Pasteurella multocida; identical to SEQ ID NO: 2823
  CDS (1)..(1491)

SEQ ID NO: 35436 - protein, 496 aa, Pasteurella multocida; identical to SEQ ID NO: 2824

SEQ ID NO: 35437 - DNA, 1470 bp, Pseudomonas putida; identical to SEQ ID NO: 2825
  CDS (1)..(1470)

SEQ ID NO: 35438 - protein, 489 aa, Pseudomonas putida; identical to SEQ ID NO: 2826

SEQ ID NO: 35439 - DNA, 1566 bp, Trypanosoma brucei; identical to SEQ ID NO: 2827
  CDS (1)..(1566)

SEQ ID NO: 35440 - protein, 521 aa, Trypanosoma brucei; identical to SEQ ID NO: 2828

SEQ ID NO: 35441 - DNA, 1904 bp, Triticum aestivum; identical to SEQ ID NO: 2829
  CDS (153)..(1682)

SEQ ID NO: 35442 - protein, 509 aa, Triticum aestivum; identical to SEQ ID NO: 2830

SEQ ID NO: 35443 - DNA, 2098 bp, Solanum tuberosum; identical to SEQ ID NO: 2831
  CDS (27)..(1775)

SEQ ID NO: 35444 - protein, 582 aa, Solanum tuberosum; identical to SEQ ID NO: 2832

SEQ ID NO: 35445 - DNA, 1924 bp, Dunaliella bioculata; identical to SEQ ID NO: 2833
  CDS (68)..(1840)

SEQ ID NO: 35446 - protein, 590 aa, Dunaliella bioculata; identical to SEQ ID NO: 2834

SEQ ID NO: 35447 - DNA, 1976 bp, Cyanidium caldarium; identical to SEQ ID NO: 2835
  CDS (46)..(1848)

SEQ ID NO: 35448 - protein, 600 aa, Cyanidium caldarium; identical to SEQ ID NO: 2836

SEQ ID NO: 35449 - DNA, 2106 bp, Drosophila melanogaster; identical to SEQ ID NO: 2837
  CDS (28)..(1746)

SEQ ID NO: 35450 - protein, 572 aa, Drosophila melanogaster; identical to SEQ ID NO: 2838

SEQ ID NO: 35451 - DNA, 1777 bp, Mesembryanthemum crystallinum; identical to SEQ ID NO: 2839
  CDS (39)..(1589)

SEQ ID NO: 35452 - protein, 516 aa, Mesembryanthemum crystallinum; identical to SEQ ID NO: 2840

SEQ ID NO: 35453 - DNA, 1542 bp, Mus musculus; identical to SEQ ID NO: 2841
  CDS (1)..(1542)

SEQ ID NO: 35454 - protein, 513 aa, Mus musculus; identical to SEQ ID NO: 2842

SEQ ID NO: 35455 - DNA, 1485 bp, Actinobacillus actinomycetemcomitans; identical to SEQ ID NO: 2843
  CDS (1)..(1485)

SEQ ID NO: 35456 - protein, 494 aa, Actinobacillus actinomycetemcomitans; identical to SEQ ID NO: 2844

SEQ ID NO: 35457 - DNA, 1473 bp, Buchnera aphidicola; identical to SEQ ID NO: 2845
  CDS (1)..(1473)

SEQ ID NO: 35458 - protein, 490 aa, Buchnera aphidicola; identical to SEQ ID NO: 2846

SEQ ID NO: 35459 - DNA, 1473 bp, Buchnera aphidicola; identical to SEQ ID NO: 2847
  CDS (1)..(1473)

SEQ ID NO: 35460 - protein, 490 aa, Buchnera aphidicola; identical to SEQ ID NO: 2848

SEQ ID NO: 35461 - DNA, 2049 bp, Ceratitis capitata; identical to SEQ ID NO: 2849
  CDS (60)..(1640)

SEQ ID NO: 35462 - protein, 526 aa, Ceratitis capitata; identical to SEQ ID NO: 2850

SEQ ID NO: 35463 - DNA, 1524 bp, Chlamydia muridarum; identical to SEQ ID NO: 2851
  CDS (1)..(1524)

SEQ ID NO: 35464 - protein, 507 aa, Chlamydia muridarum; identical to SEQ ID NO: 2852

SEQ ID NO: 35465 - DNA, 2062 bp, Drosophila melanogaster; identical to SEQ ID NO: 2853
  CDS (303)..(1877)

SEQ ID NO: 35466 - protein, 524 aa, Drosophila melanogaster; identical to SEQ ID NO: 2854

SEQ ID NO: 35467 - DNA, 1536 bp, Emericella nidulans; identical to SEQ ID NO: 2855
  CDS (1)..(1536)

SEQ ID NO: 35468 - protein, 511 aa, Emericella nidulans; identical to SEQ ID NO: 2856

SEQ ID NO: 35469 - DNA, 1957 bp, Leuconostoc mesenteroides; identical to SEQ ID NO: 2857
  CDS (206)..(1666)

SEQ ID NO: 35470 - protein, 486 aa, Leuconostoc mesenteroides; identical to SEQ ID NO: 2858

SEQ ID NO: 35471 - DNA, 2055 bp, Macropus robustus; identical to SEQ ID NO: 2859
  CDS (94)..(1641)

SEQ ID NO: 35472 - protein, 515 aa, Macropus robustus; identical to SEQ ID NO: 2860

SEQ ID NO: 35473 - DNA, 1530 bp, Nostoc punctiforme; identical to SEQ ID NO: 2861
  CDS (1)..(1530)

SEQ ID NO: 35474 - protein, 509 aa, Nostoc punctiforme; identical to SEQ ID NO: 2862

SEQ ID NO: 35475 - DNA, 1476 bp, Rhizobium meliloti; identical to SEQ ID NO: 2863
  CDS (1)..(1476)

SEQ ID NO: 35476 - protein, 491 aa, Rhizobium meliloti; identical to SEQ ID NO: 2864

SEQ ID NO: 35477 - DNA, 2853 bp, Homo sapiens; identical to SEQ ID NO: 2865
  CDS (273)..(2648)

SEQ ID NO: 35478 - protein, 791 aa, Homo sapiens; identical to SEQ ID NO: 2866

SEQ ID NO: 35479 - DNA, 1970 bp, Arabidopsis thaliana; identical to SEQ ID NO: 2867
  CDS (60)..(1790)

SEQ ID NO: 35480 - protein, 576 aa, Arabidopsis thaliana; identical to SEQ ID NO: 2868

SEQ ID NO: 35481 - DNA, 2112 bp, Arabidopsis thaliana; identical to SEQ ID NO: 2869
  CDS (142)..(1932)

SEQ ID NO: 35482 - protein, 596 aa, Arabidopsis thaliana; identical to SEQ ID NO: 2870

SEQ ID NO: 35483 - DNA, 2161 bp, Arabidopsis thaliana; identical to SEQ ID NO: 2871
  CDS (90)..(1967)

SEQ ID NO: 35484 - protein, 625 aa, Arabidopsis thaliana; identical to SEQ ID NO: 2872

SEQ ID NO: 35485 - DNA, 1936 bp, Arabidopsis thaliana; identical to SEQ ID NO: 2873
  CDS (136)..(1686)

SEQ ID NO: 35486 - protein, 516 aa, Arabidopsis thaliana; identical to SEQ ID NO: 2874

SEQ ID NO: 35487 - DNA, 1959 bp, Arabidopsis thaliana; identical to SEQ ID NO: 2875
  CDS (194)..(1741)

SEQ ID NO: 35488 - protein, 515 aa, Arabidopsis thaliana [sequence omitted]

SEQ ID NO: 35489 - DNA, 1503 bp, Xenopus laevis; identical to SEQ ID NO: 2877
  CDS (1)..(1503)

SEQ ID NO: 35490 - protein, 500 aa, Xenopus laevis; identical to SEQ ID NO: 2878

SEQ ID NO: 35491 - DNA, 2004 bp, Arabidopsis thaliana; identical to SEQ ID NO: 2879
  CDS (51)..(1850)

SEQ ID NO: 35492 - protein, 599 aa, Arabidopsis thaliana; identical to SEQ ID NO: 2880

SEQ ID NO: 35493 - DNA, 23 bp, Artificial sequence
  Primer sequence
atgagtgaaggccccgtcaaatt

SEQ ID NO: 35494 - DNA, 25 bp, Artificial sequence
  Primer sequence
ctaattatccttcgtatcttctggc

SEQ ID NO: 35495 - protein, 806 aa, Artificial sequence; identical to SEQ ID NO: 18604
  Consensus
  Variant (2)..(3): Xaa in position 2 to 3 is any amino acid
  Variant (7)..(9): Xaa in position 7 to 9 is any amino acid
  Variant (11)..(12): Xaa in position 11 to 12 is any amino acid
  Variant (14)..(17): Xaa in position 14 to 17 is any amino acid
  Variant (19)..(23): Xaa in position 19 to 23 is any amino acid
  Variant (25)..(32): Xaa in position 25 to 32 is any amino acid
  Variant (34)..(35): Xaa in position 34 to 35 is any amino acid
  Variant (37)..(81): Xaa in position 37 to 81 is any amino acid
  Variant (83)..(95): Xaa in position 83 to 95 is any amino acid
  Variant (97)..(225): Xaa in position 97 to 225 is any amino acid
  Variant (227)..(230): Xaa in position 227 to 230 is any amino acid
  Variant (232)..(258): Xaa in position 232 to 258 is any amino acid
  Variant (260)..(262): Xaa in position 260 to 262 is any amino acid
  Variant (266)..(266): Xaa in position 266 is any amino acid
  Variant (268)..(268): Xaa in position 268 is any amino acid
  Variant (270)..(271): Xaa in position 270 to 271 is any amino acid
  Variant (273)..(275): Xaa in position 273 to 275 is any amino acid
  Variant (277)..(285): Xaa in position 277 to 285 is any amino acid
  Variant (287)..(290): Xaa in position 287 to 290 is any amino acid
  Variant (300)..(300): Xaa in position 300 is any amino acid
  Variant (302)..(302): Xaa in position 302 is any amino acid
  Variant (304)..(307): Xaa in position 304 to 307 is any amino acid
  Variant (310)..(310): Xaa in position 310 is any amino acid
  Variant (312)..(318): Xaa in position 312 to 318 is any amino acid
  Variant (321)..(323): Xaa in position 321 to 323 is any amino acid
  Variant (325)..(328): Xaa in position 325 to 328 is any amino acid
  Variant (330)..(332): Xaa in position 330 to 332 is any amino acid
  Variant (334)..(335): Xaa in position 334 to 335 is any amino acid
  Variant (337)..(339): Xaa in position 337 to 339 is any amino acid
  Variant (341)..(342): Xaa in position 341 to 342 is any amino acid
  Variant (344)..(347): Xaa in position 344 to 347 is any amino acid
  Variant (349)..(351): Xaa in position 349 to 351 is any amino acid
  Variant (354)..(355): Xaa in position 354 to 355 is any amino acid
  Variant (359)..(360): Xaa in position 359 to 360 is any amino acid
  Variant (362)..(366): Xaa in position 362 to 366 is any amino acid
  Variant (370)..(370): Xaa in position 370 is any amino acid
  Variant (372)..(382): Xaa in position 372 to 382 is any amino acid
  Variant (385)..(385): Xaa in position 385 is any amino acid
  Variant (387)..(387): Xaa in position 387 is any amino acid
  Variant (389)..(405): Xaa in position 389 to 405 is any amino acid
  Variant (409)..(438): Xaa in position 409 to 438 is any amino acid
  Variant (440)..(451): Xaa in position 440 to 451 is any amino acid
  Variant (453)..(455): Xaa in position 453 to 455 is any amino acid
  Variant (457)..(465): Xaa in position 457 to 465 is any amino acid
  Variant (467)..(467): Xaa in position 467 is any amino acid
  Variant (470)..(470): Xaa in position 470 is any amino acid
  Variant (475)..(478): Xaa in position 475 to 478 is any amino acid
  Variant (481)..(493): Xaa in position 481 to 493 is any amino acid
  Variant (495)..(524): Xaa in position 495 to 524 is any amino acid
  Variant (526)..(531): Xaa in position 526 to 531 is any amino acid
  Variant (534)..(534): Xaa in position 534 is any amino acid
  Variant (536)..(543): Xaa in position 536 to 543 is any amino acid
  Variant (545)..(545): Xaa in position 545 is any amino acid
  Variant (548)..(588): Xaa in position 548 to 588 is any amino acid
  Variant (592)..(592): Xaa in position 592 is any amino acid
  Variant (594)..(595): Xaa in position 594 to 595 is any amino acid
  Variant (597)..(599): Xaa in position 597 to 599 is any amino acid
  Variant (601)..(604): Xaa in position 601 to 604 is any amino acid
  Variant (606)..(609): Xaa in position 606 to 609 is any amino acid
  Variant (611)..(614): Xaa in position 611 to 614 is any amino acid
  Variant (616)..(797): Xaa in position 616 to 797 is any amino acid
  Variant (799)..(800): Xaa in position 799 to 800 is any amino acid
  Variant (802)..(805): Xaa in position 802 to 805 is any amino acid

SEQ ID NO: 35496 - protein, 150 aa, Artificial sequence; identical to SEQ ID NO: 2917
  Consensus
  Variant (1)..(1): Xaa in position 1 is Arg or Lys
  Variant (2)..(2): Xaa in position 2 is Val, Ile, Leu or Ala
  Variant (3)..(3): Xaa in position 3 is Ile, Val, Met or Ala
  Variant (4)..(4): Xaa in position 4 is Ile, Val, Leu, Met or Ala
  Variant (8)..(8): Xaa in position 8 is Phe, Ile, Leu or Tyr
  Variant (9)..(9): Xaa in position 9 is Gly or Ala
  Variant (10)..(10): Xaa in position 10 is any amino acid
  Variant (11)..(11): Xaa in position 11 is Asp, Ser or Asn
  Variant (12)..(13): Xaa in position 12 to 13 is any amino acid
  Variant (14)..(14): Xaa in position 14 is Ser, Thr or Asn
  Variant (15)..(15): Xaa in position 15 is Ala, Ser, Phe or Tyr
  Variant (16)..(17): Xaa in position 16 to 17 is any amino acid
  Variant (18)..(18): Xaa in position 18 is Leu, Ile, Val or Phe
  Variant (19)..(21): Xaa in position 19 to 21 is any amino acid
  Variant (22)..(22): Xaa in position 22 is Leu, Ile or Val
  Variant (23)..(27): Xaa in position 23 to 27 is any amino acid
  Variant (28)..(28): Xaa in position 28 is Glu, Asp, Pro or Ser
  Variant (29)..(30): Xaa in position 29 to 30 is any amino acid
  Variant (31)..(31): Xaa in position 31 is Ile, Val, Leu, Thr or Met
  Variant (32)..(32): Xaa in position 32 is Tyr, Phe or Leu
  Variant (33)..(33): Xaa in position 33 is Arg, His or Leu
  Variant (34)..(34): Xaa in position 34 is Ile, Val, Met or Leu
  Variant (37)..(37): Xaa in position 37 is Tyr or Phe
  Variant (39)..(39): Xaa in position 39 is Gly, Ser or Ala
  Variant (40)..(40): Xaa in position 40 is Lys, Arg or Glu
  Variant (41)..(42): Xaa in position 41 to 42 is any amino acid
  Variant (43)..(43): Xaa in position 43 is Val, Ile, Leu, Ala or Met
  Variant (44)..(44): Xaa in position 44 is any amino acid
  Variant (45)..(45): Xaa in position 45 is Asn, Gly, Gln or Ala
  Variant (46)..(46): Xaa in position 46 is Leu, Ile, Met, Phe or Val
  Variant (47)..(49): Xaa in position 47 to 49 is any amino acid
  Variant (50)..(50): Xaa in position 50 is Arg, Lys or Glu
  Variant (51)..(51): Xaa in position 51 is Phe or Tyr
  Variant (52)..(52): Xaa in position 52 is any amino acid
  Variant (54)..(59): Xaa in position 54 to 59 is any amino acid
  Variant (60)..(60): Xaa in position 60 is any or no amino acid
  Variant (61)..(61): Xaa in position 61 is Trp, Met, Asn or Leu
  Variant (62)..(63): Xaa in position 62 to 63 is any amino acid
  Variant (64)..(65): Xaa in position 64 to 65 is any or no amino acid
  Variant (66)..(66): Xaa in position 66 is Ile, Val or Ala
  Variant (67)..(68): Xaa in position 67 to 68 is any amino acid
  Variant (69)..(69): Xaa in position 69 is Val, Ile, Met or Leu
  Variant (70)..(70): Xaa in position 70 is any amino acid
  Variant (71)..(71): Xaa in position 71 is Ile, Leu, Val, Phe or Ser
  Variant (72)..(74): Xaa in position 72 to 74 is any amino acid
  Variant (76)..(77): Xaa in position 76 to 77 is any amino acid
  Variant (78)..(78): Xaa in position 78 is Gly, Asp, Val or Ala
  Variant (79)..(81): Xaa in position 79 to 81 is any amino acid
  Variant (82)..(82): Xaa in position 82 is Arg or Lys
  Variant (83)..(84): Xaa in position 83 to 84 is any or no amino acid
  Variant (85)..(85): Xaa in position 85 is Tyr or Phe
  Variant (86)..(86): Xaa in position 86 is Tyr, Phe or Trp
  Variant (87)..(87): Xaa in position 87 is Asp, Glu, Ala or Asn
  Variant (88)..(89): Xaa in position 88 to 89 is any amino acid
  Variant (91)..(91): Xaa in position 91 is any amino acid
  Variant (92)..(92): Xaa in position 92 is any or no amino acid
  Variant (93)..(93): Xaa in position 93 is Leu, Ile, Val, Met or Ala
  Variant (94)..(94): Xaa in position 94 is Arg, Lys or Leu
  Variant (96)..(96): Xaa in position 96 is Met, Val, Ile or Leu
  Variant (97)..(97): Xaa in position 97 is Val, Met, Ile, Leu or Phe
  Variant (98)..(98): Xaa in position 98 is Gln, Pro or Thr
  Variant (99)..(99): Xaa in position 99 is Asn or Ser
  Variant (100)..(100): Xaa in position 100 is His, Gln or Pro
  Variant (101)..(102): Xaa in position 101 to 102 is any amino acid
  Variant (103)..(103): Xaa in position 103 is Gln, Glu, Asn or Leu
  Variant (104)..(104): Xaa in position 104 is Leu, Ile, Val, Met or Thr
  Variant (105)..(105): Xaa in position 105 is Leu, Met, Val, Ile, Phe or Tyr
  Variant (106)..(106): Xaa in position 106 is any amino acid
  Variant (107)..(107): Xaa in position 107 is Leu, Met, Ile, Val, Trp or Phe
  Variant (108)..(109): Xaa in position 108 to 109 is any amino acid
  Variant (111)..(111): Xaa in position 111 is Glu, Asp, Ser or Asn
  Variant (112)..(112): Xaa in position 112 is any amino acid
  Variant (114)..(118): Xaa in position 114 to 118 is any amino acid
  Variant (119)..(121): Xaa in position 119 to 121 is any or no amino acid
  Variant (122)..(122): Xaa in position 122 is Ile, Val, Leu, Phe or Met
  Variant (123)..(124): Xaa in position 123 to 124 is any amino acid
  Variant (125)..(125): Xaa in position 125 is Glu, Lys, Ala, Arg or His
  Variant (126)..(126): Xaa in position 126 is Lys or Val
  Variant (127)..(128): Xaa in position 127 to 128 is any amino acid
  Variant (129)..(129): Xaa in position 129 is Val, Ile, Ala, Leu or Phe
  Variant (130)..(130): Xaa in position 130 is Leu, Ile, Val, Phe or Met
  Variant (131)..(140): Xaa in position 131 to 140 is any amino acid
  Variant (141)..(145): Xaa in position 141 to 145 is any or no amino acid
  Variant (146)..(146): Xaa in position 146 is Val, Leu, Ile, Ala or Ser
  Variant (147)..(147): Xaa in position 147 is any amino acid
  Variant (148)..(148): Xaa in position 148 is Gly or Ala
  Variant (149)..(149): Xaa in position 149 is Gln or Arg
  Variant (150)..(150): Xaa in position 150 is Tyr or Phe

SEQ ID NO: 35497 - protein, 44 aa, Artificial sequence; identical to SEQ ID NO: 2918
  Consensus
  Variant (1)..(1): Xaa in position 1 is Tyr or Leu
  Variant (2)..(2): Xaa in position 2 is any amino acid
  Variant (3)..(13): Xaa in position 3 to 13 is any or no amino acid
  Variant (15)..(17): Xaa in position 15 to 17 is any amino acid
  Variant (19)..(19): Xaa in position 19 is Phe or Tyr
  Variant (20)..(25): Xaa in position 20 to 25 is any amino acid
  Variant (26)..(26): Xaa in position 26 is Ile, Val, Leu or Phe
  Variant (27)..(29): Xaa in position 27 to 29 is any amino acid
  Variant (30)..(30): Xaa in position 30 is Arg, Asn, Phe or Gln
  Variant (31)..(31): Xaa in position 31 is Trp or Phe
  Variant (32)..(32): Xaa in position 32 is any amino acid
  Variant (33)..(33): Xaa in position 33 is Gly or Asp
  Variant (34)..(34): Xaa in position 34 is Val or Thr
  Variant (36)..(36): Xaa in position 36 is Phe or Ile
  Variant (37)..(37): Xaa in position 37 is any amino acid
  Variant (38)..(38): Xaa in position 38 is Leu, Met, Ile, Val or Phe
  Variant (39)..(40): Xaa in position 39 to 40 is any amino acid
  Variant (41)..(41): Xaa in position 41 is Gly or Ala
  Variant (43)..(43): Xaa in position 43 is any amino acid
  Variant (44)..(44): Xaa in position 44 is Leu, Met or Val

SEQ ID NO: 35498 - protein, 97 aa, Artificial sequence; identical to SEQ ID NO: 2919
  Consensus
  Variant (1)..(1): Xaa in position 1 is Asn, Asp, Gln, Arg or Lys
  Variant (2)..(4): Xaa in position 2 to 4 is any amino acid
  Variant (5)..(5): Xaa in position 5 is Ile, Leu, Met, Phe or Val
  Variant (6)..(6): Xaa in position 6 is any amino acid
  Variant (7)..(7): Xaa in position 7 is Ile, Leu, Val, Ala or Ser
  Variant (8)..(8): Xaa in position 8 is any amino acid
  Variant (9)..(9): Xaa in position 9 is Pro or His
  Variant (10)..(12): Xaa in position 10 to 12 is any amino acid
  Variant (13)..(13): Xaa in position 13 is Ile, Val, Met, Leu, Phe or Ala
  Variant (14)..(19): Xaa in position 14 to 19 is any amino acid
  Variant (20)..(20): Xaa in position 20 is Lys, Ser or Arg
  Variant (21)..(29): Xaa in position 21 to 29 is any amino acid
  Variant (30)..(35): Xaa in position 30 to 35 is any or no amino acid
  Variant (36)..(36): Xaa in position 36 is Leu, Ile, Met or Val
  Variant (37)..(44): Xaa in position 37 to 44 is any amino acid
  Variant (45)..(64): Xaa in position 45 to 64 is any or no amino acid
  Variant (65)..(65): Xaa in position 65 is Ala, Gly, Pro or Ser
  Variant (66)..(66): Xaa in position 66 is Tyr or Leu
  Variant (67)..(68): Xaa in position 67 to 68 is any amino acid
  Variant (69)..(69): Xaa in position 69 is Leu, Met or Tyr
  Variant (70)..(70): Xaa in position 70 is Leu, Ile, Phe or Met
  Variant (71)..(71): Xaa in position 71 is any amino acid
  Variant (72)..(72): Xaa in position 72 is Asp, Glu, Ala, Asn or His
  Variant (73)..(75): Xaa in position 73 to 75 is any amino acid
  Variant (76)..(76): Xaa in position 76 is Gly, Ser or Asp
  Variant (77)..(80): Xaa in position 77 to 80 is any amino acid
  Variant (81)..(81): Xaa in position 81 is Phe or Tyr
  Variant (82)..(85): Xaa in position 82 to 85 is any amino acid
  Variant (86)..(86): Xaa in position 86 is any or no amino acid
  Variant (87)..(87): Xaa in position 87 is Val, Ile, Leu, Ala or Gln
  Variant (88)..(90): Xaa in position 88 to 90 is any amino acid
  Variant (92)..(96): Xaa in position 92 to 96 is any amino acid
  Variant (97)..(97): Xaa in position 97 is Ile, Val, Leu, Phe or Ala

SEQ ID NO: 35499 - DNA, 2077 bp, Saccharomyces cerevisiae; identical to SEQ ID NO: 3739
  CDS (482)..(1987)

SEQ ID NO: 35500 - protein, 501 aa, Saccharomyces cerevisiae; identical to SEQ ID NO: 3740

SEQ ID NO: 35501 - DNA, 1668 bp, Caenorhabditis elegans; identical to SEQ ID NO: 3749
  CDS (121)..(1668)

SEQ ID NO: 35502 - protein, 515 aa, Caenorhabditis elegans; identical to SEQ ID NO: 15344

SEQ ID NO: 35503 - DNA, 1365 bp, Schizosaccharomyces pombe; identical to SEQ ID NO: 3751
  CDS (1)..(1365)

SEQ ID NO: 35504 - protein, 454 aa, Schizosaccharomyces pombe; identical to SEQ ID NO: 3752

SEQ ID NO: 35505 - DNA, 1521 bp, Debaryomyces hansenii CBS767; identical to SEQ ID NO: 3757
  CDS (1)..(1521)

SEQ ID NO: 35506 - protein, 506 aa, Debaryomyces hansenii CBS767; identical to SEQ ID NO: 3758

SEQ ID NO: 35507 - DNA, 1353 bp, Yarrowia lipolytica CLIB99; identical to SEQ ID NO: 3759
  CDS (1)..(1353)

SEQ ID NO: 35508 - protein, 450 aa, Yarrowia lipolytica CLIB99; identical to SEQ ID NO: 3760

SEQ ID NO: 35509 - DNA, 1380 bp, Kluyveromyces lactis NRRL Y; identical to SEQ ID NO: 3761
  CDS (1)..(1380)

SEQ ID NO: 35510 - protein, 459 aa, Kluyveromyces lactis NRRL Y; identical to SEQ ID NO: 3762

SEQ ID NO: 35511 - DNA, 1431 bp, Candida glabrata CBS138; identical to SEQ ID NO: 3767
  CDS (1)..(1431)

SEQ ID NO: 35512 - protein, 476 aa, Candida glabrata CBS138; identical to SEQ ID NO: 3768

SEQ ID NO: 35513 - DNA, 1965 bp, Oryza sativa; identical to SEQ ID NO: 3773
  CDS (257)..(1726)

SEQ ID NO: 35514 - protein, 489 aa, Oryza sativa; identical to SEQ ID NO: 3774

SEQ ID NO: 35515 - DNA, 1374 bp, Cryptosporidium parvum; identical to SEQ ID NO: 15357
  CDS (1)..(1374)

SEQ ID NO: 35516 - protein, 457 aa, Cryptosporidium parvum; identical to SEQ ID NO: 15358

SEQ ID NO: 35517 - DNA, 1862 bp, Oryza sativa; identical to SEQ ID NO: 15359
  CDS (98)..(1573)

SEQ ID NO: 35518 - protein, 491 aa, Oryza sativa; identical to SEQ ID NO: 15360

SEQ ID NO: 35519 - DNA, 1497 bp, Ashbya gossypii; identical to SEQ ID NO: 3797
  CDS (1)..(1497)

SEQ ID NO: 35520 - protein, 498 aa, Ashbya gossypii; identical to SEQ ID NO: 3798

SEQ ID NO: 35521 - DNA, 1425 bp, Neurospora crassa; identical to SEQ ID NO: 3817
  CDS (1)..(1425)

SEQ ID NO: 35522 - protein, 474 aa, Neurospora crassa; identical to SEQ ID NO: 3818

SEQ ID NO: 35523 - DNA, 1831 bp, Arabidopsis thaliana; identical to SEQ ID NO: 3841
  CDS (116)..(1525)

SEQ ID NO: 35524 - protein, 469 aa, Arabidopsis thaliana; identical to SEQ ID NO: 3842

SEQ ID NO: 35525 - DNA, 1870 bp, Arabidopsis thaliana; identical to SEQ ID NO: 15367
  CDS (207)..(1607)

SEQ ID NO: 35526 - protein, 466 aa, Arabidopsis thaliana; identical to SEQ ID NO: 15368

SEQ ID NO: 35527 - DNA, 1711 bp, Cryptosporidium parvum; identical to SEQ ID NO: 3855
  CDS (290)..(1549)

SEQ ID NO: 35528 - protein, 419 aa, Cryptosporidium parvum; identical to SEQ ID NO: 3856

SEQ ID NO: 35529 - DNA, 1844 bp, Arabidopsis thaliana; identical to SEQ ID NO: 15371
  CDS (61)..(1521)

SEQ ID NO: 35530 - protein, 486 aa, Arabidopsis thaliana; identical to SEQ ID NO: 3858

SEQ ID NO: 35531 - DNA, 3183 bp, Arabidopsis thaliana; identical to SEQ ID NO: 15373
  CDS (1)..(3183)

SEQ ID NO: 35532 - protein, 1060 aa, Arabidopsis thaliana; identical to SEQ ID NO: 15374

SEQ ID NO: 35533 - DNA, 1629 bp, Arabidopsis thaliana; identical to SEQ ID NO: 15375
  CDS (1)..(1629)

SEQ ID NO: 35534 - protein, 542 aa, Arabidopsis thaliana; identical to SEQ ID NO: 15376

SEQ ID NO: 35535 - DNA, 1758 bp, Arabidopsis thaliana; identical to SEQ ID NO: 15377
  CDS (101)..(1552)

SEQ ID NO: 35536 - protein, 483 aa, Arabidopsis thaliana; identical to SEQ ID NO: 3864

SEQ ID NO: 35537 - DNA, 1398 bp, Arabidopsis thaliana; identical to SEQ ID NO: 3865
  CDS (1)..(1398)

SEQ ID NO: 35538 - protein, 465 aa, Arabidopsis thaliana; identical to SEQ ID NO: 3866

SEQ ID NO: 35539 - DNA, 1863 bp, Drosophila melanogaster; identical to SEQ ID NO: 15381
  CDS (77)..(1762)

SEQ ID NO: 35540 - protein, 561 aa, Drosophila melanogaster; identical to SEQ ID NO: 3868

SEQ ID NO: 35541 - DNA, 1847 bp, Homo sapiens; identical to SEQ ID NO: 15383
  CDS (45)..(1691)

SEQ ID NO: 35542 - protein, 548 aa, Homo sapiens; identical to SEQ ID NO: 15384

SEQ ID NO: 35543 - DNA, 23 bp, Artificial sequence
  Primer sequence
atgtcccatcgtatagcaccttc

SEQ ID NO: 35544 - DNA, 27 bp, Artificial sequence
  Primer sequence
tcaatcacaaccaaaatactttgaatc

SEQ ID NO: 35545 - protein, 466 aa, Artificial sequence; identical to SEQ ID NO: 15387
  Consensus
  Variant (2)..(4): Xaa in position 2 to 4 is any amino acid
  Variant (5)..(8): Xaa in position 5 to 8 is any or no amino acid
  Variant (10)..(12): Xaa in position 10 to 12 is any amino acid
  Variant (16)..(38): Xaa in position 16 to 38 is any amino acid
  Variant (41)..(57): Xaa in position 41 to 57 is any amino acid
  Variant (60)..(60): Xaa in position 60 is any amino acid
  Variant (62)..(78): Xaa in position 62 to 78 is any amino acid
  Variant (80)..(84): Xaa in position 80 to 84 is any amino acid
  Variant (86)..(86): Xaa in position 86 is any amino acid
  Variant (88)..(88): Xaa in position 88 is any amino acid
  Variant (90)..(110): Xaa in position 90 to 110 is any amino acid
  Variant (114)..(124): Xaa in position 114 to 124 is any amino acid
  Variant (126)..(134): Xaa in position 126 to 134 is any amino acid
  Variant (135)..(163): Xaa in position 135 to 163 is any or no amino acid
  Variant (165)..(165): Xaa in position 165 is any amino acid
  Variant (167)..(168): Xaa in position 167 to 168 is any amino acid
  Variant (170)..(170): Xaa in position 170 is any amino acid
  Variant (173)..(174): Xaa in position 173 to 174 is any amino acid
  Variant (177)..(180): Xaa in position 177 to 180 is any amino acid
  Variant (183)..(189): Xaa in position 183 to 189 is any amino acid
  Variant (191)..(194): Xaa in position 191 to 194 is any amino acid
  Variant (198)..(214): Xaa in position 198 to 214 is any amino acid
  Variant (216)..(219): Xaa in position 216 to 219 is any amino acid
  Variant (221)..(222): Xaa in position 221 to 222 is any amino acid
  Variant (224)..(234): Xaa in position 224 to 234 is any amino acid
  Variant (236)..(293): Xaa in position 236 to 293 is any amino acid
  Variant (295)..(297): Xaa in position 295 to 297 is any amino acid
  Variant (299)..(341): Xaa in position 299 to 341 is any amino acid
  Variant (342)..(361): Xaa in position 342 to 361 is any or no amino acid
  Variant (363)..(363): Xaa in position 363 is any amino acid
  Variant (365)..(380): Xaa in position 365 to 380 is any amino acid
  Variant (382)..(383): Xaa in position 382 to 383 is any amino acid
  Variant (385)..(400): Xaa in position 385 to 400 is any amino acid
  Variant (401)..(423): Xaa in position 401 to 423 is any or no amino acid
  Variant (425)..(451): Xaa in position 425 to 451 is any amino acid
  Variant (453)..(455): Xaa in position 453 to 455 is any amino acid
  Variant (457)..(465): Xaa in position 457 to 465 is any amino acid

SEQ ID NO: 35546 - protein, 528 aa, Artificial sequence; identical to SEQ ID NO: 15388
  Consensus
  Variant (3)..(4): Xaa in position 3 to 4 is any amino acid
  Variant (5)..(8): Xaa in position 5 to 8 is any or no amino acid
  Variant (10)..(12): Xaa in position 10 to 12 is any amino acid
  Variant (17)..(17): Xaa in position 17 is any amino acid
  Variant (19)..(21): Xaa in position 19 to 21 is any amino acid
  Variant (23)..(31): Xaa in position 23 to 31 is any amino acid
  Variant (33)..(36): Xaa in position 33 to 36 is any amino acid
  Variant (38)..(38): Xaa in position 38 is any amino acid
  Variant (41)..(42): Xaa in position 41 to 42 is any amino acid
  Variant (44)..(55): Xaa in position 44 to 55 is any amino acid
  Variant (57)..(57): Xaa in position 57 is any amino acid
  Variant (60)..(60): Xaa in position 60 is any amino acid
  Variant (62)..(62): Xaa in position 62 is any amino acid
  Variant (64)..(64): Xaa in position 64 is any amino acid
  Variant (66)..(75): Xaa in position 66 to 75 is any amino acid
  Variant (77)..(78): Xaa in position 77 to 78 is any amino acid
  Variant (80)..(84): Xaa in position 80 to 84 is any amino acid
  Variant (86)..(86): Xaa in position 86 is any amino acid
  Variant (88)..(88): Xaa in position 88 is any amino acid
  Variant (90)..(91): Xaa in position 90 to 91 is any amino acid
  Variant (93)..(106): Xaa in position 93 to 106 is any amino acid
  Variant (108)..(110): Xaa in position 108 to 110 is any amino acid
  Variant (114)..(117): Xaa in position 114 to 117 is any amino acid
  Variant (119)..(124): Xaa in position 119 to 124 is any amino acid
  Variant (126)..(128): Xaa in position 126 to 128 is any amino acid
  Variant (130)..(131): Xaa in position 130 to 131 is any amino acid
  Variant (134)..(134): Xaa in position 134 is any amino acid
  Variant (135)..(163): Xaa in position 135 to 163 is any or no amino acid
  Variant (165)..(165): Xaa in position 165 is any amino acid
  Variant (167)..(168): Xaa in position 167 to 168 is any amino acid
  Variant (170)..(170): Xaa in position 170 is any amino acid
  Variant (173)..(174): Xaa in position 173 to 174 is any amino acid
  Variant (177)..(179): Xaa in position 177 to 179 is any amino acid
  Variant (183)..(189): Xaa in position 183 to 189 is any amino acid
  Variant (191)..(194): Xaa in position 191 to 194 is any amino acid
  Variant (198)..(204): Xaa in position 198 to 204 is any amino acid
  Variant (206)..(209): Xaa in position 206 to 209 is any amino acid
  Variant (212)..(214): Xaa in position 212 to 214 is any amino acid
  Variant (216)..(219): Xaa in position 216 to 219 is any amino acid
  Variant (221)..(222): Xaa in position 221 to 222 is any amino acid
  Variant (224)..(229): Xaa in position 224 to 229 is any amino acid
  Variant (231)..(234): Xaa in position 231 to 234 is any amino acid
  Variant (236)..(245): Xaa in position 236 to 245 is any amino acid
  Variant (247)..(271): Xaa in position 247 to 271 is any amino acid
  Variant (273)..(273): Xaa in position 273 is any amino acid
  Variant (275)..(279): Xaa in position 275 to 279 is any amino acid
  Variant (281)..(290): Xaa in position 281 to 290 is any amino acid
  Variant (293)..(293): Xaa in position 293 is any amino acid
  Variant (296)..(297): Xaa in position 296 to 297 is any amino acid
  Variant (299)..(307): Xaa in position 299 to 307 is any amino acid
  Variant (309)..(341): Xaa in position 309 to 341 is any amino acid
  Variant (342)..(361): Xaa in position 342 to 361 is any or no amino acid
  Variant (363)..(363): Xaa in position 363 is any amino acid
  Variant (365)..(370): Xaa in position 365 to 370 is any amino acid
  Variant (372)..(379): Xaa in position 372 to 379 is any amino acid
  Variant (383)..(383): Xaa in position 383 is any amino acid
  Variant (386)..(391): Xaa in position 386 to 391 is any amino acid
  Variant (393)..(394): Xaa in position 393 to 394 is any amino acid
  Variant (395)..(417): Xaa in position 395 to 417 is any or no amino acid
  Variant (419)..(422): Xaa in position 419 to 422 is any amino acid
  Variant (425)..(426): Xaa in position 425 to 426 is any amino acid
  Variant (428)..(434): Xaa in position 428 to 434 is any amino acid
  Variant (436)..(436): Xaa in position 436 is any amino acid
  Variant (438)..(438): Xaa in position 438 is any amino acid
  Variant (440)..(445): Xaa in position 440 to 445 is any amino acid
  Variant (447)..(451): Xaa in position 447 to 451 is any amino acid
  Variant (453)..(455): Xaa in position 453 to 455 is any amino acid
  Variant (457)..(460): Xaa in position 457 to 460 is any amino acid
  Variant (462)..(465): Xaa in position 462 to 465 is any amino acid
  Variant (467)..(476): Xaa in position 467 to 476 is any amino acid
  Variant (478)..(484): Xaa in position 478 to 484 is any amino acid
  Variant (486)..(525): Xaa in position 486 to 525 is any amino acid

SEQ ID NO: 35547 - protein, 45 aa, Artificial sequence; identical to SEQ ID NO: 15389
  Consensus
  Variant (1)..(1): Xaa in position 1 is Phe, Tyr, Ser or Arg
  Variant (2)..(2): Xaa in position 2 is Val, Ile, Ala or Phe
  Variant (4)..(4): Xaa in position 4 is Gly or Ala
  Variant (5)..(8): Xaa in position 5 to 8 is any or no amino acid
  Variant (9)..(9): Xaa in position 9 is Val, Ile or Leu
  Variant (10)..(10): Xaa in position 10 is any amino acid
  Variant (12)..(12): Xaa in position 12 is any amino acid
  Variant (13)..(13): Xaa in position 13 is Ser, Ala or Thr
  Variant (14)..(14): Xaa in position 14 is Ala, Gly or Ser
  Variant (18)..(19): Xaa in position 18 to 19 is Thr or Ser
  Variant (20)..(20): Xaa in position 20 is Val or Leu
  Variant (21)..(21): Xaa in position 21 is Cys, Ala or Ser
  Variant (22)..(23): Xaa in position 22 to 23 is any amino acid
  Variant (24)..(24): Xaa in position 24 is Ile or Leu
  Variant (25)..(25): Xaa in position 25 is Ile, Val, Met or Phe
  Variant (26)..(27): Xaa in position 26 to 27 is any amino acid
  Variant (28)..(28): Xaa in position 28 is Leu or Ile
  Variant (29)..(30): Xaa in position 29 to 30 is any amino acid
  Variant (31)..(31): Xaa in position 31 is Pro, Gln, His or Lys
  Variant (32)..(32): Xaa in position 32 is Trp, Arg or His
  Variant (33)..(33): Xaa in position 33 is Val, Thr, Ala or Ile
  Variant (34)..(34): Xaa in position 34 is Val or Thr
  Variant (35)..(35): Xaa in position 35 is Leu, Val or Ile
  Variant (36)..(36): Xaa in position 36 is Ile, Leu or Val
  Variant (37)..(37): Xaa in position 37 is Ser, Asn, Glu or Thr
  Variant (38)..(38): Xaa in position 38 is any amino acid
  Variant (39)..(39): Xaa in position 39 is Asp or Glu
  Variant (40)..(40): Xaa in position 40 is Ser, Asn or Cys
  Variant (43)..(44): Xaa in position 43 to 44 is any amino acid
  Variant (45)..(45): Xaa in position 45 is Leu, Pro or Val

SEQ ID NO: 35548 - protein, 78 aa, Artificial sequence; identical to SEQ ID NO: 15390
  Consensus
  Variant (1)..(1): Xaa in position 1 is Tyr, Phe or His
  Variant (2)..(2): Xaa in position 2 is Asn or Asp
  Variant (5)..(5): Xaa in position 5 is any amino acid
  Variant (7)..(7): Xaa in position 7 is any amino acid
  Variant (8)..(8): Xaa in position 8 is Ala or Ser
  Variant (9)..(9): Xaa in position 9 is any amino acid
  Variant (10)..(10): Xaa in position 10 is Asp or Asn
  Variant (11)..(11): Xaa in position 11 is any amino acid
  Variant (12)..(12): Xaa in position 12 is Glu or Asp
  Variant (13)..(13): Xaa in position 13 is any amino acid
  Variant (14)..(14): Xaa in position 14 is Leu, Ala or Ile
  Variant (15)..(17): Xaa in position 15 to 17 is any amino acid
  Variant (18)..(18): Xaa in position 18 is Leu, Met, Val, Ile or Ala
  Variant (19)..(20): Xaa in position 19 to 20 is any amino acid
  Variant (21)..(21): Xaa in position 21 is Leu or Ile
  Variant (22)..(22): Xaa in position 22 is Lys or Arg
  Variant (23)..(23): Xaa in position 23 is any amino acid
  Variant (25)..(28): Xaa in position 25 to 28 is any amino acid
  Variant (29)..(29): Xaa in position 29 is Ile, Val or Met
  Variant (31)..(31): Xaa in position 31 is any amino acid
  Variant (33)..(33): Xaa in position 33 is Asp, Ser, Cys or Asn
  Variant (35)..(36): Xaa in position 35 to 36 is any amino acid
  Variant (37)..(37): Xaa in position 37 is His or Tyr
  Variant (38)..(38): Xaa in position 38 is any amino acid
  Variant (39)..(39): Xaa in position 39 is Arg, Ser or Asn
  Variant (40)..(44): Xaa in position 40 to 44 is any amino acid
  Variant (45)..(46): Xaa in position 45 to 46 is any or no amino acid
  Variant (47)..(47): Xaa in position 47 is Val, Ile, Met or Leu
  Variant (48)..(48): Xaa in position 48 is Tyr, Asn, Ser or Phe
  Variant (49)..(49): Xaa in position 49 is Gly, Pro, Ala or Ser
  Variant (50)..(50): Xaa in position 50 is any amino acid
  Variant (51)..(51): Xaa in position 51 is Asp, Ser, Asn or His
  Variant (52)..(52): Xaa in position 52 is Val or Ile
  Variant (53)..(53): Xaa in position 53 is Ile, Val or Leu
  Variant (54)..(54): Xaa in position 54 is Ile or Val
  Variant (55)..(55): Xaa in position 55 is Leu, Phe, Ile or Val
  Variant (59)..(59): Xaa in position 59 is Leu, Tyr, Phe or Met
  Variant (60)..(60): Xaa in position 60 is any amino acid
  Variant (61)..(61): Xaa in position 61 is Leu or Phe
  Variant (62)..(62): Xaa in position 62 is any amino acid
  Variant (63)..(63): Xaa in position 63 is Asp, His or Ser
  Variant (64)..(65): Xaa in position 64 to 65 is any amino acid
  Variant (66)..(66): Xaa in position 66 is any or no amino acid
  Variant (67)..(67): Xaa in position 67 is Val, Leu or Ile
  Variant (68)..(69): Xaa in position 68 to 69 is any amino acid
  Variant (71)..(71): Xaa in position 71 is Met, Leu or Ile
  Variant (72)..(72): Xaa in position 72 is Asp or Asn
  Variant (73)..(73): Xaa in position 73 is Met, Leu, Ile or Val
  Variant (74)..(74): Xaa in position 74 is Lys or Ser
  Variant (75)..(75): Xaa in position 75 is Ile or Val
  Variant (76)..(76): Xaa in position 76 is Phe or Tyr
  Variant (77)..(77): Xaa in position 77 is Val, Cys or Leu
  Variant (78)..(78): Xaa in position 78 is Asp, Cys or Glu

SEQ ID NO: 35549 - protein, 72 aa, Artificial sequence; identical to SEQ ID NO: 15391
  Consensus
  Variant (2)..(2): Xaa in position 2 is any amino acid
  Variant (4)..(4): Xaa in position 4 is Ile, Val, Thr or Leu
  Variant (5)..(5): Xaa in position 5 is Arg or Cys
  Variant (7)..(7): Xaa in position 7 is Ala, Ser, Val or Thr
  Variant (10)..(10): Xaa in position 10 is Ile or Leu
  Variant (11)..(11): Xaa in position 11 is any amino acid
  Variant (14)..(16): Xaa in position 14 to 16 is any amino acid
  Variant (17)..(17): Xaa in position 17 is Arg, Lys or Asn
  Variant (20)..(20): Xaa in position 20 is Asp, Gln, Asn or Glu
  Variant (21)..(21): Xaa in position 21 is Ile, Leu, Val or Met
  Variant (22)..(23): Xaa in position 22 to 23 is any amino acid
  Variant (24)..(24): Xaa in position 24 is Val, Ile, Cys or Ala
  Variant (25)..(25): Xaa in position 25 is Leu, Ile or Met
  Variant (26)..(26): Xaa in position 26 is any amino acid
  Variant (28)..(28): Xaa in position 28 is Tyr or Trp
  Variant (29)..(31): Xaa in position 29 to 31 is any amino acid
  Variant (35)..(35): Xaa in position 35 is any amino acid
  Variant (36)..(36): Xaa in position 36 is Phe, Ala or Tyr
  Variant (37)..(38): Xaa in position 37 to 38 is any amino acid
  Variant (39)..(39): Xaa in position 39 is Phe or Tyr
  Variant (40)..(40): Xaa in position 40 is Val or Ile
  Variant (41)..(41): Xaa in position 41 is any amino acid
  Variant (42)..(42): Xaa in position 42 is Pro or Arg
  Variant (43)..(46): Xaa in position 43 to 46 is any amino acid
  Variant (47)..(47): Xaa in position 47 is Ala or Thr
  Variant (48)..(48): Xaa in position 48 is Asp or Asn
  Variant (49)..(49): Xaa in position 49 is Ile, Ala, Val or Leu
  Variant (50)..(50): Xaa in position 50 is Ile, Val or Leu
  Variant (51)..(51): Xaa in position 51 is Ile, Val or Phe
  Variant (53)..(53): Xaa in position 53 is Arg, Ser or His
  Variant (54)..(54): Xaa in position 54 is Gly, Met or Tyr
  Variant (55)..(55): Xaa in position 55 is any amino acid
  Variant (56)..(56): Xaa in position 56 is any or no amino acid
  Variant (58)..(58): Xaa in position 58 is any amino acid
  Variant (59)..(59): Xaa in position 59 is Val, Ile, Thr or Leu
  Variant (61)..(61): Xaa in position 61 is Ile, Val, Thr or Met
  Variant (62)..(62): Xaa in position 62 is any amino acid
  Variant (63)..(63): Xaa in position 63 is Leu or Met
  Variant (64)..(64): Xaa in position 64 is Ile, Val, Leu or Met
  Variant (65)..(65): Xaa in position 65 is any amino acid
  Variant (66)..(66): Xaa in position 66 is Gln, Asn or Lys
  Variant (67)..(67): Xaa in position 67 is His, Phe or Asn
  Variant (68)..(68): Xaa in position 68 is Ile, Val or Leu
  Variant (69)..(71): Xaa in position 69 to 71 is any amino acid

SEQ ID NO: 35550 - protein, 42 aa, Artificial sequence; identical to SEQ ID NO: 15392
  Consensus
  Variant (1)..(1): Xaa in position 1 is Leu, Ile or Val
  Variant (2)..(3): Xaa in position 2 to 3 is any amino acid
  Variant (4)..(4): Xaa in position 4 is Leu, Ile or Val
  Variant (5)..(6): Xaa in position 5 to 6 is any amino acid
  Variant (7)..(7): Xaa in position 7 is Thr, Asn or Ser
  Variant (8)..(8): Xaa in position 8 is any amino acid
  Variant (9)..(9): Xaa in position 9 is Gln, His or Glu
  Variant (10)..(12): Xaa in position 10 to 12 is any amino acid
  Variant (13)..(13): Xaa in position 13 is Met, Leu or Ile
  Variant (14)..(14): Xaa in position 14 is any amino acid
  Variant (15)..(15): Xaa in position 15 is Thr or Ser
  Variant (16)..(16): Xaa in position 16 is any amino acid
  Variant (17)..(17): Xaa in position 17 is Ile, Leu or Val
  Variant (18)..(25): Xaa in position 18 to 25 is any amino acid
  Variant (26)..(26): Xaa in position 26 is Asp, Glu or Asn
  Variant (27)..(27): Xaa in position 27 is Phe, Trp, Leu or His
  Variant (28)..(28): Xaa in position 28 is any amino acid
  Variant (30)..(30): Xaa in position 30 is Tyr, Phe, Trp or Gln
  Variant (31)..(32): Xaa in position 31 to 32 is any amino acid
  Variant (34)..(34): Xaa in position 34 is Leu, Ile or Phe
  Variant (35)..(35): Xaa in position 35 is any amino acid
  Variant (36)..(36): Xaa in position 36 is Arg, Thr or Ile
  Variant (37)..(37): Xaa in position 37 is Leu, Ile or Met
  Variant (38)..(38): Xaa in position 38 is Val, Leu or Ile
  Variant (39)..(39): Xaa in position 39 is Val, Ile, Met or Leu
  Variant (40)..(41): Xaa in position 40 to 41 is any amino acid
  Variant (42)..(42): Xaa in position 42 is Ala, Gly, Cys or Thr

SEQ ID NO: 35551 - protein, 29 aa, Artificial sequence
  Consensus
  Variant (1)..(1): Xaa in position 1 is Gly or Ala
  Variant (2)..(2): Xaa in position 2 is Val, Ile or Leu
  Variant (3)..(3): Xaa in position 3 is any amino acid
  Variant (4)..(4): Xaa in position 4 is Ile, Val or Thr
  Variant (5)..(5): Xaa in position 5 is Ile, Leu, Val or Met
  Variant (7)..(7): Xaa in position 7 is Ser, Ala or Gly
  Variant (9)..(10): Xaa in position 9 to 10 is any amino acid
  Variant (11)..(11): Xaa in position 11 is Met, Phe or Leu
  Variant (12)..(12): Xaa in position 12 is Glu, Met or Asp
  Variant (13)..(13): Xaa in position 13 is any amino acid
  Variant (14)..(14): Xaa in position 14 is Ala, Ser or Gly
  Variant (15)..(15): Xaa in position 15 is Leu, Val or Ile
  Variant (16)..(19): Xaa in position 16 to 19 is any amino acid
  Variant (20)..(20): Xaa in position 20 is Lys, Pro or Asn
  Variant (21)..(24): Xaa in position 21 to 24 is any amino acid
  Variant (26)..(26): Xaa in position 26 is Lys, Thr or Arg
  Variant (27)..(27): Xaa in position 27 is Ile, Leu or Val
  Variant (29)..(29): Xaa in position 29 is Ile, Leu or Val
XXXXXRXGXXXXXXXXXXXXXXXXGXXLX

SEQ ID NO: 35552 - protein, 49 aa, Artificial sequence; identical to SEQ ID NO: 15394
  Consensus
  Variant (1)..(1): Xaa in position 1 is Leu or Ile
  Variant (2)..(2): Xaa in position 2 is His, Ile, Tyr or Val
  Variant (3)..(5): Xaa in position 3 to 5 is any amino acid
  Variant (6)..(6): Xaa in position 6 is Leu, Ile or Phe
  Variant (8)..(9): Xaa in position 8 to 9 is any amino acid
  Variant (10)..(10): Xaa in position 10 is Ile or Leu
  Variant (11)..(14): Xaa in position 11 to 14 is any amino acid
  Variant (15)..(17): Xaa in position 15 to 17 is any or no amino acid
  Variant (18)..(18): Xaa in position 18 is Val or Ile
  Variant (19)..(19): Xaa in position 19 is Leu, Phe, Ile or Val
  Variant (20)..(20): Xaa in position 20 is Leu or Ile
  Variant (21)..(21): Xaa in position 21 is Leu, Met, Phe or Cys
  Variant (22)..(22): Xaa in position 22 is Asp, Ala or Glu
  Variant (23)..(24): Xaa in position 23 to 24 is any amino acid
  Variant (25)..(25): Xaa in position 25 is Leu, Ile, Val or Met
  Variant (26)..(26): Xaa in position 26 is any amino acid
  Variant (27)..(27): Xaa in position 27 is any or no amino acid
  Variant (28)..(28): Xaa in position 28 is Thr, Ser, Asn or Ala
  Variant (29)..(29): Xaa in position 29 is Gly or His
  Variant (30)..(31): Xaa in position 30 to 31 is any amino acid
  Variant (32)..(32): Xaa in position 32 is Ala, Val, Met or Ile
  Variant (33)..(34): Xaa in position 33 to 34 is any amino acid
  Variant (36)..(36): Xaa in position 36 is Ile, Val or Thr
  Variant (37)..(37): Xaa in position 37 is any amino acid
  Variant (38)..(38): Xaa in position 38 is Val, Leu, Tyr or Ile
  Variant (40)..(40): Xaa in position 40 is Leu, Ile, Val or Thr
  Variant (41)..(43): Xaa in position 41 to 43 is any amino acid
  Variant (44)..(44): Xaa in position 44 is Val or Ile
  Variant (45)..(48): Xaa in position 45 to 48 is any amino acid

SEQ ID NO: 35553 - DNA, 2376 bp, Saccharomyces cerevisiae
  CDS (1)..(2376)
atggtagcgacatcttcaaagaggacgttggatccgaaggaggaacatttgcctgctgacaaaacatccactaattcaagcaacactataatatctgagttggcaacacaagagaaatccagctctagtggtactacactaaaattaatagctcttaatatcaagtccatatcagatgaagatgtgggatatatccaaaatgttgaaagactgtctttaaggaaaaatcacttaacatccttaccagcgagtttcaagaggttatcaaggctgcaatatctggatttgcataataacaattttaaagaaatcccatatattttgacacaatgccctcaattagagatcttggatctgtcctccaatgagattgaagcattgccagatgaaatatcatcgttttggcaagataatattcgtgtattatcattgaaagacaacaacgttactagcatacgtaatttgaaatcgatcacaaaattaaacaagctgagcatcttggatttagaggataataaaatacccaaagaagagcttgaccaagtacagagttatactccatttcatacgggcatccccaaagaagaatattgggcaattgcgatatcacgatatctaaaagatcatcctaacctacctactccagaacctaaaatatctagagcagcgaaaagaatgggattcataaatacgaacttgtctaatggagcaatgaatgaaaacaatataatttcacttgccccaagtgcaaatacaactataagtgcatctactgcaatggtctcatctaatcaaacctctgcaacatctttcagtggtacagtcaatgcagaatcagaacaaagtggggcagtgaatggtacggaactatacaatcacaccaaatataatgactacttcaagaggttgtcgattttaccagaagagtcaatgagtaacgggcatcaaaaaatatcgcatgcagagttggttgtttcctgtcggaagctcctatttagttttacagaatgccaacaagctatcagaaaaatcgcctctttctgtaaagagaaggccgtagcggttaatgtagtatcattattatactctgtcagatcacatactgataatctggtggaggtcttgcagcaaacagagaacgaagacgaatcgcatgatcaggcgttaatcaagctgtgcctcactatcatcacaaattttaaacaaattataacattgttgagaaaaaattttgagatttttttcaaagaagacgatctatgcttcataaggatgttttatatgacattaatgtgtgcttatatggaaatgtataatgcatggtcttttatcaaagaagatgatcaagtgtccggttctgcaagtaaggcacccaagaaacattctttttcgaggcacgagacatcgtccagtagtatcacaagcggtggaggacccgcagcaagtacgaccagtacacattgtagcggaaacataaaattactgccgaaaacaaggagcacaagaacaccatctgcatctgcattgctttcaaatagtaatattctgacgggtgataccactgctgttcctcttttatcaccaaatctaaatggtgcacacacccatggtccaattttgggacaccaaaatgcaataagcaatggaagttctcaaacgaacatgaatgaagtaaaaactactagcgatactattccaaggcaacagctgcttcagcacaataaatccatcagcgattcgaaaaaagagtcacaggcgcatgaacctaaacagcatccggttatgacttcttcaataattaacgcatcaaatagtaataacgtctcgaatgttaatataaccccaccaccgatgaatggtggtggtgccgcgaacagtagtgctaatgtagtggagacaaatattgacattcaactgtatcaaacgttgtccacagtagttaaaatggtgagcgttgtatataaccagttaacttcagagatatccaagatagccattgctagcaccatgggaaagcaaattttgacggactcgctagcacctaaaattcgtgatttgacggaaacatgtcgtcaagcgatggatttatccaaacaattgaatgaaaggttaaatgtattaataccgaacgattcaaattcagagaagtatctgacatctttggagaagctgaaaacgtgggagataatgaattcgttcttaaaagtaataatatcaattctggctaatactaaaatcgtaatgagcgacgtgcctaatttgaatgagctgagacctaacctagccaacttggcgaagattaccaaggatgtcactgtgatattggacttgagttcatacaaggctgtatcagtaagcgccaactctccggagtaa

SEQ ID NO: 35554 - protein, 791 aa, Saccharomyces cerevisiae
MVATSSKRTLDPKEEHLPADKTSTNSSNTIISELATQEKSSSSGTTLKLIALNIKSISDEDVGYIQNVERLSLRKNHLTSLPASFKRLSRLQYLDLHNNNFKEIPYILTQCPQLEILDLSSNEIEALPDEISSFWQDNIRVLSLKDNNVTSIRNLKSITKLNKLSILDLEDNKIPKEELDQVQSYTPFHTGIPKEEYWAIAISRYLKDHPNLPTPEPKISRAAKRMGFINTNLSNGAMNENNIISLAPSANTTISASTAMVSSNQTSATSFSGTVNAESEQSGAVNGTELYNHTKYNDYFKRLSILPEESMSNGHQKISHAELVVSCRKLLFSFTECQQAIRKIASFCKEKAVAVNVVSLLYSVRSHTDNLVEVLQQTENEDESHDQALIKLCLTIITNFKQIITLLRKNFEIFFKEDDLCFIRMFYMTLMCAYMEMYNAWSFIKEDDQVSGSASKAPKKHSFSRHETSSSSITSGGGPAASTTSTHCSGNIKLLPKTRSTRTPSASALLSNSNILTGDTTAVPLLSPNLNGAHTHGPILGHQNAISNGSSQTNMNEVKTTSDTIPRQQLLQHNKSISDSKKESQAHEPKQHPVMTSSIINASNSNNVSNVNITPPPMNGGGAANSSANVVETNIDIQLYQTLSTVVKMVSVVYNQLTSEISKIAIASTMGKQILTDSLAPKIRDLTETCRQAMDLSKQLNERLNVLIPNDSNSEKYLTSLEKLKTWEIMNSFLKVIISILANTKIVMSDVPNLNELRPNLANLAKITKDVTVILDLSSYKAVSVSANSPE

SEQ ID NO: 35555 - DNA, 717 bp, Danio rerio
  CDS (1)..(717)
atggggaacagtgcgctcaaagctcatttggaaacatctcagaagactggagtctttcagctgaccggaaagggtttgacagagttcccagaggacctgcagaagctcacagcaaacctgcggacagtcgatctgtccaacaacaagatcgaggagcttccagcgttcataggaagcttccagcatctcaagagttttaccataagctgcaataaactgaccagtctaccaaatgacattggcaagctcaagaagctggaaacccttattttaaatggaaaccagctaaaacagcttccttcttcaattggtcaactcaagtccttgcgcacactgagcctgtccggcaaccagttcaaagagtttcccagtggcttgggcacccttcgccagcttgatgttctggatctttccaaaaatcagatccgagtggttcctgcagaggtggccgaactgcaagccattgaaatcaacctcaatcagaatcagatttcaagcgtgactcaagaggtgtctcgcacacccagactgaaagtcttgcggctagaggagaactgtctggagctctcctctatccccctctccatcctcacagactcccaggtgtccctgctgtctgtcgagggcaatttgtttgaggtcaaaaagatgcgtgacctggaaggatacgataaatatatggagcgtttcactgcaaccaagaagaaatttgcgtga

SEQ ID NO: 35556 - protein, 238 aa, Danio rerio
MGNSALKAHLETSQKTGVFQLTGKGLTEFPEDLQKLTANLRTVDLSNNKIEELPAFIGSFQHLKSFTISCNKLTSLPNDIGKLKKLETLILNGNQLKQLPSSIGQLKSLRTLSLSGNQFKEFPSGLGTLRQLDVLDLSKNQIRVVPAEVAELQAIEINLNQNQISSVTQEVSRTPRLKVLRLEENCLELSSIPLSILTDSQVSLLSVEGNLFEVKKMRDLEGYDKYMERFTATKKKFA

SEQ ID NO: 35557 - DNA, 1506 bp, Caenorhabditis elegans
  CDS (1)..(1506)
atgggaattgattcctacaatccaacagtgcgtgcacgccttgcaaatgcttctaaaacgcgagtcctgagcctgaaggagtctgccctgcaccgtattcctgatgacgtgaaagatctaacaatgttgaagcatctggatatgagtattaattatctgactcaacttcccccgtttattgggtcaatgtctcatcttaagaatttaaatttgtccagaaatcaactagaatctcttcctttggagatcaactccctggcgtgtcttgaagttttaaatgtctcacaaaacaaactgacagagcttcccgatctgtcacagtgtgtctcattaaagacagtagaggcgatagaaaaccaattcatcatcttcccagctggtgtgtgcaaatgtccaaatctcgaaacatgcttgttaactgaaaatcggatcgagaaacttccagacgaaattcattcgctacgggcaattagcgtgatcctcaacaaaaaccggcttctctctctcaacaccgctaatttgcttcgctgtgaacgcttgcgtgcagtaaacgtggacgataaccaactaaatcgcgacgaaattgaacaattccttgtgaatgcgccacgagaaattcgtatttcatttgaaagaaatgtttcgcaaatgcatacaactgatttgcaggtttgttcgggttcaatttttatttttatctatactacatgccttactgaaatgggaaacgattcatctaaaacaaaatcaattggtgataatgcacggaagattattggaaaatccggtccatcgacatcaacggtcaataagcatctcgaaatggcaagcaaaagtcggattcttcagctaaaaggaactgggctcaagaaagttcctgacgaaatcgaaccattagctgatgttctccgcaacttggaactcagtgaaaacaaaattcgagaaattcctatctttattggtcaattttctcaactcaagcaacttcatttggctaataactgtcttgaatttctacctgatgaacttggatcgatgaaaaagctggagattttgaatttggcgggaaacaagctgaaagcgttgcccgacacaattgtcggttgcaccgatttgaaaaccatcgacttatcatccaacgttttcaccgtttttcctgtagcagtgattggctgtttgcaattggatatactcaatttaaatggaaaccaaattgaatctctccctgacgatatatccaatttgaaagttatcgagttaagtctgaatcaaaatcgactgagctccttaaatccatcaaatcttgccaaaactacacgactgaggactcttcgtctcgatgaaaactgtttggagaagtcggagttcactcgcgatttactagaatcttcaacaatttccgtgatgtcatacgacggaaatcgattccaattgaaagattttcaagatttaccaggatatgatgcttatcaagaacgtttcactgctactaaacgtaaaatctaa

SEQ ID NO: 35558 - protein, 501 aa, Caenorhabditis elegans
MGIDSYNPTVRARLANASKTRVLSLKESALHRIPDDVKDLTMLKHLDMSINYLTQLPPFIGSMSHLKNLNLSRNQLESLPLEINSLACLEVLNVSQNKLTELPDLSQCVSLKTVEAIENQFIIFPAGVCKCPNLETCLLTENRIEKLPDEIHSLRAISVILNKNRLLSLNTANLLRCERLRAVNVDDNQLNRDEIEQFLVNAPREIRISFERNVSQMHTTDLQVCSGSIFIFIYTTCLTEMGNDSSKTKSIGDNARKIIGKSGPSTSTVNKHLEMASKSRILQLKGTGLKKVPDEIEPLADVLRNLELSENKIREIPIFIGQFSQLKQLHLANNCLEFLPDELGSMKKLEILNLAGNKLKALPDTIVGCTDLKTIDLSSNVFTVFPVAVIGCLQLDILNLNGNQIESLPDDISNLKVIELSLNQNRLSSLNPSNLAKTTRLRTLRLDENCLEKSEFTRDLLESSTISVMSYDGNRFQLKDFQDLPGYDAYQERFTATKRKI

SEQ ID NO: 35559 - DNA, 684 bp, Caenorhabditis elegans
  CDS (1)..(684)
atggcaagcaaaagtcggattcttcagctaaaaggaactgggctcaagaaagttcctgacgaaatcgaaccattagctgatgttctccgcaacttggaactcagtgaaaacaaaattcgagaaattcctatctttattggtcaattttctcaactcaagcaacttcatttggctaataactgtcttgaatttctacctgatgaacttggatcgatgaaaaagctggagattttgaatttggcgggaaacaagctgaaagcgttgcccgacacaattgtcggttgcaccgatttgaaaaccatcgacttatcatccaacgttttcaccgtttttcctgtagcagtgattggctgtttgcaattggatatactcaatttaaatggaaaccaaattgaatctctccctgacgatatatccaatttgaaagttatcgagttaagtctgaatcaaaatcgactgagctccttaaatccatcaaatcttgccaaaactacacgactgaggactcttcgtctcgatgaaaactgtttggagaagtcggagttcactcgcgatttactagaatcttcaacaatttccgtgatgtcatacgacggaaatcgattccaattgaaagattttcaagatttaccaggatatgatgcttatcaagaacgtttcactgctactaaacgtaaaatctaa

SEQ ID NO: 35560 - protein, 227 aa, Caenorhabditis elegans
MASKSRILQLKGTGLKKVPDEIEPLADVLRNLELSENKIREIPIFIGQFSQLKQLHLANNCLEFLPDELGSMKKLEILNLAGNKLKALPDTIVGCTDLKTIDLSSNVFTVFPVAVIGCLQLDILNLNGNQIESLPDDISNLKVIELSLNQNRLSSLNPSNLAKTTRLRTLRLDENCLEKSEFTRDLLESSTISVMSYDGNRFQLKDFQDLPGYDAYQERFTATKRKI

SEQ ID NO: 35561 - DNA, 720 bp, Homo sapiens
  CDS (1)..(720)
atgggaaacagtgcgctccgcgctcatgtggaaacggcgcagaaaactggtgtctttcagcttaaggaccgagggctgaccgagttccccgcagacttgcagaagctgacgagcaatctcaggaccatcgacttgtccaacaacaagatcgaaagcctaccgcctttgctgataggaaagttcactctgctgaagagcctctccctgaacaacaacaaactgactgttctgcctgatgagatatgcaatctgaaaaaactagagacgctaagcctaaacaacaatcaccttagagagctgccgtctacctttgggcaactctctgccctcaagaccctgagcctctctgggaaccaactgggagcattacctccccaactttgtagcctacggcacctggatgtgatggatctctctaagaaccagattcgaagtatacctgactcagtgggagagctgcaagtcatcgaactcaacctcaaccagaatcagatatctcagatctcagtgaagatatcttgctgtccacgccttaaaattcttcgcctggaagagaattgtcttgagctcagcatgcttccccagagcatcctcagtgattcccagatctgtctgcttgctgtggaaggcaatctttttgaaataaagaaacttcgagaactggaaggctatgataagtacatggagaggttcacagccaccaagaagaattttgcgtga

SEQ ID NO: 35562 - protein, 239 aa, Homo sapiens
MGNSALRAHVETAQKTGVFQLKDRGLTEFPADLQKLTSNLRTIDLSNNKIESLPPLLIGKFTLLKSLSLNNNKLTVLPDEICNLKKLETLSLNNNHLRELPSTFGQLSALKTLSLSGNQLGALPPQLCSLRHLDVMDLSKNQIRSIPDSVGELQVIELNLNQNQISQISVKISCCPRLKILRLEENCLELSMLPQSILSDSQICLLAVEGNLFEIKKLRELEGYDKYMERFTATKKNFA

SEQ ID NO: 35563 - DNA, 1272 bp, Leptospira interrogans serovar Lai str. 56601
  CDS (1)..(1272): transl_table=11
atgaattatagatttacaaacatcctaaaggttataattttcttttgttttattttcgaaatacaatcagaagaaatacaaaaaccttataaaaatttagcaaaggctcttcaaaatccagcagacgttcggaacttagatttgagtttccaagggttgaagacgttgccaaacaaaataggacaacttaagaatttacaaaaattggatttaggcggaaacgaacctacgattttgtctaaagaaatctggcagttaaaagatctgcaaaaattgaatttgaacaataacaaacttacggttctccctaaggaaatcggacaattacaaaacttgcaagaattaagtttgcatagcaatgagctcgtaaatcttccgaaagagattggacagtttaagaatttgcaaaaactaaatttggacaataataaacttacggttctccctaaggaaatcggacaattacaaaacttgcaagaattgagtttacttagtaacaaactcataagtcttcccacagaaattgaacaacttaaaagtctgaagaatctagatttgaatcacaatgaattaactactgtttcgaaagaagttatgctacttgaaactttagaaaatttagatctaagatccaacaaactgaaaacaattcctaaagagataagacaacttaaaagtttgaaagtgttgatgttaactggcaatcaacttacttctttgccgaaagaaatcgaacaactccaaaatctaaaaacattaaatttgggagaaaatcgttttcaaatacttcccgtagaaattttagaacttaagaatttactggaattgaatttgtattataaccaacttgtagagtttccgaaggaagttggacaacttaaaagtttaaagtatttgagtttgtatcacaatcaaattacaactcttccggtagaagttacacaattgccggatttgcaagagctgcatttgtctgggaataaaattacgattcttccaaaagagattctacaacttaaaaatttagaatggctgtcattgagtaacaataaactcaatgcgcttccgaaagaaatcggacagttgaaaaaattacaaaggttggaattaggaaacaatcagcttacgacccttccgaaagaaatagaacaacttaaaaatttacaaagattagaattagattccaatcccatttctccaaaagaaaaagaaagaatccgaaaacttcttcctaaatgtgaaatcgattttgaaggagggggaggagaatag

SEQ ID NO: 35564 - protein, 423 aa, Leptospira interrogans serovar Lai str. 56601
MNYRFTNILKVIIFFCFIFEIQSEEIQKPYKNLAKALQNPADVRNLDLSFQGLKTLPNKIGQLKNLQKLDLGGNEPTILSKEIWQLKDLQKLNLNNNKLTVLPKEIGQLQNLQELSLHSNELVNLPKEIGQFKNLQKLNLDNNKLTVLPKEIGQLQNLQELSLLSNKLISLPTEIEQLKSLKNLDLNHNELTTVSKEVMLLETLENLDLRSNKLKTIPKEIRQLKSLKVLMLTGNQLTSLPKEIEQLQNLKTLNLGENRFQILPVEILELKNLLELNLYYNQLVEFPKEVGQLKSLKYLSLYHNQITTLPVEVTQLPDLQELHLSGNKITILPKEILQLKNLEWLSLSNNKLNALPKEIGQLKKLQRLELGNNQLTTLPKEIEQLKNLQRLELDSNPISPKEKERIRKLLPKCEIDFEGGGGE

SEQ ID NO: 35565 - DNA, 1497 bp, Leptospira interrogans serovar Lai str. 56601
  CDS (1)..(1497): transl_table=11
atgaacttccgcataacgttaatttacttacaaaaaataacaattggtcttttgcttctcattactctttcttgcgagattcaagcagaagaagtagaaccaggaacttatagggatttaacaaaagcgctccaaaatcctttggatgttcgagttttgaatttgagtggagaaaaactcacagctcttcccaaagaaatcggacagctgaagaatttacaagagttgaatttaaaatggaacctactcacagttcttccaaaggaaattggacaactggagaatttacaggaattagatttacgtgataaccaactcgcaacttttcctgccgtaatagtagagttacagaagttagaaagtttggatttatctgagaaccgactcataatacttcctaacgaaataggacggctacagaatttacaagatttgggtttgtataaaaacaaacttactacttttccaaaggaaatagggcagttacagaatttacaaaagttatggttatctgagaaccgactcacagcacttcctaaggaaattggtcaattgaagaatttacaaacattggatttgcaggataaccaattcacgatacttccaaaagaaataggacaattacagaatttacaaacattgaatttgagcgataaccaactcgcaactcttcctgtcgaaatcggacaactacagaatttacaagagttgtatttgcggaataaccgactcacagtttttccaaaggaaataggacaactacagaatttgcaaatgttatgttcacctgaaaaccgtctcacagcacttcctaaagaaatggggcagctacagaatttacaaacattgaatttggtgaataaccgactcacagtttttcctaaggaaatcggacaactacagaatctgcaagatttggaattgctaatgaatcctctttccttaaaagaaagaaaaagaattcaaaagttgtttccagatagtaatcttgatttgagagaagtagcagagaacggtgtttaccgcaatttaaatctggctcaggaagaacctttaaaagtttttgaattgagtcttgaatacaaagatttttctcaatcgtttccaaaagtaattttgaaattccgaaatttacggggtttaaatttatacgactgcggattttcaactcttccgaaagaaatcagccgacttaaaaatttaaagtatttagccttaggcttaaatggtcttaaaaatattccttctgaaatcggccaactgaagaatttagaagctttgaatttagaagcaaacgaattggaaagacttcccaaagaaattgggcaactgcggaatttacagaagttaagtttacatcaaaatacattgaaaatatttcccgccgaaatcgaacaactgaaaaaattgcaaaagttagatttgagcgttaatcaattcacgacttttcctaaggaaatcggaaaattagaaaatttacaaacattgaatttataa

SEQ ID NO: 35566 - protein, 498 aa, Leptospira interrogans serovar Lai str. 56601
MNFRITLIYLQKITIGLLLLITLSCEIQAEEVEPGTYRDLTKALQNPLDVRVLNLSGEKLTALPKEIGQLKNLQELNLKWNLLTVLPKEIGQLENLQELDLRDNQLATFPAVIVELQKLESLDLSENRLIILPNEIGRLQNLQDLGLYKNKLTTFPKEIGQLQNLQKLWLSENRLTALPKEIGQLKNLQTLDLQDNQFTILPKEIGQLQNLQTLNLSDNQLATLPVEIGQLQNLQELYLRNNRLTVFPKEIGQLQNLQMLCSPENRLTALPKEMGQLQNLQTLNLVNNRLTVFPKEIGQLQNLQDLELLMNPLSLKERKRIQKLFPDSNLDLREVAENGVYRNLNLAQEEPLKVFELSLEYKDFSQSFPKVILKFRNLRGLNLYDCGFSTLPKEISRLKNLKYLALGLNGLKNIPSEIGQLKNLEALNLEANELERLPKEIGQLRNLQKLSLHQNTLKIFPAEIEQLKKLQKLDLSVNQFTTFPKEIGKLENLQTLNL

SEQ ID NO: 35567 - DNA, 1287 bp, Leptospira interrogans serovar Lai str. 56601
  CDS (1)..(1287): transl_table=11
atgaacttccgcataacgttgatttacttacaaaagattacaattggtcttttgtttctcattactctttcttgcgagattcaagcagacgaagtaaaaccaggaacttatatggatttaacaaaagcgctccaaaatcctttaaatgttcgagttttggatttgagtggacaaaatttcacaacacttcctaaggaaattgaacaactgaagaacttgcaaaagttgtatttatttgataaccgactcaaaactcttcctaaggaaatcggacaattgaaaaatttgcaagagttgaatttgagtagtaaccaactcacgatacttcctaaagaaatcggaaaactggaaaatttacaaagattggatttatatgataacagactcacgattcttcctatcgaaatcggaaaattacaaaatttgcaaacgttatatttaagtagtaaccagctgacaactcttcctagggaaagcggaaaactggagaatttgcaagagttgaatttaagtgataatcaactcacaactcttccacaagaaattggacaactacagaatttacaaacgttgaatttgaagagtaatcaacttacaactctttttaaagaaatagaacaattgaagaatttacaaacgttgaatttgagcgataaccaactcacaactcttccaattgaaatcggaaaactacaaaatttgcatacgttgaatttgagcgataaccaactcacaactcttccaattgaaatcggaaaactacaaaatttgcatacgttgaatttgagcgataaccaactcacaactcttccaattgaaatcggaaaactacaaaatttgcatacgttgaatttgagtggtaatcaacttacaacgctttcaattgaaatcggaaaactacagaacttacaagacttgaatttgcatagtaatcaactcacaaccctttctaaagaaattgaacagctaaaaaatttacaaacgttgagtttgagttataaccgactcgtaattcttcctaaggaaatcggacaactacagaatctgcaagagttgaatttatggaataaccaactcacagctcttcctatcgaaattggacaactacaaaatttacaaacgttgagtttgtataaaaacagactcatgacttttccgaaagaaattggacaattgaaaaacttgcaaacgttgtatttggggggtcataatcaattttcatctgaagaaaaagaaagaattcgaaaactgctaccgaattgcaaaatttactttggagataattag

SEQ ID NO: 35568 - protein, 428 aa, Leptospira interrogans serovar Lai str. 56601
MNFRITLIYLQKITIGLLFLITLSCEIQADEVKPGTYMDLTKALQNPLNVRVLDLSGQNFTTLPKEIEQLKNLQKLYLFDNRLKTLPKEIGQLKNLQELNLSSNQLTILPKEIGKLENLQRLDLYDNRLTILPIEIGKLQNLQTLYLSSNQLTTLPRESGKLENLQELNLSDNQLTTLPQEIGQLQNLQTLNLKSNQLTTLFKEIEQLKNLQTLNLSDNQLTTLPIEIGKLQNLHTLNLSDNQLTTLPIEIGKLQNLHTLNLSDNQLTTLPIEIGKLQNLHTLNLSGNQLTTLSIEIGKLQNLQDLNLHSNQLTTLSKEIEQLKNLQTLSLSYNRLVILPKEIGQLQNLQELNLWNNQLTALPIEIGQLQNLQTLSLYKNRLMTFPKEIGQLKNLQTLYLGGHNQFSSEEKERIRKLLPNCKIYFGDN

SEQ ID NO: 35569 - DNA, 870 bp, Leptospira interrogans serovar Lai str. 56601
  CDS (1)..(870): transl_table=11
atgacgtgctccaatctctacaaaatggattttacccttcgattcagaataaaatcctgcggagaatccacgatgaaatttcgcataacgttgatttacttacaaaaaataacaatcttccttttatttctcatttatttatcttgcgagattcaagcagaagcaccagaagacgaaccaggaacatatagggatttaacagaagcgctccaaaattctttggatgttcgaattttgattttgagtgaacaaaaacttacaactcttcctaagaaaattgaacaactaaagaatttacaaatgttggatttatgttataaccaatttaaaacagttcctaaagaaattgaacaactaaagaatttacaaatgttggatttatgttataaccaatttaaaacagttcctaagaaaattgggcaactaaagaatttgcaagtattgaatttgagtagtaaccagctcacaactcttccaaaggaaatcggaaaactggaaaatttgcaagtattgaatttgagtagtaaccagctcataacttttccaaaagaaatcggaaaactggaaaatttgcaagtattgaatttgggttctaaccgactcaaaacccttcctaaaggaattgagcaattgaaaaacttgcaaacgttgtatttgaattataaccaacttacgactcttcctcgtgagatcggtcgattacaaagtctaactaaattacatttgcagcataatcaaatagcgacactcccggacgaaatcatacaacttcaaaatttacggaaacttactttgtatgaaaatccgattccgccgcaagagctggacaaaatacgaaagcttcttccaaattgtgagattcgattttga

SEQ ID NO: 35570 - protein, 289 aa, Leptospira interrogans serovar Lai str. 56601
MTCSNLYKMDFTLRFRIKSCGESTMKFRITLIYLQKITIFLLFLIYLSCEIQAEAPEDEPGTYRDLTEALQNSLDVRILILSEQKLTTLPKKIEQLKNLQMLDLCYNQFKTVPKEIEQLKNLQMLDLCYNQFKTVPKKIGQLKNLQVLNLSSNQLTTLPKEIGKLENLQVLNLSSNQLITFPKEIGKLENLQVLNLGSNRLKTLPKGIEQLKNLQTLYLNYNQLTTLPREIGRLQSLTKLHLQHNQIATLPDEIIQLQNLRKLTLYENPIPPQELDKIRKLLPNCEIRF

SEQ ID NO: 35571 - DNA, 1281 bp, Leptospira interrogans serovar Lai str. 56601
  CDS (1)..(1281): transl_table=11
atgaatttccaatccataaacattcgtttaaataaaagactcatgattcttttgattctgatctgtttttcctgcaaactacaagcccaatctaacgaagtgcaaacatattatcgtaatataacagaggttcttaaaaatccacagaatgttcgaattctgaatttgagcggtagcaaactcacaacccttccgggagaaatcggaaaactgcaaaatttacaactgttgaatttagatgataaccaacttatagctcttccgaaagaaattggaaaacttcaaaatttacaacaattgcatttgagtaagaaccaactcatggcgcttccagaagaaatcggacaacttcagaatttacaaaagttgaaattgtatgaaaaccagcttacggccattcccaaagagattggacaactacaaaatttacaagagctgaatttggcacataaccaactcgcaactctaccagaagacatcgaacaattacaaagattacaaacattgtatttgggtcataaccaatttaactctattctcaaagagattggacaattacaaaatttagaatcattaggtttggatcataatcaacttaacgtccttcccaaagaaattggacaacttcgaaatttagaatcattaggtttggatcataaccaacttaacgtccttcccaaagaaattggacaacttcaaaatttacaaatattacatttgcgtaataaccaactcacaactcttcccaaagaaatcgggcagcttcagaatttacaaaagttacttttaaataaaaacaaactcacaactcttcccaaagaaattggtcagcttcagaatttacaaaagttgaaattgtatgaaaaccaacttacaacccttccgaaagagattggacaactacaaaatttacaagagttggatttagatggtaaccaactcacaactctaccagaaaacatcggacaattacagaggttacaaacgttgtatttgggtaataatcaacttaacttccttccaaataaagtagaacaactacaaaatttagaatcattagatctggagcataaccaacttaacgcccttcccaaagaaattggaaaattgcaaaagttgcaaaccctgaatttgaaatataatcaacttgcgactcttcccgaggagatcaaacaactaaagaacttaaaaaagttgtatttgcataacaacccacttccatcggaaaaaatagaaagaattcgaaaattacttccccaatgtaatatttattttgaatga

SEQ ID NO: 35572 - protein, 426 aa, Leptospira interrogans serovar Lai str. 56601
MNFQSINIRLNKRLMILLILICFSCKLQAQSNEVQTYYRNITEVLKNPQNVRILNLSGSKLTTLPGEIGKLQNLQLLNLDDNQLIALPKEIGKLQNLQQLHLSKNQLMALPEEIGQLQNLQKLKLYENQLTAIPKEIGQLQNLQELNLAHNQLATLPEDIEQLQRLQTLYLGHNQFNSILKEIGQLQNLESLGLDHNQLNVLPKEIGQLRNLESLGLDHNQLNVLPKEIGQLQNLQILHLRNNQLTTLPKEIGQLQNLQKLLLNKNKLTTLPKEIGQLQNLQKLKLYENQLTTLPKEIGQLQNLQELDLDGNQLTTLPENIGQLQRLQTLYLGNNQLNFLPNKVEQLQNLESLDLEHNQLNALPKEIGKLQKLQTLNLKYNQLATLPEEIKQLKNLKKLYLHNNPLPSEKIERIRKLLPQCNIYFE

SEQ ID NO: 35573 - DNA, 1227 bp, Leptospira interrogans serovar Lai str. 56601
  CDS (1)..(1227): transl_table=11
atgaaaccgaatttaatacgacaacgctgttttcaaaaagtggaaatcctttttttaatatttgtatgttcccttacgcaattccatgcggaagaaaatcacacaacgaaagaaggtctttatacaaatttaaccgaggctcttaaaaatccgaatgaggttcggattttagatttaagtagaagcaaactcaagattcttccgaaagaaatcgggcaactgcaaaatttacaaatcctgaattcagaaaataatcaactcacgacccttcccaaagaaatcggaaaattgcagaacttgcaagagttacatctgcagaataaccaactaacaacccttccagaagaaatagggcagttacagaatttaaaagtattacatttgaacaataatcaactcactactcttccagaagaaatcggaaaactacaaaatctacaagagttgaatttatttgttaatcgacttaacatccttccaaaggaaatcggacgactacaaaatttacaagagttatatttgtctcttaatcggcttacaatccttccagaagaaattggacaattagagagtttacgaaagttgagtttgggtggtaagaataagccattcacgattcttccaaaagaaatcacgcagcttcagaatttacaagagttgcatttgaaatttaaccggctcacggtccttcccaaagaaattggacaacttcaaaatttgcggatattagatttgtatcaaaaccgactcacgattcttccgaaagaaattggacaactcaaaaatttactagtattggatttgtctggtaaccaacttacaattcttccgaaagaaatcacacaacttcagaatttacaagaattgaatttggaatacaatcgattcgaagcttttccaaaagaaatcacacagtttcagaatttacaagtgttggatttgtatcaaaaccgactcacgactcttccaaaagaaattggacaattgcagaatttacaaaagttgcatttgagtagaaaccaacttacgactcttccgaaagagattggacgattgcaaaagttagaatcattgggtttggatcataatcaacttgcgactcttcccgaggagatcaaacaactaaagaacttaaaaaagttgtatttgcataacaacccacttctatcggaaaaaatagaaagaattcgaaaattacttccccaatgtattatttattttgaatga

SEQ ID NO: 35574 - protein, 408 aa, Leptospira interrogans serovar Lai str. 56601
MKPNLIRQRCFQKVEILFLIFVCSLTQFHAEENHTTKEGLYTNLTEALKNPNEVRILDLSRSKLKILPKEIGQLQNLQILNSENNQLTTLPKEIGKLQNLQELHLQNNQLTTLPEEIGQLQNLKVLHLNNNQLTTLPEEIGKLQNLQELNLFVNRLNILPKEIGRLQNLQELYLSLNRLTILPEEIGQLESLRKLSLGGKNKPFTILPKEITQLQNLQELHLKFNRLTVLPKEIGQLQNLRILDLYQNRLTILPKEIGQLKNLLVLDLSGNQLTILPKEITQLQNLQELNLEYNRFEAFPKEITQFQNLQVLDLYQNRLTTLPKEIGQLQNLQKLHLSRNQLTTLPKEIGRLQKLESLGLDHNQLATLPEEIKQLKNLKKLYLHNNPLLSEKIERIRKLLPQCIIYFE

SEQ ID NO: 35575 - DNA, 1134 bp, Leptospira interrogans serovar Lai str. 56601
  CDS (1)..(1134): transl_table=11
atgaacttccgcataacgttaattcacttacaaaaaattacaattggtcttttgtttctcattcatctttcttacgagattcaagcagaagaaccaggaacttatagagatttaacaaaagcgctccaaaatcctttggaggttcgagttttggatttgagtcgtcaagaactcaaaacccttcctatagaaatcggaaaattgaagaatctgcaaaggttgtatttacattataaccaacttacagttcttccacaagaaatagaacaactgaaaaatttacaattgttgtatttgcgttctaaccgactcactactcttcctaacgaaatcgagcaattgaagaacttgcaagttttggatttgggttctaaccaacttacaattcttccacaagaaatagaacagctgaaaaatttacaattgttgtatttgcattctaaccgactcactactctttctaaagacattgaacaactacagaatttgaaatcgttggatttgagtaataaccaacttacaactcttcctaacgaaatcgagcaattgaaaaacttgaaatcgttgtatttgagtgagaaccaattcgcaacttttcctaaagaaattggacaactacagaatttaaaagtgttgtttttgaataataaccaaatcacaatacttcccaacgaaatcgcaaaactaaaaaagctacaatacttatatttaagcgacaatcaactcataacccttccgaaagaaatagagcaattgaagaacttgcaaacgttggatttgagttataaccaacttacaatacttcctaaggaagtcggacaattagaaaatttgcaaacgttggatttgcgtaataaccaactcaaaactcttccgaaagaaatagagcaattgaagaacttacaaacgttgtttttgaataataaccaactcacaatacttccacaagaaatcggaaaactgaagaatttgttatggttgagtttggtttataaccaactcactactcttcctaacgaaatcgagcaattgaagaacttacaaacattgtatttaaacaacaaccaattctcatcccaagaaaaaaaaagaattcgaaaacttcttccaaagtgccaaatttcctttgaataa

SEQ ID NO: 35576 - protein, 377 aa, Leptospira interrogans serovar Lai str. 56601
MNFRITLIHLQKITIGLLFLIHLSYEIQAEEPGTYRDLTKALQNPLEVRVLDLSRQELKTLPIEIGKLKNLQRLYLHYNQLTVLPQEIEQLKNLQLLYLRSNRLTTLPNEIEQLKNLQVLDLGSNQLTILPQEIEQLKNLQLLYLHSNRLTTLSKDIEQLQNLKSLDLSNNQLTTLPNEIEQLKNLKSLYLSENQFATFPKEIGQLQNLKVLFLNNNQITILPNEIAKLKKLQYLYLSDNQLITLPKEIEQLKNLQTLDLSYNQLTILPKEVGQLENLQTLDLRNNQLKTLPKEIEQLKNLQTLFLNNNQLTILPQEIGKLKNLLWLSLVYNQLTTLPNEIEQLKNLQTLYLNNNQFSSQEKKRIRKLLPKCQISFE

SEQ ID NO: 35577 - DNA, 936 bp, Leptospira interrogans serovar Lai str. 56601
  CDS (1)..(936): transl_table=11
atgaactttcgcataactttgaattacttacaaaaaataacaattggtcttttgtttctcatgcatctttcttgcgagattcaagcagaggaatttgaacaacaagaaacttatacggatttaacaaaagcgctccaaaatcctttgaaggttcgaaccttggatttgagtgctaaccgattcaaaactcttcctaaggaaatcggaaaattgaaaaatttacaagagttgaatttgaataagaaccaactcacaactcttccacaagaaattggacaattgaagaatttgaaatcgttgaatttgagttataaccaaatcaaaactattccgaaagaaattgaaaaactacaaaagttgcaatcgttgggtttggataataaccaacttacaactcttccacaagaaattggacaactacagaacttgcaatcgttggatttgagtactaaccgactcacaactcttccacaagaaattggacatctacagaatttgcaagatttgtatttggtttctaaccaactcacaattcttcctaacgaaatcggacaattaaagaacttgcaaacgttgaatttgcgtaataaccgactcactactctttctaaagaaattgagcaactacagaatttgaaatcgttggatttgcgttctaaccaacttactacttttcctaaggaaatcgagcaattgaagaatttgcaagttttggatttgggttctaaccaactcactactcttccagagggaatcggacaattgaagaacttgcaaacattggatttggattctaaccaacttacaactcttccacaagaaatcggacaactacagaatttgcaagaattgtttttaaacaacaatcaactctcatcccaagaaaaaaaaagaattcgaaaacttcttccaaagtgccaaatttactttgactaa

SEQ ID NO: 35578 - protein, 311 aa, Leptospira interrogans serovar Lai str. 56601
MNFRITLNYLQKITIGLLFLMHLSCEIQAEEFEQQETYTDLTKALQNPLKVRTLDLSANRFKTLPKEIGKLKNLQELNLNKNQLTTLPQEIGQLKNLKSLNLSYNQIKTIPKEIEKLQKLQSLGLDNNQLTTLPQEIGQLQNLQSLDLSTNRLTTLPQEIGHLQNLQDLYLVSNQLTILPNEIGQLKNLQTLNLRNNRLTTLSKEIEQLQNLKSLDLRSNQLTTFPKEIEQLKNLQVLDLGSNQLTTLPEGIGQLKNLQTLDLDSNQLTTLPQEIGQLQNLQELFLNNNQLSSQEKKRIRKLLPKCQIYFD

SEQ ID NO: 35579 - DNA, 990 bp, Leptospira interrogans serovar Lai str. 56601
  CDS (1)..(990): transl_table=11
atgaattttcgcataactttgaattacttacaaaaaataataattggtctttttctttcttgcaagattcaaacggaaaaagaagaaccaggaacttattgggatttaacaaaagctctccaaaatcctttggatgttcgaattttgaatttgagtgaacaaaaactcacaactcttcctaaggaaatcgggcaactaaagaatctacaagagttgaatttgggtaataaccaaattacaatacttcctaaggagattggacaattacagaatttgcaattgttgggtttatattacaaccaacttacaattcttcctaaggaaatcgagcaattgaagaacttgcaagcattatatttgggtaataaccaaattacaatacttcctaaggagattagacaactacagaatttgaaagtgttgtttttgagtaataaccaacttacaactcttcctaaggaaatcgagcaattgaagaacttgcaaactttgtatttgggtaataaccgacttacaacttttccgaaagaaatcgaacaattgaagaatttgcaattgttgtatttatatgataaccaactcacagttcttccacaagaaataaaacaactgaaaaatttacaattgttggatttaagttataaccaactcaaaactcttcctaaggaaatcgagcaattgaagaacttgcaagagttgaatttgggttataaccaactcacagttcttcctaaggaaatcgagcaattgaagaacttgcaaacattatatttgggttataaccaactcactactcttccgaaagaaattggacaactacagaatttgaaagtgttgtttttgaataataaccaactcactactcttccgaaagaaatcggacaactgaagaacttgcaagaattgtatttaaacaacaatcaactctcaatcgaagaaaaagaaagaatccaaaagcttattccaaagtgccaaatttcctttgaataa

SEQ ID NO: 35580 - protein, 329 aa, Leptospira interrogans serovar Lai str. 56601
MNFRITLNYLQKIIIGLFLSCKIQTEKEEPGTYWDLTKALQNPLDVRILNLSEQKLTTLPKEIGQLKNLQELNLGNNQITILPKEIGQLQNLQLLGLYYNQLTILPKEIEQLKNLQALYLGNNQITILPKEIRQLQNLKVLFLSNNQLTTLPKEIEQLKNLQTLYLGNNRLTTFPKEIEQLKNLQLLYLYDNQLTVLPQEIKQLKNLQLLDLSYNQLKTLPKEIEQLKNLQELNLGYNQLTVLPKEIEQLKNLQTLYLGYNQLTTLPKEIGQLQNLKVLFLNNNQLTTLPKEIGQLKNLQELYLNNNQLSIEEKERIQKLIPKCQISFE

SEQ ID NO: 35581 - DNA, 1458 bp, Caenorhabditis elegans
  CDS (1)..(1458)
atgggaattgattcctacaatccaacagtgcgtgcacgccttgcaaatgcttctaaaacgcgagtcctgagcctgaaggagtctgccctgcaccgtattcctgatgacgtgaaagatctaacaatgttgaagcatctggatatgagtattaattatctgactcaacttcccccgtttattgggtcaatgtctcatcttaagaatttaaatttgtccagaaatcaactagaatctcttcctttggagatcaactccctggcgtgtcttgaagttttaaatgtctcacaaaacaaactgacagagcttcccgatctgtcacagtgtgtctcattaaagacagtagaggcgatagaaaaccaattcatcatcttcccagctggtgtgtgcaaatgtccaaatctcgaaacatgcttgttaactgaaaatcggatcgagaaacttccagacgaaattcattcgctacgggcaattagcgtgatcctcaacaaaaaccggcttctctctctcaacaccgctaatttgcttcgctgtgaacgcttgcgtgcagtaaacgtggacgataaccaactaaatcgcgacgaaattgaacaattccttgtgaatgcgccacgagaaattcgtatttcatttgaaagaaatgtttcgcaaatgcatacaactgatttgcaggaaatgggaaacgattcatctaaaacaaaatcaattggtgataatgcacggaagattattggaaaatccggtccatcgacatcaacggtcaataagcatctcgaaatggcaagcaaaagtcggattcttcagctaaaaggaactgggctcaagaaagttcctgacgaaatcgaaccattagctgatgttctccgcaacttggaactcagtgaaaacaaaattcgagaaattcctatctttattggtcaattttctcaactcaagcaacttcatttggctaataactgtcttgaatttctacctgatgaacttggatcgatgaaaaagctggagattttgaatttggcgggaaacaagctgaaagcgttgcccgacacaattgtcggttgcaccgatttgaaaaccatcgacttatcatccaacgttttcaccgtttttcctgtagcagtgattggctgtttgcaattggatatactcaatttaaatggaaaccaaattgaatctctccctgacgatatatccaatttgaaagttatcgagttaagtctgaatcaaaatcgactgagctccttaaatccatcaaatcttgccaaaactacacgactgaggactcttcgtctcgatgaaaactgtttggagaagtcggagttcactcgcgatttactagaatcttcaacaatttccgtgatgtcatacgacggaaatcgattccaattgaaagattttcaagatttaccaggatatgatgcttatcaagaacgtttcactgctactaaacgtaaaatctaa

SEQ ID NO: 35582 - protein, 485 aa, Caenorhabditis elegans
MGIDSYNPTVRARLANASKTRVLSLKESALHRIPDDVKDLTMLKHLDMSINYLTQLPPFIGSMSHLKNLNLSRNQLESLPLEINSLACLEVLNVSQNKLTELPDLSQCVSLKTVEAIENQFIIFPAGVCKCPNLETCLLTENRIEKLPDEIHSLRAISVILNKNRLLSLNTANLLRCERLRAVNVDDNQLNRDEIEQFLVNAPREIRISFERNVSQMHTTDLQEMGNDSSKTKSIGDNARKIIGKSGPSTSTVNKHLEMASKSRILQLKGTGLKKVPDEIEPLADVLRNLELSENKIREIPIFIGQFSQLKQLHLANNCLEFLPDELGSMKKLEILNLAGNKLKALPDTIVGCTDLKTIDLSSNVFTVFPVAVIGCLQLDILNLNGNQIESLPDDISNLKVIELSLNQNRLSSLNPSNLAKTTRLRTLRLDENCLEKSEFTRDLLESSTISVMSYDGNRFQLKDFQDLPGYDAYQERFTATKRKI

SEQ ID NO: 35583 - DNA, 2160 bp, Eremothecium gossypii
  CDS (1)..(2160)
atggaagtgcaaggggatccgcacacaggaggtgcgatggcgacgatggctcccatgacgcagaagctgacgtatctgattacgaaggagctgtcgcagaaggagtctccgacgattaagctcatagaactgaacatttccagccttccagaagaggcggtggagctgctgcacacggtggaacggctgtcgctgcagcggaaccaactgacaacgctaccgacgagcttccgcaacctgacgaagctgcgttacctcgacctacacgggaacaggcttgcggagatccccgcgatcctgctgcagtgcccgcacctggagattgtggacttgtcctcgaacgagatttcggcgctgccgcaggagtattcgccgctgtggtgcagcaacgtgaaggtgctatcgctgaagaacaaccgcgtgcgatcgctgcgggacctctacgcaacaataacgcagctgaaggctctgacgattttggagatagacggcaataagattccgaaggaggagcttgatcacgtgacgtctcatgtgccaactaagtcgctgcctcctgaggagtactggctgatggcgctgcgtaagtacatgcaggactttccacagggtatgcctgctgcaggtgcaaagactgcgcgtgcggcgaagcggatgggcttcatcggtgctgaagagtcaggatctgcgatgcactcggcgccggcgcaggactcggatttgatctcgcactccaagtacaacgactactttaaacgactgtcggtccttcccgaggaaaccagtagttccacccatgccagtgcgtcctccgaaacacgggtgtctcatgaggatcttgtggtaggatgccggaagctgcttttctcgttcaccgagtgccaacaaaatatccgtaaaatcacctccctctgcgcagacaaatcggttgctgtaaatatggtttccttgctatacacagtccgctcgcatatcgataatttggtggaggtgctagaacaggccgaagataccccggataccaatgtccacgatcagctccttgtgaacctttgcgttggaataatatcagtattcaagcaaatcatttcattacttcggaaaaactttgatgcattcttccgagcaaacgacgtctgcttcacacgaatgttttacatgacactgttatgttcctataccgaaatgtgcaatgtgtggaacctggtggtcccagagaatattaagaggaagaggccggttgttactccacggcagcgctctttcagtgtccaaacacaccattctttcaaacacctgccacccaggcagcgctcgaatacactccagcgtgggacgccttcctcttctgcactgcagccactgcagccacctttgattaaccagttgccactcaattcaccgcccagttccaaaaatactacaccactatccaacttatcgactccccctcccccaactaatattccttcatcgttgactggatcaaccatcttggatccgagagcagatgcttcgccaaggaccatgagatcagactcgcagatacattcgcctaatataaaacgtccacaggactcacaactatctgcggaacaaagtaaccaacatgcgggtccatcgggggaaatgaatatcgatacacagctataccatacccttagaacagttattgggatggtaaacgtggtttatgcacaattgacgcaagccattcagaagactgctattgcaagtacaacagatgatcatccaggtataactcccgctattgctgctaagattaaagatctcacggaaacttgcttccagtccatggaactgtccaaggttttgaaatcgcgcctgtctctgatcacttctacggagtcggagcagtacaataccaacgcagagaagctcaatacatgggaggatatcaatgcttttttgaaatctattattgcaattttagccaacaccaaactaattatgaaggatctacctgtgctgaacgaagtgcggcctaatttagcatctctggccaagattaccaaagatgtgaccgttatcctggacatgagctcatacagaacggtgtcccgcatccacgcagcctgcccagcagccttctgcacacggacccggttcacaattgcagacgccacaagaaggtactga

SEQ ID NO: 35584 - protein, 719 aa, Eremothecium gossypii
MEVQGDPHTGGAMATMAPMTQKLTYLITKELSQKESPTIKLIELNISSLPEEAVELLHTVERLSLQRNQLTTLPTSFRNLTKLRYLDLHGNRLAEIPAILLQCPHLEIVDLSSNEISALPQEYSPLWCSNVKVLSLKNNRVRSLRDLYATITQLKALTILEIDGNKIPKEELDHVTSHVPTKSLPPEEYWLMALRKYMQDFPQGMPAAGAKTARAAKRMGFIGAEESGSAMHSAPAQDSDLISHSKYNDYFKRLSVLPEETSSSTHASASSETRVSHEDLVVGCRKLLFSFTECQQNIRKITSLCADKSVAVNMVSLLYTVRSHIDNLVEVLEQAEDTPDTNVHDQLLVNLCVGIISVFKQIISLLRKNFDAFFRANDVCFTRMFYMTLLCSYTEMCNVWNLVVPENIKRKRPVVTPRQRSFSVQTHHSFKHLPPRQRSNTLQRGTPSSSALQPLQPPLINQLPLNSPPSSKNTTPLSNLSTPPPPTNIPSSLTGSTILDPRADASPRTMRSDSQIHSPNIKRPQDSQLSAEQSNQHAGPSGEMNIDTQLYHTLRTVIGMVNVVYAQLTQAIQKTAIASTTDDHPGITPAIAAKIKDLTETCFQSMELSKVLKSRLSLITSTESEQYNTNAEKLNTWEDINAFLKSIIAILANTKLIMKDLPVLNEVRPNLASLAKITKDVTVILDMSSYRTVSRIHAACPAAFCTRTRFTIADATRRY

SEQ ID NO: 35585 - DNA, 3123 bp, Magnaporthe grisea 70-15
  CDS (1)..(3123)
atggatcgaacaggcgataggccagccctcagtctctccaacggtggcagagggctacccgagaatcctgcccagggtcgaaggaacatgacgaacggtggcgccaatggcggcggctcgctcaacagtctgcctccaatgcccaccgccatccccgccaacgttcgcagcatgtcttccacctcgtcttcgactctctccgcgaatcctcccgtttccgccggtcaggtcataggcatggcgcgtcgagccatggccgaagccctcaaggagcacgagtctcaggcagcagaggccagcggggtcagcaacgagttgaagcccggtgtcaccattgacttgagtcgcaaaaacatacaggagcttccggaagagattgttgacgtgatcaaacacgaacttgagcgactagcactttctcataacaaaatatcgtcgttccccgcccgttggtccgaatgctcctccttgcgctacctaaacgttcggaacaatgagcttcgggagttccccctaccgctgtgccatctcaaaagcctcgagattctcgatctggggcgtaacaagatccgatcgctcccccctgaaatcgtcaaattgacttcgttgaaggtctttgcagttcaaaagaaccgtatcgaagagttgcccatttgcctggcggacatgggctcactgcaaatgattaagctggaaggcaatcctattcgatttccacctcccgaagttctgcaggtgcaggcagcaagtcctcccaacgaggggcatttgaaagaaagtgaagtcacagagttaacggtcacggcccacatcaaaaagttcatgaagcagagagctttggagctcaccagtagcagatcggactctgagatgggcatggacgaatcgaacgaaggcatggaaaccccaagagttccgatcaaacgcgttgtcagtgggagatttcccgtaagggtcaatggtgccggcttgccagacctcagatcacctgcttttgcgcggcccggaccacccccgatccctacgcgctcccactaccgcgggctatctcaacagaacactgctccaaggaagcctggggttatgcccttgaccatcggcaatgtcaatgagcgcatgcgaagcaactcggaaactttatcacaaacccctcgagcagataggcctggcgaacgttctcggcggatgggcgtcgtctcacaaaaagcccagcagctcggaacacttgacgagactcaagctaataaccggttttcgcactaccgtggcctcagtcacggctcggcgatgcaagggaatggccaaatgcttaatggcaagatgcccgtcagccctgccgaatctatactccagcggccgatatacgtgcgtcgattgtccattttgcccgaaagaaggcgcgagtccaagtttgtcgatccggtgctagaggccgctaagggcgttctctactccattttccagatccatcccatgatccagatgctcatgggattgacgagcgacgggctagctaagcgctccagtcttgagatcgtcttttacaataccaactctcatgtggaggagctcgagcaggaaattcaacgtcacgaggctgatgaggacggagcatcccaatttgaaaatgagaacgtgatgcgcgcgtgcatcaccttggtgaacgcttacgtgcacgtttgctcactgcttgcgagcaatgtcgaccttttcatagacaacggtgacccgcgatatattcgaaccttgatgatgcagctctacaatagcatcacagagctacgagtgacgacatcgcacgtgctgccggaagagggacaccgtagagccgccagccgcacggctatgaactctggaaccatccgcccacgttcgcgcgaaaacaccgccaccccgacggcagagaggccaaacggaatcccccggagtgtggcccgcggcaacttgacccataacccgagcaacctcagggttactactgacgttccgctttccagcattccgtacgtcaacgggactggtcgcacggccaccatttcctcagccacgccccggtcgggggagtcgtttgtctccacgggcagccgtggtctgtcgggcgacttcaccgaggaggatcgcatctttgaaaacatattcttggccctgcagaagtcaaccgatctggtagtgcggctgttgccagcgttcaaccaccaatataccaacggtctgcaagcggctatacagcaccgcaacactcgagagtcgcagatgtggaagtcattgatatctaagtgctcaatgacgatccaacagaccgagaagctcaagacgcgtctttcgctgatcaagctgaaagagcccgggatcaggactcagggctctttctggaatgacgtacgtgactttgtggactcttgggcggagtttggcagcaaagtcagggaggtcgaaaaaccactatcgctaccggccgacacgaggatgcgcttacgaccattccagaagagtatccaggaggcatcaagtcttatactacgctcgccgtggggctactggcttcggccgggcctggcaacgtcgcaccaaaccggtaatggaggcggcatttttagcccaggcggtgccgtggagtctcacaattctacgggtttgaacggtgaccgacagtatcagcaaaacgggcaatacggaaacccaagccacaaccatctccatcacaacccccacatacagcttccaatgacacctcagagcgctgcattgggtcctgcggcccaagctacagtgccggcaaccccacagagcggttctttcgctgcagcgctgaccggcaacgtatttgagcgggcggatgcactcatgtctcagggtggcccgtcatctatacactcgcactctcgccacggaaccttcacttcctctacgtcaggttcttccggcggaatgagtggtagcttcaattcgattagcagcactctatcatcagcgactagctacaacgatgacaggatgggaggtcactcggcttcttcatcttcgtccgtcataagcccgggcggcctaggaggcggccctggaccaatggcctctgccttcccgttccgcatgcaaaatggcggtgggagggtggcgttgtag

SEQ ID NO: 35586 - protein, 1040 aa, Magnaporthe grisea 70-15
MDRTGDRPALSLSNGGRGLPENPAQGRRNMTNGGANGGGSLNSLPPMPTAIPANVRSMSSTSSSTLSANPPVSAGQVIGMARRAMAEALKEHESQAAEASGVSNELKPGVTIDLSRKNIQELPEEIVDVIKHELERLALSHNKISSFPARWSECSSLRYLNVRNNELREFPLPLCHLKSLEILDLGRNKIRSLPPEIVKLTSLKVFAVQKNRIEELPICLADMGSLQMIKLEGNPIRFPPPEVLQVQAASPPNEGHLKESEVTELTVTAHIKKFMKQRALELTSSRSDSEMGMDESNEGMETPRVPIKRVVSGRFPVRVNGAGLPDLRSPAFARPGPPPIPTRSHYRGLSQQNTAPRKPGVMPLTIGNVNERMRSNSETLSQTPRADRPGERSRRMGVVSQKAQQLGTLDETQANNRFSHYRGLSHGSAMQGNGQMLNGKMPVSPAESILQRPIYVRRLSILPERRRESKFVDPVLEAAKGVLYSIFQIHPMIQMLMGLTSDGLAKRSSLEIVFYNTNSHVEELEQEIQRHEADEDGASQFENENVMRACITLVNAYVHVCSLLASNVDLFIDNGDPRYIRTLMMQLYNSITELRVTTSHVLPEEGHRRAASRTAMNSGTIRPRSRENTATPTAERPNGIPRSVARGNLTHNPSNLRVTTDVPLSSIPYVNGTGRTATISSATPRSGESFVSTGSRGLSGDFTEEDRIFENIFLALQKSTDLVVRLLPAFNHQYTNGLQAAIQHRNTRESQMWKSLISKCSMTIQQTEKLKTRLSLIKLKEPGIRTQGSFWNDVRDFVDSWAEFGSKVREVEKPLSLPADTRMRLRPFQKSIQEASSLILRSPWGYWLRPGLATSHQTGNGGGIFSPGGAVESHNSTGLNGDRQYQQNGQYGNPSHNHLHHNPHIQLPMTPQSAALGPAAQATVPATPQSGSFAAALTGNVFERADALMSQGGPSSIHSHSRHGTFTSSTSGSSGGMSGSFNSISSTLSSATSYNDDRMGGHSASSSSSVISPGGLGGGPGPMASAFPFRMQNGGGRVAL

SEQ ID NO: 35587 - DNA, 2940 bp, Gibberella zeae PH-1
  CDS (1)..(2940)
atggagcggccagaccgactcgccggttcgtccgtcggttctacatcgcaggcttcaattccgcgaagcttgcccgaaaaccatacatctggacgccgtccagttccaaactcagctgccacatccaacggccctccgccacctcctcctatcccaagcctacgcagcgtcccgtccagttcatctctctcaaccgttggcatgtcggcagcccaggttatcaacctcgcgcgcgaggccatgcaaaatgcaatcgaaagcgaaagtcaagccgccgaagctggtgctgttagcacagggctccgaaccggagtcactattgacctgagtcgtaaaggcatccagaaacttccagatgaagtcgtcgacattgtgaaaggcgaactggaacggtccgcttccaagaactcgtcctcaaacacacgacccgacgccgatacttatactgtctccagactagcattgtctcataaccaactgacaagcttgcctgctcgcttttccgaatgcacatcactgcgatacctcaacatccggggtaaccagatcaaggaattccctatgcctttgtgtgaactgaaatctctagaaatcctcgacctcggccggaactcacttcgaattcttccagcagatattgcaagactctcttcattgaaagtgctatctatacccaaaaaccaaatacgagagttgcccctatgcattgccgacatgggatcattacaagttatcaaatttgaaggaaaccctatcagctttccgccacgagatgcaattcaagtacaagcagcgagccctccacacgaaggtattcaaaaagacaacgaagtgacggaggtggcggtcactttgcagatcaagcgatacctgaagcaatatactattaatggccggtccgaatctgacaatacgggagatgaatcgagcgaaggtgcagaaaccccccggtttcctctgaagagagtggctagtgggcgctttcctgtcaaggtccagggtgccgatttgcctgatatccgttctcccaacattggatcacgagcacccccgataccgtcaaggtctcattaccgggggctttcccaacaaaacaccgcttttcgacgacctggtgttatgcctctaacaatcggcaatgtcaatgagcgtgttcgcagcaactctgaaagcctactccgggcagagagatcagatggccgcagcaggcgcatgggaatagtctcaagaaagccttctgacctcggcacgcttgatgagatgcaggtcaacaaccgctttagccactatcgtggtttgagtcacggttctgccatgcaggggaatcaagcaacaactaagagtccagcaacacccacagaaccctacctcgcacgcccgatatacgtgagacgtctttcaatccttcctgaacgacgaagagagtcaaagatatttgacccagtaatcgaaactgccaagggcattctgtactcggtcttccagattcatcccatgatccaggcgttaatgggcctgacaagtgacggctcagccaagcgatccagtcttgaaatcgtgttttacaacaccaactcgcatgttgaggaattggagcaggagctacagaaacacgaaaacgcgttgggcgagcctctcgatcattctcaacgagaaaacgaaaacgtgcacagggcatgccagactctggtcagcgcgtatggccatgtctgcacacttttggccgataacatcggcacattcgtggattttggagatgcccgatatattcgaagtctcctgatgtccctatacaacagtatcatggaactgcgcgtcactttgtcatctgtcagtgctgccgatgttcgtcgacgaggcgggcccaaaggtggttcaactggcgagcgcactgccagaccacatgcacgagaaccatctgcaactcctaccctcagcaggtcgaatggagcccgcaaccgcaacggcaccttggttcaccacccggttaacctccgtgttagtactgacgtgccggtgcctactcccctttctgcaacatatctcaatggcaatgggcgcactgctactcttgcttcggccactccccgatcaggagaatctttctcctcaattggtagccgcggaatgtcatccgagtttacagaagaggatcgacagtttgagcggattttcctggctctgcaaagatctactgatctcgttatgggcacgctgcccaacttcaacgcccagctggctggtggcttacgaaatgccatgtaccagcggactcctgaaagtgttcttcagcactggaaacagttgattgccatgtgtggtcaggttatccagcagaccgagattctcaaaaacagattgtccatgatcaaactgaaggagccaggcgttcggacgcaggcaaatttctggagtctctgcagtaacttcagtcactcgtgggcggacatgatttctcagatcaagtatggacctaacagtgtgccgcttccccccgatactcgggcacgcttgaggccgattcaacagagcatcaaggagacaagcaacatcatctataaatcgccctggcactatctattccacccttctggcgctatgaacggacaggcataccctcgcggcatgtctcccacgtcagttcccatcacaccacagagtgccgctttgggccctgcaatgcaagcaacagttcctactacgccctcgaacagctcctttgcggcagcattccatgggaatgttttcgaccgagcagacgctctcatggccaacccaggtatctccatgggtcgcaacggtgcttttggcaagggtcacatgggcttcagctcgctatcttctctatcttccatgtcgtctgatgaaggaatacttcccactcacggaccactcggcccagtacctcttcgtcttaatggaggcaaagtcgccttttag

SEQ ID NO: 35588 - protein, 979 aa, Gibberella zeae PH-1
MERPDRLAGSSVGSTSQASIPRSLPENHTSGRRPVPNSAATSNGPPPPPPIPSLRSVPSSSSLSTVGMSAAQVINLAREAMQNAIESESQAAEAGAVSTGLRTGVTIDLSRKGIQKLPDEVVDIVKGELERSASKNSSSNTRPDADTYTVSRLALSHNQLTSLPARFSECTSLRYLNIRGNQIKEFPMPLCELKSLEILDLGRNSLRILPADIARLSSLKVLSIPKNQIRELPLCIADMGSLQVIKFEGNPISFPPRDAIQVQAASPPHEGIQKDNEVTEVAVTLQIKRYLKQYTINGRSESDNTGDESSEGAETPRFPLKRVASGRFPVKVQGADLPDIRSPNIGSRAPPIPSRSHYRGLSQQNTAFRRPGVMPLTIGNVNERVRSNSESLLRAERSDGRSRRMGIVSRKPSDLGTLDEMQVNNRFSHYRGLSHGSAMQGNQATTKSPATPTEPYLARPIYVRRLSILPERRRESKIFDPVIETAKGILYSVFQIHPMIQALMGLTSDGSAKRSSLEIVFYNTNSHVEELEQELQKHENALGEPLDHSQRENENVHRACQTLVSAYGHVCTLLADNIGTFVDFGDARYIRSLLMSLYNSIMELRVTLSSVSAADVRRRGGPKGGSTGERTARPHAREPSATPTLSRSNGARNRNGTLVHHPVNLRVSTDVPVPTPLSATYLNGNGRTATLASATPRSGESFSSIGSRGMSSEFTEEDRQFERIFLALQRSTDLVMGTLPNFNAQLAGGLRNAMYQRTPESVLQHWKQLIAMCGQVIQQTEILKNRLSMIKLKEPGVRTQANFWSLCSNFSHSWADMISQIKYGPNSVPLPPDTRARLRPIQQSIKETSNIIYKSPWHYLFHPSGAMNGQAYPRGMSPTSVPITPQSAALGPAMQATVPTTPSNSSFAAAFHGNVFDRADALMANPGISMGRNGAFGKGHMGFSSLSSLSSMSSDEGILPTHGPLGPVPLRLNGGKVAF

SEQ ID NO: 35589 - DNA, 2943 bp, Aspergillus nidulans FGSC A4
  CDS (1)..(2943)
atgatttctactttggttcgaccggaggatagtctaagaatgcctcgctcatatcgagacactgaagaggaagacgcgaaccgacacagtcccgagccagcggcgccgttatcctcgtcatcctcgaccaccgacgggtcgaataagagcgaagatgaagccacgttggtgaacgggtctaccggcgataccagcagcaggccgacaaagtcgcgtgaatcgcttacgccggaggagacaatccaacttgcgcgccgagcagtagagaacgggatccaggaaacgaaacggtctttggcaggaagcgaagcggtcggtgatgtggtcaagccgaagctgaccattgatttgggccactcaaatatcagtcgtataccggagccggttgtggatattatcaaggatgaagttgaacggctctcgttatggaacaatcaactggtccatattccttaccgattcgcagagtgctctcatcttcgatatctcaacgtcagatctaacaactttcgtgaatttcctagaggagtgattaaactgccattactggagattttggatttgagccgcaacaaaattagccagcttccggaggaaataaagaaattaacatctctccgagttctgtcggtgatgcaaaaccgccttgacgatttaccacttggtgtgtcggatatgaacaagcttcagatcctcaaagtagctggaaatccactgcggtacccgctccgcaaagtaatagaaacatctgaggccgagattacctcctcaatgatgagcgataacgaaaaagaagttgctttaacggctgagcttaaaaggtatcttaaggcgcggcaacctattaattctaatgattttgaatcaaacaacgaaagtgatggcatcttggacactccaaaacccgtcaaacggggagtgagcagtcgcttcccagtgattccaagcacaggcgacggcgctgaccctaaatcgccgtcattatcacggccacctcccatcccacttaaatcacattatcgcattgcttctggacatggcggtgctctgcaaatcctccagcgtcccggtcccatacctggggctaatgagcggaatcgaagtaatagcgagggtatcattcaagcctcttttgcaacacggtccaagcgcatgggggtcatcagtcgaaagaacacagacttgggcacactggacgaaatgcggccataccgcaatagtcacctccgtggtctcagttatggatctattcttcggacaaggccatctatcagcaactcatctagtccgagcagcccaagagagcgcaggcggcccagagatggatttgtgaatcggatgtcgagtctaccagagcacaagggcgagcgggaaactgaaagccccataatcgaaagcgccaagggaattctttttgccctctttcaagtccagtctcatgtctatgcccttataaatgtcatcaagcgtgatgattaccggcgaaatagtctcgaaattgtcttttacaacgcttccactcatgtggaccgactaaatgaggcgcttgaaaatgcagaaaactcacgagcagatgatgcggagccaatgcgagcctcctacgaggctgtcaagagggaatgcgagacgtgtatcatggcgtactctcacgtcggaacccagttacgcaacagccttgacagaatcgttgccaatggcgattcgcgctacattcgctcgctgatgcttatgatatttggtagcgtggttgagctccgcaacgcatgtgcatgcttggaggtacctgttggaaaccgaccgagacctactggaaggccaccagtacctgagatcagcagagaatctgcggattcagatagataccactgcacaacagtcaccccaacgcggggaagagaaccgtccttctccactcgccggctccgtagcgatacaacaatcttgcatccacaaactaatatgcatgggcccctgccagcctctgccacatttcagtccgccgttagctctccaggcttcgctcccactccatacagctatggagcgaggagtcggtcgagcagcaggtcgaatcatgtcaacacatccgtaccctcgtcccttgctactcctcggtcaggcgagtctttccctccgatgcctacttcggtgatacctaaaataaaccccttgaccggcttggacgaaatagaagaggaacggatctttgagaagattttctaccaacttaccgctgcttacaccgctgctctccaagcgctacctgttgcccgccgtcattttgcgaggaacctggaggtcgcggaacagaatcgggaattcgaagatatccagatgctatggaacaacctcattcaccgctgccgggtttgtctggaagtatcagaagccctcgggcttcgtttgtctaatatgaaagtgaaggaaccagggggtggaatgcggaaccaacgagagttctggcaactatgcaaagcctttatgcagtcttttgtcgaactggtgactgacatgcgcgaagtacggagcatgcacttactcccatctgaagtaatcgtgattcttcggcctgtgcagaaggccagcagggaagcaggtcgcttgatcgaggcttctccatggtcatatcttgcagacatggctcccgggaacggccccccggccatatacggaccacccttgccgtcccaaacttcacatcagcagcagcagcatcaccatcaccatcaacaacatcaccctcagctcaacacaagcatgtcaccttctgttgcgcttcccgcaaccccccttagcgctgctctgggcccagcggcgcaagcaacaataccttcgacacctgcaagtgcctacagcgataagttcttcgagggtgacgtctttcaacgagccgactccttgctttcaatgccaaatcaggcgccattcttctcgcgacggtga

SEQ ID NO: 35590 - protein, 980 aa, Aspergillus nidulans FGSC A4
MISTLVRPEDSLRMPRSYRDTEEEDANRHSPEPAAPLSSSSSTTDGSNKSEDEATLVNGSTGDTSSRPTKSRESLTPEETIQLARRAVENGIQETKRSLAGSEAVGDVVKPKLTIDLGHSNISRIPEPVVDIIKDEVERLSLWNNQLVHIPYRFAECSHLRYLNVRSNNFREFPRGVIKLPLLEILDLSRNKISQLPEEIKKLTSLRVLSVMQNRLDDLPLGVSDMNKLQILKVAGNPLRYPLRKVIETSEAEITSSMMSDNEKEVALTAELKRYLKARQPINSNDFESNNESDGILDTPKPVKRGVSSRFPVIPSTGDGADPKSPSLSRPPPIPLKSHYRIASGHGGALQILQRPGPIPGANERNRSNSEGIIQASFATRSKRMGVISRKNTDLGTLDEMRPYRNSHLRGLSYGSILRTRPSISNSSSPSSPRERRRPRDGFVNRMSSLPEHKGERETESPIIESAKGILFALFQVQSHVYALINVIKRDDYRRNSLEIVFYNASTHVDRLNEALENAENSRADDAEPMRASYEAVKRECETCIMAYSHVGTQLRNSLDRIVANGDSRYIRSLMLMIFGSVVELRNACACLEVPVGNRPRPTGRPPVPEISRESADSDRYHCTTVTPTRGREPSFSTRRLRSDTTILHPQTNMHGPLPASATFQSAVSSPGFAPTPYSYGARSRSSSRSNHVNTSVPSSLATPRSGESFPPMPTSVIPKINPLTGLDEIEEERIFEKIFYQLTAAYTAALQALPVARRHFARNLEVAEQNREFEDIQMLWNNLIHRCRVCLEVSEALGLRLSNMKVKEPGGGMRNQREFWQLCKAFMQSFVELVTDMREVRSMHLLPSEVIVILRPVQKASREAGRLIEASPWSYLADMAPGNGPPAIYGPPLPSQTSHQQQQHHHHHQQHHPQLNTSMSPSVALPATPLSAALGPAAQATIPSTPASAYSDKFFEGDVFQRADSLLSMPNQAPFFSRR

SEQ ID NO: 35591 - DNA, 2607 bp, Candida glabrata CBS138
  CDS (1)..(2607)
atgccactagcaaatgaaaaatacaatgacgatagttcaaaggggtctcaagctatgaatgagttaagtatagatgaaatgagagaagtaatagatcatgagttaacacaacaggaatcaaaaaatagctccactgttaaacttataggactgaaccttaaaacaataccaccggaagatattaaactacttgcaaatgcagaaagactctcactaaggaaaaacaacataacatacttaccagaaaactttagtgagttaaaaaacctgcgctacctcgatctgcatagtaatgggcttcgagagatcccggttgaacttctgaattgccagaagttggaaattttggatatatcatccaataaaatctctcagcttccagaggaatttccaagcgtattctctactagattaaaggttatatctctgaagaacaacagacttacctcaatttggaaactatctcctattcttcaactaaatcatataaaagttctagaaattgaaggaaaccctataccgaaagaagaacttgatcaagtactatcttatgttccaaatcaacaaaacttacctaaagatgagtattgggcaattgccattcctcgctttcttaacaatcacccaaaaatgaaagtacagtcgctagagtcaaaattgagtagagcggcaaagcggatggggtttgttaataccataccagtaactgatgaacaattgaatgattctagcatctcatctgccactatatcagaacatatcaataatgttactattgccaaagagaatttcacagatacgaatatgaatacacctaatgttctgtcttcaaatgacctctacaaccatactaaatacaacgattatttcaaaagactatcaattcttccagaagaggttaaccaggaacagcataaagtatcacacactgatttggttgttgcttgtcgcaaattattgtttagttttacagagtgtcaacaggcaatacgaaagatcacttcactttgtaaagaaaagtccattgctgtgaatgtggtatctcttctatattcggttagatcacacattgataatcttgtggaaattttagaacagtctgacaatcaagaaatctcgaacgaccaacctttgatcacactttgtatgactatcatctcaatatttaaacaaattattgcgctgttacagaaaaattttaaagctttttttgaggaagatgatttatgtttcataagaatgtttttcatgtcactagtgtgttcatatactgaaatgtacaatgcatggagctttattacaccacaggagacacttttactacataagaaaagtgccagtaacaatagcaataaaattcaacctgagagtgatggtcatccggctataataagaagtaaaagcgaagcgaacagtaggacagaccatgtcggattaagcagaaaaccaacgctaactaatgtttcaaaaccagatattgctggagtacgattgtcaaatgaagaaaaaactagatatcatgatgccgtatctgatcaagaaagctcagtagaacacaatgaatcaggcattccaaaagtagccaggtcaagaagtaataccatacaaggtagaggaacaggtagtcttttgaatgttaatggatctaagtctaatataataacatctcctaatggtgttagtcagttacgaactcaaggacaactacctactcatgcagttgctactacaaacagtactcaagagcaaggttcttcggacaaacataaaatgaatatttctaatttagctaagacagcagataatagaggtggtaatttcaagaatccacctgatgagaaacagattaacaatgaacttcaaaatggaaatgtgtctcttacagcaccaaaactaaagcaagtacagcaacccccattaactgagaagggtggaatctcaacaccgactggaacggatgtagatattgatcagcaacttcacgaaacattgggaacagtagttaagatggtgacaatggtgtataatcaacttacatctgaaatatctaaagttgctttggctagttcaacaggacatcaggtattgaccgatacactagctaccaaaataaaagatttaacagatacctgtaggcaattattgcaattatcacaggtactaggtgaaaggttacggcttctgactggtgatggaataactgctgaaaagtattcaacgacctctgaaaagctaaaaacatgggaaagtatcaatgccttcctcaaagcaattatttcaattcttgccaatgcaaagactttaatggctgatttgccaagtctaaatgaagtaaggccacaacttgcttcgttagccaagataaccaaagatgttacggtgattttagatttgagttcatataaagcagtttctgttgcagcagcaaatcaagaagctctacagcataacaataacaactctgaaacaaaatctggagattccaaatcgccagtaaacgaatcggctataagtggtgatcacagtcatacagacatcgccaatgttccactgtttacaccacaggctgctagtgcttatatgagggatccattcgaccaacagtaa

SEQ ID NO: 35592 - protein, 868 aa, Candida glabrata CBS138
MPLANEKYNDDSSKGSQAMNELSIDEMREVIDHELTQQESKNSSTVKLIGLNLKTIPPEDIKLLANAERLSLRKNNITYLPENFSELKNLRYLDLHSNGLREIPVELLNCQKLEILDISSNKISQLPEEFPSVFSTRLKVISLKNNRLTSIWKLSPILQLNHIKVLEIEGNPIPKEELDQVLSYVPNQQNLPKDEYWAIAIPRFLNNHPKMKVQSLESKLSRAAKRMGFVNTIPVTDEQLNDSSISSATISEHINNVTIAKENFTDTNMNTPNVLSSNDLYNHTKYNDYFKRLSILPEEVNQEQHKVSHTDLVVACRKLLFSFTECQQAIRKITSLCKEKSIAVNVVSLLYSVRSHIDNLVEILEQSDNQEISNDQPLITLCMTIISIFKQIIALLQKNFKAFFEEDDLCFIRMFFMSLVCSYTEMYNAWSFITPQETLLLHKKSASNNSNKIQPESDGHPAIIRSKSEANSRTDHVGLSRKPTLTNVSKPDIAGVRLSNEEKTRYHDAVSDQESSVEHNESGIPKVARSRSNTIQGRGTGSLLNVNGSKSNIITSPNGVSQLRTQGQLPTHAVATTNSTQEQGSSDKHKMNISNLAKTADNRGGNFKNPPDEKQINNELQNGNVSLTAPKLKQVQQPPLTEKGGISTPTGTDVDIDQQLHETLGTVVKMVTMVYNQLTSEISKVALASSTGHQVLTDTLATKIKDLTDTCRQLLQLSQVLGERLRLLTGDGITAEKYSTTSEKLKTWESINAFLKAIISILANAKTLMADLPSLNEVRPQLASLAKITKDVTVILDLSSYKAVSVAAANQEALQHNNNNSETKSGDSKSPVNESAISGDHSHTDIANVPLFTPQAASAYMRDPFDQQ

SEQ ID NO: 35593 - DNA, 2379 bp, Kluyveromyces lactis NRRL Y-1140
  CDS (1)..(2379)
atggataaccatacggaattactgacatcactcaggcaaggtcaaaatggaaatcccccgatgcaccctgttaataaagagatttatcagaaggataacacagcagtttcattagctgatcttggtttgtcttcaataacagatgatgctgttgagctgcttcaactagttgagaacctttctttgcaccagaataacttaacacagcttcccggatcctttaaaaagttgacaaatcttcgaaccatcgatctttctgataacagattcaatgatattcctccatcgttaatgcaatgccttcgattagaaaaaataaatctttctaacaacaacatatggcagctacctcaagaatttccagagacatggtgtgataaccttgttacactctcattgaggaacaacaatctaacatccatcaagacactatttcctataatatcccagttaaagaatctacgagtccttgaactagatgggaataattttccaaatgatgttatcgagaaggttctacaaggttttactagttccaagtgctctgcggaagaatactgggttatagccttaagaaaattcttcagtgacaataccgtttcacaaacaccggcagttacaactctggatccacaacaaaagatagcaagggctgcgaaacgaatgggctttattggaaattcacatgattcggaagacaatgagaataatctcacgtctccccagagcgatcttgatctttactctcattcaaaattcaacgaatacttcaaaagattatctgttctgccagaggaacccaatttgcaagaggtagaagaggaaacagatgaacagaattataaagaattactacagacacatcatgaaaagaaaagaaaatctatggaaaatgttgtgctagcttgcaggaaacttttgttcactttcactgagtgtcagcaaaacattaggaagataacatcgctatgttctgaaaagaccatttcggttaatgttgtgtcacagctttacagtctcaagtctcatattgataatttagttgaagtcttggaacaatttgaaaataatagtcaacaaaatgatccttcaataacgcaaagtcagttccttcatcatgatgttttgatacgactatgtttgaccatactttctatattcaaaaagatttttgttcaacttcgaaagaacttcactgcattttttggcaataacgacgtgttttttttaagggtgttctacatgaacatattatgttcgtatactgaaatattcaacgcctggaaactacttgttttggataaccaggaaatgatgaaaaagaaaaagctagccagaacgcattcagttcattctatgaacatggctcagtaccaaaagtatttaaacagcaggcaaaaatcgtcttctgctattaatcgatcttcttctctgagtggcgtctcttcccaacagtctgcaattaatgtcaacacaccaggtataaatggtccttatgcgaatcaaaatggccaacaggttaccccgccaattaatccaacatctttcacgactacaccgatatctgaagtttcaacaacaccgcctatactagattcttcaccgaaaccacctcgcagtctaaattacagtgagcaatcaactgcctccacagtcacacaaggtgccgcacccaccgatacctccaatatcccctcacaagcacttgcagataaggatatagacctgcagctataccatacgttgaatacagttattgatatggttaacgttgtatattcacaattgacgcaggcaataacaaagtcagcaatagctagtactacctccgatcagctttcaataactcctacggttgctgcaaaaacaaaagaattgacagatacttgcttccaatccatggagttatcgaaagtgttaaaaaaacgactaaatgtgatttccaatagtgatattgacacatatttggttactaaagaaaagctcaaaacttgggaagatataaatgcatttttgaagtcaatcatagctattctagccaacacaaaggaaatcatgagtgatctgccgactttgaatgacgtgaggcctaatctagcctctttagctaaaattacaaaggatgttactgttatactcgatctaagctcttacaaaagtgcttccattaccaatcagcagtcatcctcaaacccttcatatgttggtgcaagttctgttgatgcgccatcacaacagcaaaatcacacaacgaatcaaggatcaccggcaggtcagcatggagataccacggatcatacagcttcgaatataataacaccattatctacgccttcgctggtgacttctcacaatgtgaatccatttgatcaactgtga

SEQ ID NO: 35594 - protein, 792 aa, Kluyveromyces lactis NRRL Y-1140
MDNHTELLTSLRQGQNGNPPMHPVNKEIYQKDNTAVSLADLGLSSITDDAVELLQLVENLSLHQNNLTQLPGSFKKLTNLRTIDLSDNRFNDIPPSLMQCLRLEKINLSNNNIWQLPQEFPETWCDNLVTLSLRNNNLTSIKTLFPIISQLKNLRVLELDGNNFPNDVIEKVLQGFTSSKCSAEEYWVIALRKFFSDNTVSQTPAVTTLDPQQKIARAAKRMGFIGNSHDSEDNENNLTSPQSDLDLYSHSKFNEYFKRLSVLPEEPNLQEVEEETDEQNYKELLQTHHEKKRKSMENVVLACRKLLFTFTECQQNIRKITSLCSEKTISVNVVSQLYSLKSHIDNLVEVLEQFENNSQQNDPSITQSQFLHHDVLIRLCLTILSIFKKIFVQLRKNFTAFFGNNDVFFLRVFYMNILCSYTEIFNAWKLLVLDNQEMMKKKKLARTHSVHSMNMAQYQKYLNSRQKSSSAINRSSSLSGVSSQQSAINVNTPGINGPYANQNGQQVTPPINPTSFTTTPISEVSTTPPILDSSPKPPRSLNYSEQSTASTVTQGAAPTDTSNIPSQALADKDIDLQLYHTLNTVIDMVNVVYSQLTQAITKSAIASTTSDQLSITPTVAAKTKELTDTCFQSMELSKVLKKRLNVISNSDIDTYLVTKEKLKTWEDINAFLKSIIAILANTKEIMSDLPTLNDVRPNLASLAKITKDVTVILDLSSYKSASITNQQSSSNPSYVGASSVDAPSQQQNHTTNQGSPAGQHGDTTDHTASNIITPLSTPSLVTSHNVNPFDQL

SEQ ID NO: 35595 - DNA, 2301 bp, Yarrowia lipolytica CLIB99
  CDS (1)..(2301)
atgtcgacgataccaacaggaattcgtctacaattttttcccattgtctatccgtactcgctctcctatttcttgccatgttccatcctgtatcgtgcactgcatatgaccgctccttacaaggttgcagctgcaaatattctacccctccaaccgttcatggccttttgcggcacattttcggggccgccgcacgtagaaacgaattgggccacattccaaagaggtacaaaaccacataagccagggaaaaacataaataccagtgccacgtacgccctaggagtccaccagacccccacatccacacatccacacatggcatcatcatccctcttctcccagctgcaggagaactctatcgggtccgccaatatacgaccgttctacctgttctcaccaacctcgatggacttgattcaagacgtgcaacgcaaggtggaggaggctggaggagatgaagagcgcggcgtggagctcaatcatatgggactgacggaggtgagtgatggcgtggcagagctgctgttgcgggtccgcaagctgtctctcacgggcaatatgctcacagacctacctccgctcatgggccatatgacgcaattgcggtacttggatctgagtaacaatgctctacacaacgtccctgcggttgtgactcggctgacgacgctcgaaatcctcgatgtctcctacaaccaggtggaggctttcccggagggcatgctgcggctcaccaatctcatggtcttgtcgttttcacacaacaagctgcgccatgtgccatcgttcatcgcggacatggcagaactgcggctcatggagattgatggcaacccgttcgtggacccccctcctccatgtgtcgacccacaagccgagggagtgctagattgggttgaagaagtcaaggagtggctgaggagtaaacgaatacaaccacctccacagcagcagttgccacagcagcagttgccacagatacagacacagacaccacaacaagtgccaccaacaccaacaccaacacaagcacaagctccgtcagtgcacaccacgcctccagtgacacccctcgaagatgaccccatttcgtcccgacaggccaaacgaatgggcgtcattgtcaaaaaataccgatccaccacgtcacatgctcgtggggcgtcacatgactcagccattggagatcccgtccaaggtcaaggctcgtccacgggagcctacttcaagcggctgtccacgcttcccgaggaacgcaaaaacaacacgatcgaggcgtgtcgaaaaatcctctttgccttttctgagatcctgccagccatcaaaacatacagcggcttttgcaaagatagaaaactggtggcgaaagcggccaatctacatggcacgtgccagcaacaacaggaggcactactggcggcactggagagatatgaagagacggtacaggacgctacagtggaatctgccgtcgtggaaagggcggggctctgcgtgggctctctgcggcgcattctggcgctgttgcattccaacattgccttgtttgcatcggcagacattcggtacacgcgcctgatgcttctgtcgacatttggatccttatccgaagtccataacgcgtggcataccctgtttccgcctaatgagcccgacaagttcagcaccgtgtctcccgcagaccgagcgctgtacgagaagctcatcagtgcgaccaactgcgctcaaaacgtgctgggacagctgacggagttcatctccaagagcgcagctgcgtctgcacacgctggaggcaccatttcgcctcacgtgaccatcctggtgaaggagctcacgtccacgtgtgtggcaggagcagacgcgactcgccaagtacgtcagcggcttgaccgagtggccagaggcgatttcccgccgcgacagcagttcctggacacgacatcgtacttcctcaaggtggtgattgccatgttggccgctacaagacaggccatggacgatctaccgattctgggcaatgcgtctgcagctctgggaaccctgaccaagttgactaaggagattgccatttcgctggaatacaagcccaaggataacggcggaggtgctggaatgggaatgggtggcattggaggtcttcctactgctacagggtctacatttgcgcccccaacaatgcctgctgtgattcctcagttctcacctgcggcgagcgggcaaaccactccgctagtggctgccttgggtcctgcagccagtgttgttgagggctttttcgatcatcaccaggttgaatag

SEQ ID NO: 35596 - protein, 766 aa, Yarrowia lipolytica CLIB99
MSTIPTGIRLQFFPIVYPYSLSYFLPCSILYRALHMTAPYKVAAANILPLQPFMAFCGTFSGPPHVETNWATFQRGTKPHKPGKNINTSATYALGVHQTPTSTHPHMASSSLFSQLQENSIGSANIRPFYLFSPTSMDLIQDVQRKVEEAGGDEERGVELNHMGLTEVSDGVAELLLRVRKLSLTGNMLTDLPPLMGHMTQLRYLDLSNNALHNVPAVVTRLTTLEILDVSYNQVEAFPEGMLRLTNLMVLSFSHNKLRHVPSFIADMAELRLMEIDGNPFVDPPPPCVDPQAEGVLDWVEEVKEWLRSKRIQPPPQQQLPQQQLPQIQTQTPQQVPPTPTPTQAQAPSVHTTPPVTPLEDDPISSRQAKRMGVIVKKYRSTTSHARGASHDSAIGDPVQGQGSSTGAYFKRLSTLPEERKNNTIEACRKILFAFSEILPAIKTYSGFCKDRKLVAKAANLHGTCQQQQEALLAALERYEETVQDATVESAVVERAGLCVGSLRRILALLHSNIALFASADIRYTRLMLLSTFGSLSEVHNAWHTLFPPNEPDKFSTVSPADRALYEKLISATNCAQNVLGQLTEFISKSAAASAHAGGTISPHVTILVKELTSTCVAGADATRQVRQRLDRVARGDFPPRQQFLDTTSYFLKVVIAMLAATRQAMDDLPILGNASAALGTLTKLTKEIAISLEYKPKDNGGGAGMGMGGIGGLPTATGSTFAPPTMPAVIPQFSPAASGQTTPLVAALGPAASVVEGFFDHHQVE

SEQ ID NO: 35597 - DNA, 2466 bp, Candida albicans SC5314
  CDS (1)..(2466): transl_table=12
atgagtagatctcaaatagttgcgttattgaaggagcaacttgataccattaaacagaagaaatcaatcaaactaaactccttaccatctaccaccaaaccgtcagaattgatagatacaatatatgagtttttaactagttttgatccgtctttggagttagagaaattggcaatacaaaacagccaactcattgaactaccatcaaacttccacaaaattgcatcgtctataaagtatttggatttacaccagaattcaatttcgtatattcctcaagattttttttatgggtttgatagtttggagatcttggatttagcatccaatgacttggagttcttgcctgactcgttgtcttctgttaccacgttgaaggtaatttctatcaaagataacagtttcaagtacatatcgccacagcttggagaattaccaaatttgaacttaatcgaagtgtcagggaatccatcactacttccttcgaacgacataattcgagcattccagcaacaaaaacctgatctagattgggtgggagagttgaagaattatttggtcgccaatagaatgctcattaatctgaaaattcaagaggccatggaaaagtcgtcgcaaaaacgacaacaagtaccaaaagattcgacaccagaaacgtctcaaaccacgagtgatccagtaatagcgagaagtaaatccggatctatatcgacctcgttttcatcaaaggcatcacggagaatggggttgattatcaagaaatcagacgaaaacagtgacggatcctccaaagaagatgccaataatagtttaatctctggggctgtaccggatcatgtaaccacagaaggcattcctcatgttgactcaccaacagacatctccttccagttgccaaagtcgccacctacatctacaccaggaacaaccacaccgtcaacacaagctgcacctgctacgacatctactaataagaaccttggcgtgacactgacatcatcggcacgaggacgttcaaacacttttaaagagatcgatcggatgcttgaaaaaagcgaaagtgtcgatactgaacgtaaatctaatgcttatttcaaacgtttgtccaccttgcaagaacttcctggtgatgagttatcggagtattctcaacccaaaaaacccgcagcagagggcaaacaagcttctggaaatgtgtcaaaatctaataacaccgctgccagcgaaaattccccagccaaacctcaacagcaaagtaaattgcacaccaatccagtcattattagagtatctcgtaaaatccttttttcatttagtgaactacattcatccattcgtagattcacttcgttttgctcagataaaaaagtcacgatgaaaatggtgtcatacctttatagcacaaaatctaacattgattctttagtggagaatcttgaaatcatggaagaatccggcgacaattcagaacaaatagtgcaagctttacacaattgcataggctcgttcaaatcgattatgaagcttctccatgagaatatccagtcttttgttggaaatatagaggtttgctttataagaatggtctatttatctgtgtttggatcgttgaatgaactacaaaatgcttacttgttgttgtgtcctaaagcaagtgcaaagtcttcttcaactgaaatgaaacagaagctttccatcaatactactacggatgcagatgaaaagttgtacagtacaattgaactggctactagcagcacacagacaatattttccgagttgaataaaacaatcaataaaggtgcaacagctagtgccaacggaggggtagttcacccaacagtcgcttccaagataaaagaactagccaaggtgtgtgcagcatcactagacattataaaaagactcaatacaaagctaataactatcagaaataatccatcggtcaccacgaaaaagttgtttgctgaggatattaatcaatttatcaaaactgttgtccagactttagctgcagttaaggcaatagttaaagatatacctattctcgacgacattcgtgcatcaatgtccaatttgacaaagactgcaaaggaggtgacatactttttagaggtttcgtcgtacaaatcattgcttccggactcttcgtccactggtgtctctcaacaaccacaattgatctcagtccctagtgtatcaaacttgtttacaccagtagctgcacatgcaccttccttacccactagcggaggacaagcagctagcaatggaccaaccccaatacgcaatccttcaacaaattcctccataactacgacaacattagtgcttcctccattaaacttacaagaaagtgctccgttgactgctccggtacaatcttctggtcaaatgtttgcaaaacacggacttaatccatttgatgggttgattatggcaagaaataatgataatcaaggttag

SEQ ID NO: 35598 - protein, 821 aa, Candida albicans SC5314
MSRSQIVALLKEQLDTIKQKKSIKLNSLPSTTKPSELIDTIYEFLTSFDPSLELEKLAIQNSQLIELPSNFHKIASSIKYLDLHQNSISYIPQDFFYGFDSLEILDLASNDLEFLPDSLSSVTTLKVISIKDNSFKYISPQLGELPNLNLIEVSGNPSLLPSNDIIRAFQQQKPDLDWVGELKNYLVANRMLINSKIQEAMEKSSQKRQQVPKDSTPETSQTTSDPVIARSKSGSISTSFSSKASRRMGLIIKKSDENSDGSSKEDANNSLISGAVPDHVTTEGIPHVDSPTDISFQLPKSPPTSTPGTTTPSTQAAPATTSTNKNLGVTSTSSARGRSNTFKEIDRMLEKSESVDTERKSNAYFKRLSTLQELPGDELSEYSQPKKPAAEGKQASGNVSKSNNTAASENSPAKPQQQSKLHTNPVIIRVSRKILFSFSELHSSIRRFTSFCSDKKVTMKMVSYLYSTKSNIDSLVENLEIMEESGDNSEQIVQALHNCIGSFKSIMKLLHENIQSFVGNIEVCFIRMVYLSVFGSLNELQNAYLLLCPKASAKSSSTEMKQKLSINTTTDADEKLYSTIESATSSTQTIFSELNKTINKGATASANGGVVHPTVASKIKELAKVCAASLDIIKRLNTKLITIRNNPSVTTKKLFAEDINQFIKTVVQTLAAVKAIVKDIPILDDIRASMSNLTKTAKEVTYFLEVSSYKSLLPDSSSTGVSQQPQLISVPSVSNLFTPVAAHAPSLPTSGGQAASNGPTPIRNPSTNSSITTTTLVLPPLNLQESAPLTAPVQSSGQMFAKHGLNPFDGLIMARNNDNQG

SEQ ID NO: 35599 - DNA, 1137 bp, Leptospira interrogans serovar Copenhageni str. Fiocruz L1-130
  CDS (1)..(1137): transl_table=11
atgaactttcgcataactttgacttacttacaaagaataataattagtcttttatttctcattcatctttcttgcgagattcaagcatgcgaagaaccaggaatttatagagatttaacaaaagcgttccaaaatcctttggatgttcgagttttgattttgagtgaacaaaaactcaaggttcttcctgagaaaattggacaacttaaaaacttgcaaatgttggatttgagtgataaccaactcataatacttcctaaagaaattagacaactgaagaacttgcaagaattgtttttgaattataaccaacttacaacttttcctaaggaaatcgagcaattgaaaagcttgcacaagttgtatttgagcaataaccaactcactattcttcctgtcgaaattggacaactacagaatcttcaagaattgaatttatggaataatcaacttaaaaccatttctaaggaaatcgagcaattgaagaacttgcaaaagttgtatttggataataaccaactcacagctctttctaaggaaatcggaaaactacagaatttgaaatcgttgtttttgagtaataaccaacttacaacttttcctaaggaaatcggaaaactacagaatttgcaagaattgtatttgagtaataaccaacttacaacttttcctaaagaaatcggaaaactacaaaagttgcaatggttgggtttgggtgataaccaactcacaacaattcctaacgaaatcggaaaactacaaaagttgcaagagttgaatttagatgttaaccaactcacaacaattcctaaggaaattgggcaattacagaatttacaagtgttgtttttgagttataaccaatttaaaacaattcctgtggaattcggacaactaaagaatttaaaaatgttgagtttagatgctaaccaactcacagcacttcctaaagaaatcggaaaattgaagaatttaaaaatgttgaatttagatgctaaccaactcacaacaattcctaaggaaattggacaattacagaacttgcaaactttgtatttacgaaacaaccaattctcaatcgaagaaaaagaaaggattcgaaagcttcttccaaagtgccaaatttactttgaataa

SEQ ID NO: 35600 - protein, 378 aa, Leptospira interrogans serovar Copenhageni str. Fiocruz L1-130
MNFRITLTYLQRIIISLLFLIHLSCEIQACEEPGIYRDLTKAFQNPLDVRVLILSEQKLKVLPEKIGQLKNLQMLDLSDNQLIILPKEIRQLKNLQELFLNYNQLTTFPKEIEQLKSLHKLYLSNNQLTILPVEIGQLQNLQELNLWNNQLKTISKEIEQLKNLQKLYLDNNQLTALSKEIGKLQNLKSLFLSNNQLTTFPKEIGKLQNLQELYLSNNQLTTFPKEIGKLQKLQWLGLGDNQLTTIPNEIGKLQKLQELNLDVNQLTTIPKEIGQLQNLQVLFLSYNQFKTIPVEFGQLKNLKMLSLDANQLTALPKEIGKLKNLKMLNLDANQLTTIPKEIGQLQNLQTLYLRNNQFSIEEKERIRKLLPKCQIYFE

SEQ ID NO: 35601 - DNA, 1209 bp, Leptospira interrogans serovar Copenhageni str. Fiocruz L1-130
  CDS (1)..(1209): transl_table=11
ttgaaaaatttacaagagttgaatttgaataagaaccaactcacaattcttcctaaggaaattgggcaattgaagaacttgcgaaagttgaatttgagtgctaaccaaatcaaaactattccgaaagaaattgaaaaactacaaaagttgcaatcgttgtatttgcctaataaccaacttacaactcttccacaagaaattggacaactacaaaagttgcaatggttgtatttgcctaagaaccaactcacaactcttccacaagaaattggacaattgaagaatttgaaatcgttgaatttgagttataaccaaatcaaaactattccgaaagaaattgaaaaactacaaaagttgcaatcgttgggtttggataataaccaacttacaactcttccacaagaaattggacaactacagaacttgcaatcgttggatttgagtactaaccgacttacaactcttccacaagaaattggacaactacagaacttgcaatcgttggatttgagtactaaccgactcacaactcttccacaagaaattggacatctacagaatttgcaagaattgtatttggtttctaaccaactcacaattcttcctaacgaaatcggacaattaaagaacttgcaaacgttgaatttgcgtaataaccgactcactactctttctaaagaaattgagcaactacagaatttgaaatcgttggatttgcgttctaaccaacttactatttttcctaaggaaatcggacaattgaagaatttgcaagttttggatttgggttctaaccaactcactactcttccagagggaatcggacaattgaagaacttgcaaacattggatttggattctaaccaacttacaactcttccacaagaaataaaacaactgaaaaatttacaattgttggatttaagttataaccaactcaaaactcttcctaaggaaatcgagcaattgaagaacttgcaaacattatatttgggttataaccaactcacagttcttccaaaagaaattggacaactacagaatttgaaagtgttgtttttgaataataaccaactcactactcttccgaaagaaatcggacaactgaagaacttgcaagaattgtatttaaacaacaatcaactctcaatcgaagaaaaagaaaggattcgaaagcttcttccaaagtgccaaatttactttgaataa

SEQ ID NO: 35602 - protein, 402 aa, Leptospira interrogans serovar Copenhageni str. Fiocruz L1-130
MKNLQELNLNKNQLTILPKEIGQLKNLRKLNLSANQIKTIPKEIEKLQKLQSLYLPNNQLTTLPQEIGQLQKLQWLYLPKNQLTTLPQEIGQLKNLKSLNLSYNQIKTIPKEIEKLQKLQSLGLDNNQLTTLPQEIGQLQNLQSLDLSTNRLTTLPQEIGQLQNLQSLDLSTNRLTTLPQEIGHLQNLQELYLVSNQLTILPNEIGQLKNLQTLNLRNNRLTTLSKEIEQLQNLKSLDLRSNQLTIFPKEIGQLKNLQVLDLGSNQLTTLPEGIGQLKNLQTLDLDSNQLTTLPQEIKQLKNLQLLDLSYNQLKTLPKEIEQLKNLQTLYLGYNQLTVLPKEIGQLQNLKVLFLNNNQLTTLPKEIGQLKNLQELYLNNNQLSIEEKERIRKLLPKCQIYFE

SEQ ID NO: 35603 - DNA, 1566 bp, Leptospira interrogans serovar Copenhageni str. Fiocruz L1-130
  CDS (1)..(1566): transl_table=11
atgaacttccgcataactttgaattacttacaaaaaataacaattggtcttttatttctcattaatttatcttgcaagattcaagcagaagaagtagaaccagaagcttatcaagatttaacaaaagccctccaaaatcctttggatgttcgagttttgattttgagtgaacaaaaactcacaactcttccgaaagaaattaaacaactacagaacttgaaattgttggatttgggtcataatcagcttacagctcttccgaaagaaatcggacaactacggaatttacaagagttggatttgagttttaactcacttacaactctccccaaagaagtcgggcaattggagaatttacaacggttaaatttgaattcccaaaaactcacgacccttccgaaagaaatcggacaactacggaatttacaagagttggatttgagttttaactcacttacaactctccccaaagaagtcgggcaattggagaatttacaacggttaaatttgaattcccaaaaactcacgacccttccgaaagaaatcggacaactacggaatttacaagagttggatttgagttttaactcacttacaactctccccaaagaagtcgggcaattggagaatttacaacggttaaatttgaattcccaaaaactcacgacccttccgaaagaaatcggacaactacggaatttacaagagttggatttgagttttaactcacttacaactctccccaaagaagtcgggcaattggagaatttacaacggttggatttgcatcaaaaccgactcgcaactcttcctatggaaatcggacagttaaaaaatttacaagagttagatttgaatagcaacaaactcacaacccttccgaaagaaataagacaactacgaaatttacaagagttagatttgcatcgaaaccaactcacaactctcccaaaagaaatcggacaactacagaatttaaagaccttgaatttgattgttacccagctaacaacccttcccaaagaaataggggagcttcagaatttaaagaccttgaatttgcttgataaccaacttacaactcttcccaaagaaataggggagcttcagaatttagagatcttggttttgcgtgaaaaccggatcacagctcttccgaaagaaatcggacaactacagaatttacaacggttggatttgcatcaaaaccaactcacaactctcccgaaagaaatcggacagctacagaatttacaagagctctgtttagatgagaatcaactcacgactcttccgaaagaaatcgagcaattacaaaacttacgagtcttggatttggataataaccaactcacgactcttccgaaagaaatcggacaattacagaacttgcaagagctctgtttggatgagaatcaactcacaacttttcctaaggaaatcaggcaactgaaaaatttacaagagttgcatttgtatttgaatcctctctcatccaaagaaaaaaaaaggattcgaagattacttccaaaatgtgaaattcattttgaagaatatcatatatag

SEQ ID NO: 35604 - protein, 521 aa, Leptospira interrogans serovar Copenhageni str. Fiocruz L1-130
MNFRITLNYLQKITIGLLFLINLSCKIQAEEVEPEAYQDLTKALQNPLDVRVLILSEQKLTTLPKEIKQLQNLKLLDLGHNQLTALPKEIGQLRNLQELDLSFNSLTTLPKEVGQLENLQRLNLNSQKLTTLPKEIGQLRNLQELDLSFNSLTTLPKEVGQLENLQRLNLNSQKLTTLPKEIGQLRNLQELDLSFNSLTTLPKEVGQLENLQRLNLNSQKLTTLPKEIGQLRNLQELDLSFNSLTTLPKEVGQLENLQRLDLHQNRLATLPMEIGQLKNLQELDLNSNKLTTLPKEIRQLRNLQELDLHRNQLTTLPKEIGQLQNLKTLNLIVTQLTTLPKEIGELQNLKTLNLLDNQLTTLPKEIGELQNLEILVLRENRITALPKEIGQLQNLQRLDLHQNQLTTLPKEIGQLQNLQELCLDENQLTTLPKEIEQLQNLRVLDLDNNQLTTLPKEIGQLQNLQELCLDENQLTTFPKEIRQLKNLQELHLYLNPLSSKEKKRIRRLLPKCEIHFEEYHI

SEQ ID NO: 35605 - DNA, 1134 bp, Leptospira interrogans serovar Copenhageni str. Fiocruz L1-130
  CDS (1)..(1134): transl_table=11
atgaacttccgcataacgttaattcacttacaaaaaattacaattggtcttttgtttctcattcatctttcttacgagattcaagcagaagaaccaggaacttatagagatttaacaaaagcgctccaaaatcctttggaggttcgagttttggatttgagtcgtcaagaactcaaaacccttcctatagaaatcggaaaattgaagaatctgcaaaggttgtatttacattataaccaacttacagttcttccacaagaaatagaacaactgaaaaatttacaattgttgtatttgcgttctaaccgactcactactcttcctaaggaaatcgagcaattgaagaacttgcaagttttggatttgggttctaaccaacttacagttcttccacaagaaatagaacagctgaaaaatttacaattgttgtatttgcattctaaccgactcactactctttctaaagacattgaacaactacagaatttgaaatcgttagatttgagtaataaccaacttacaactcttcctaacgaaatcgagcaattgaaaaacttgaaatcgttgtatttgagtgagaaccaattcgcaacttttcctaaagaaattggacaactacagaatttaaaagtgttgtttttgaataataaccaaatcacaatacttcccaacgaaatcgcaaaactaaaaaagctacaatacttatatttaagcgacaatcaactcataacccttccgaaagaaatagagcaattgaagaacttgcaaacgttggatttgagttataaccaacttacaatacttcctaaggaagtcggacaattagaaaatttgcaaacgttggatttgcgtaataaccaactcaaaactcttccgaaagaaatagagcaattgaagaacttacaaacgttgtttttgagtaataaccaactcacaatacttccacaagaaatcggaaaactgaagaatttgttatggttgagtttggtttataaccaactcactactcttcctaacgaaatcgagcaattgaagaacttacaaacattgtatttaaacaacaaccaattctcatcccaagaaaaaaaaagaattcgaaaacttcttccaaagtgccaaatttactttgactaa

SEQ ID NO: 35606 - protein, 377 aa, Leptospira interrogans serovar Copenhageni str. Fiocruz L1-130
MNFRITLIHLQKITIGLLFLIHLSYEIQAEEPGTYRDLTKALQNPLEVRVLDLSRQELKTLPIEIGKLKNLQRLYLHYNQLTVLPQEIEQLKNLQLLYLRSNRLTTLPKEIEQLKNLQVLDLGSNQLTVLPQEIEQLKNLQLLYLHSNRLTTLSKDIEQLQNLKSLDLSNNQLTTLPNEIEQLKNLKSLYLSENQFATFPKEIGQLQNLKVLFLNNNQITILPNEIAKLKKLQYLYLSDNQLITLPKEIEQLKNLQTLDLSYNQLTILPKEVGQLENLQTLDLRNNQLKTLPKEIEQLKNLQTLFLSNNQLTILPQEIGKLKNLLWLSLVYNQLTTLPNEIEQLKNLQTLYLNNNQFSSQEKKRIRKLLPKCQIYFD

SEQ ID NO: 35607 - DNA, 1281 bp, Leptospira interrogans serovar Copenhageni str. Fiocruz L1-130
  CDS (1)..(1281): transl_table=11
atgaatttccaatccataaacattcgtttaaataaaagactcatgattcttttgattctgatctgtttttcctgcaaactacaagcccaatctaacgaagcgcaaacatattatcgtaatataacagaggctcttaaaaatccacagaatgttcgaattctgaatttgagcggtagcaaactcacaacccttccgggagaaatcggaaaactgcaaaatttacaactgttgaatttagatgataaccaacttatagctcttccgaaagaaattggaaaacttcaaaatttacaacaattgcatttgagtaagaaccaactcatggcgcttccagaagaaatcggacaacttcagaatttacaaaagttgaaattgtatgaaaaccagcttacggccattcccaaagagattggacaactacaaaatttacaagagctgaatttggcacataaccaactcgcaactctaccagaagacatcgaacaattacaaagattacaaacattgtatttgggtcataaccaatttaactccattctcaaagagattggacaattacaaaatttagaatcattaggtttggatcataatcaacttaacgtccttcccaaagaaattggacaacttcgaaatttagaatcattaggtttggatcataaccaacttaacgtccttcccaaagaaattggacaacttcaaaatttacaaatattacatttgcgtaataaccaactcacaactcttcccaaagaaatcgggcagcttcagaatttacaaaagttacttttaaataaaaacaaactcacaactcttcccaaagaaattggtcagcttcagaatttacaaaagttgaaattgtatgaaaaccaacttacaacccttccgaaagagattggacaactacaaaatttacaagagttggatttagatggtaaccaactcacaactctaccagaaaacatcggacaattacagaggttacaaacgttgtatttgggtaataatcaacttaacttccttccaaaagaaattggacaacttcgaaatttagaatcattagatctggagcataaccaacttaacgcccttcccaaagaaattggaaaattgcagaagttgcaaaccctgaatttgaaatataatcaacttgcgactcttcccgaggagatcaaacaactaaagaacttaaaaaagttgtatttgcataacaatccacttccatcggaaaaaatagcaagaattcgaaaattacttccccaatgtattatttattttgaatga

SEQ ID NO: 35608 - protein, 426 aa, Leptospira interrogans serovar Copenhageni str. Fiocruz L1-130
MNFQSINIRLNKRLMILLILICFSCKLQAQSNEAQTYYRNITEALKNPQNVRILNLSGSKLTTLPGEIGKLQNLQLLNLDDNQLIALPKEIGKLQNLQQLHLSKNQLMALPEEIGQLQNLQKLKLYENQLTAIPKEIGQLQNLQELNLAHNQLATLPEDIEQLQRLQTLYLGHNQFNSILKEIGQLQNLESLGLDHNQLNVLPKEIGQLRNLESLGLDHNQLNVLPKEIGQLQNLQILHLRNNQLTTLPKEIGQLQNLQKLLLNKNKLTTLPKEIGQLQNLQKLKLYENQLTTLPKEIGQLQNLQELDLDGNQLTTLPENIGQLQRLQTLYLGNNQLNFLPKEIGQLRNLESLDLEHNQLNALPKEIGKLQKLQTLNLKYNQLATLPEEIKQLKNLKKLYLHNNPLPSEKIARIRKLLPQCIIYFE

SEQ ID NO: 35609 - DNA, 1719 bp, Leptospira interrogans serovar Copenhageni str. Fiocruz L1-130
  CDS (1)..(1719): transl_table=11
atgaactttcgcataacgttgatttacttacaaaagattacaattggtcttttgtttctcattactctttcttgcgagattcaagcagacgaagtaaaaccaggaacttatatggatttaacaaaagcgctccaaaatcctttaaatgttcgagttttggatttgagtggacaaaatttcacaacacttcctaaggaaattgaacaattaaagaatttacaggaattagatttacgtgataaccaactcgcaacttttcctgccgtaatagtagagctacagaagttagaaagtttggatttatctgagaaccggcttgtaatgcttcctaatgaaatagggcggttacaaaatttacaagagttgggtttgtataaaaacaaacttactacttttccaaaggaaatagggcagttacagaatttacaaaagttatggttatctgagaaccgactcacagcacttcctaaggaaattggtcaattgaagaatttacaaacattggatttgcagaataaccaattcacgatacttccaaaagaaataggacaattacagaatttacaaacattgaatttgcaggataaccaactcgcaactcttcctgtcgaaatcggacaactacagaatttacaagagttgtatttgcggaataaccgactcacagttcttccaaaggaaataggacaactacagaatttgcaaacgttatgttcacctgaaaaccgtctcacagcacttcctaaagaaatggggcagctaaaaaatttacaaacattgaatttggtgaataaccgactcacagttcttcctaaggaaatcggacaactacagaatctgcaagatttggaattgctaatgaatcccctttcattaaaagaaagaaaaagaattcaaaagttgtttccagatagtaatcttgatttgagagaagtagcagaggacggtgtttatcgcaatttaaatttggctcaggaagaacctttaaaagtttttgacttgaggcttcaatacaaaaatttttctcaattgtttccaaaagtaattttgaaatttcgaaatttacgagagttgtatttatacgattgtggattttcaactcttccgaaagaaattagccgacttaaaaatttaaagtatttagccttaggcttaaatggtcttaaaaatattccttctgaaatcggccaactgaagaatttagaagctttgaatttagaagcaaacgaattggaaagacttcctaaagaaattgggcaactgcggaatttacagaggttaagtttacatcaaaatacattgaaaatatttcccgccgaaatcgaacaactgaaaaaattgcaaaagttagatttgagcgttaatcaattcacgacttttcctaaggaaatcggaaaattagaaaatttacaaacattgaatttgcagcgtaaccaacttacaaaccttactgccgaaatcggacaactacaaaatttacaagagttggatttaaatgataatcaatttacagttcttcctaaggaaattggaaaactgaaaaaattacaaacattggatttacggaataaccaactcacaacccttcctaccgaaatcggacaactacaaaatttacaatggttgtatttacagaataatcaactttcactcaaagaacaagaaaggattcgaaagttacttccactaaaatgtaaaataatttttgaagtttattag

SEQ ID NO: 35610 - protein, 572 aa, Leptospira interrogans serovar Copenhageni str. Fiocruz L1-130
MNFRITLIYLQKITIGLLFLITLSCEIQADEVKPGTYMDLTKALQNPLNVRVLDLSGQNFTTLPKEIEQLKNLQELDLRDNQLATFPAVIVELQKLESLDLSENRLVMLPNEIGRLQNLQELGLYKNKLTTFPKEIGQLQNLQKLWLSENRLTALPKEIGQLKNLQTLDLQNNQFTILPKEIGQLQNLQTLNLQDNQLATLPVEIGQLQNLQELYLRNNRLTVLPKEIGQLQNLQTLCSPENRLTALPKEMGQLKNLQTLNLVNNRLTVLPKEIGQLQNLQDLELLMNPLSLKERKRIQKLFPDSNLDLREVAEDGVYRNLNLAQEEPLKVFDLRLQYKNFSQLFPKVILKFRNLRELYLYDCGFSTLPKEISRLKNLKYLALGLNGLKNIPSEIGQLKNLEALNLEANELERLPKEIGQLRNLQRLSLHQNTLKIFPAEIEQLKKLQKLDLSVNQFTTFPKEIGKLENLQTLNLQRNQLTNLTAEIGQLQNLQELDLNDNQFTVLPKEIGKLKKLQTLDLRNNQLTTLPTEIGQLQNLQWLYLQNNQLSLKEQERIRKLLPLKCKIIFEVY

SEQ ID NO: 35611 - DNA, 1272 bp, Leptospira interrogans serovar Copenhageni str. Fiocruz L1-130
  CDS (1)..(1272): transl_table=11
atgaattatagatttacaaacatcctaaaggttataattttcttttgttttattttcgaaatacaatcagaagaaatacaaaaaccttataaaaatttagcaaaggctcttcaaaatccagcagacgttcggaacttagatttgagtttccaagggttgaagacgttgccaaataaaataggacaacttaagaatttacaaaaattggatttaggcggaaacgaacctacgattttgtctaaagaaatctggcagttaaaagatctgcaaaaattgaatttgaacaataacaaacttacggttctccctaaggaaatcggacaattacaaaacttgcaagaattaagtttgcatagcaatgagctcgtaaatcttccgaaagaaattggacagtttaagaatttgcaaaaactaaatttggacaataataaacttacggttctccctaaggaaatcggacaattacaaaacttgcaagaattgagtttacttagtaacaaactcataagtcttcccacagaaattgaacaacttaaaagtctgaagaatctagatttgaatcacaatgaatttactactgtttcgaaagaagttatgctacttgaaactttagaaaatttagatctaagatccaacaaactgaaaacaattcctaaagagataagacaacttaaaagtttgaaagtgttgatgttaactggcaatcaacttacctctttgccgaaagaaatcgaacaactccaaaatctaaaaacattaaatttgggagaaaatcgttttcaaatatttcccgtagaaattttagaacttaagaatttactggaattgaatttgtattataaccaacttgtagagtttccgaaggaagttggacaacttaaaagtttaaagtatttgagtttgtatcacaatcaaattacaactcttccggtagaagttacacaattgccggatttgcaagagctgcatttgtctgggaataaaattacgattcttccaaaagagattctacaacttaaaaatttagaatggctgtcattgagtaacaataaactcaatgcgcttccgaaagaaatcggacagttgaaaaaattacaaaggttggaattaggaaacaatcagcttacgacccttccgaaagaaatagaacaacttaaaaatttacaaagattagaattagattccaatcccatttctccaaaagaaaaagaaagaatccgaaaacttcttcctaaatgtgaaatcgattttgaaggagggggaggagaatag

SEQ ID NO: 35612 - protein, 423 aa, Leptospira interrogans serovar Copenhageni str. Fiocruz L1-130
MNYRFTNILKVIIFFCFIFEIQSEEIQKPYKNLAKALQNPADVRNLDLSFQGLKTLPNKIGQLKNLQKLDLGGNEPTILSKEIWQLKDLQKLNLNNNKLTVLPKEIGQLQNLQELSLHSNELVNLPKEIGQFKNLQKLNLDNNKLTVLPKEIGQLQNLQELSLLSNKLISLPTEIEQLKSLKNLDLNHNEFTTVSKEVMLLETLENLDLRSNKLKTIPKEIRQLKSLKVLMLTGNQLTSLPKEIEQLQNLKTLNLGENRFQIFPVEILELKNLLELNLYYNQLVEFPKEVGQLKSLKYLSLYHNQITTLPVEVTQLPDLQELHLSGNKITILPKEILQLKNLEWLSLSNNKLNALPKEIGQLKKLQRLELGNNQLTTLPKEIEQLKNLQRLELDSNPISPKEKERIRKLLPKCEIDFEGGGGE

SEQ ID NO: 35613 - DNA, 819 bp, Leptospira interrogans serovar Copenhageni str. Fiocruz L1-130
  CDS (1)..(819): transl_table=11
atgaagtgccactttatatttgttagcattggattgatcttgtctttgtactgtagtctgaaaatgacaaaaacgtatcataatttgcaggatgctcttgataaccctttggacgttttaattcttgagatgagtatgaatacgcgtataagtatgggtttgcatgaactcgaatctcttccaagggtaattgggttatttcaaaatttagaaaaattgaatttagatggtaatcaacttacgtctcttccgaaagaaattggacaacttcaaaagttacgtgtattaaacttggctggtaatcaatttacgtcccttccaaaagaaataggacaacttcaaaatttagaaagattggatttagatggtaatcaatttacgtctcttccgaaagaaattggacaacttcaaaatttacgtgtattaaacttggctggtaatcaacttacgtcccttccaaaagaaataggacaacttcaaaatttagaaagattggatttagctggtaatcaatttacgtcccttccaaaagaaataggacaacttcaaaagttagaagcattgaatttagatcataatcgatttacaatttttccgaaagaaattaggcagcaacagagcctaaaatggttgcgtttgagtggggaccaactcaagacccttcccaaagaaattctattacttcaaaatttacaagtgctgcggttgtattcgaactctttttcattaaaagaaaaacagaaaattcaagagctacttcctaactgtgaaatcgattttgaaagtgaaggtaaaagcgaatcttctttgactgaatga

SEQ ID NO: 35614 - protein, 272 aa, Leptospira interrogans serovar Copenhageni str. Fiocruz L1-130
MKCHFIFVSIGLILSLYCSLKMTKTYHNLQDALDNPLDVLILEMSMNTRISMGLHELESLPRVIGLFQNLEKLNLDGNQLTSLPKEIGQLQKLRVLNLAGNQFTSLPKEIGQLQNLERLDLDGNQFTSLPKEIGQLQNLRVLNLAGNQLTSLPKEIGQLQNLERLDLAGNQFTSLPKEIGQLQKLEALNLDHNRFTIFPKEIRQQQSLKWLRLSGDQLKTLPKEILLLQNLQVLRLYSNSFSLKEKQKIQELLPNCEIDFESEGKSESSLTE

SEQ ID NO: 35615 - DNA, 1320 bp, Caenorhabditis briggsae
  CDS (1)..(1320)
atgggtgttgattcatataatccaactgtgcgtgcacgcctcacaaatgcaccgaaaacacgggttctgaacttgaaggaatctgctctccatcgagttcctgataatctcagtttgctaccctgtctagaagtgctgaaagtttcacaaaacaaactcacagatcttcccgatctttcaaagtgtgttctattgaaaactgtggaagcaagtgaaaatcatttcactgctttcccattgggtgtttgtcattctcctagtctcgaaacatgcatattcacagacaaccgaattgaaagttttcctgacgaaattcattcactgcgggcaatcagcttgatcctcaacaaaaaccggcttctctcactcaacaccgttaatttgctgcgctgtgaacgattgcgcgctgtgaacgttgacgataaccaactgaatcacgatgaaatcgagcaattcgttgctaacgctccacgagaaattcgaatttcgttcgatggaaatgtggctccaaaacatacggctgatttgcaggaaatgggcaatgactcctcgaaatcaaagtccgtcaccagcaatgcccgcaaactcattggtcagtcgggtccttccacatcaactgttaataaacaccttgagatggcaagcaaaagtcgagttctacaactgaagggaactggactgaagaaaattcctgatgaagtagagcagttagcaggagtattgcggaacttggagttgagcgagaacaaaatccgcgagataccggttttcatcggactgttctcacaattaaaacaacttcatttatccaataactgcctagaaagtttaccagatgaaattggttcaatgaaaaaactagaaattttgaaccttggaggtaacaaaatcaagaacctaccagatacgatagctggatgtacggacttgcgaacgattgatgtctcctctaactctttttcggagtttcctatttctattattgcctgtttgcaacttgatatactaaacttgaatgaaaatcaaattgaaacacttcctgatgacgtatcaaaattgcaagtcattgaactcagtctcagccagaatcgtctaaaaactttgaattcatcgaacctctcaaaatctcatcgacttcgcactctccgagtggatggaaactgtctagaaaaaactgagtttgctcgtgatcttctcgaatcttctactgtgtccgttatcacttatgatgggaaccgtttccagttgaaagatttccaagacttgcccggatatgatgcttatcaagaacgattcaccgctactaaaagaaagatttaa

SEQ ID NO: 35616 - protein, 439 aa, Caenorhabditis briggsae
MGVDSYNPTVRARLTNAPKTRVLNLKESALHRVPDNLSLLPCLEVLKVSQNKLTDLPDLSKCVLLKTVEASENHFTAFPLGVCHSPSLETCIFTDNRIESFPDEIHSLRAISLILNKNRLLSLNTVNLLRCERLRAVNVDDNQLNHDEIEQFVANAPREIRISFDGNVAPKHTADLQEMGNDSSKSKSVTSNARKLIGQSGPSTSTVNKHLEMASKSRVLQLKGTGLKKIPDEVEQLAGVLRNLELSENKIREIPVFIGLFSQLKQLHLSNNCLESLPDEIGSMKKLEILNLGGNKIKNLPDTIAGCTDLRTIDVSSNSFSEFPISIIACLQLDILNLNENQIETLPDDVSKLQVIELSLSQNRLKTLNSSNLSKSHRLRTLRVDGNCLEKTEFARDLLESSTVSVITYDGNRFQLKDFQDLPGYDAYQERFTATKRKI

SEQ ID NO: 35617 - DNA, 720 bp, Homo sapiens
  CDS (1)..(720)
atgggaaacagtgcgctccgcgctcatgtggaaacggcgcagaaaactggtgtctttcagcttaaggaccgagggctgaccgagttccccgcagacttgcagaagctgacgagcaatctcaggaccatcgacttgtccaacaacaagatcgaaagcctaccgcctttgctgataggaaagttcactctgctgaagagcctctccctgaacagcaacaaactgactgttctgcctgatgagatatgcaatctgaaaaaactagagacgctaagcctaaacaacaatcaccttagagagctgccgtctacctttgggcaactctctgccctcaagaccctgagcctctctgggaaccaactgggagcattacctccccaactttgtagcctacggcacctggatgtgatggatctctctaagaaccagattcgaagtatacctgactcagtgggagagctgcaagtcatcgaactcaacctcaaccagaatcagatatctcagatctcagtgaagatatcttgctgtccacgccttaaaattcttcgcctggaagagaattgtcttgagctcagcatgcttccccagagcatcctcagtgattcccagatctgtctgcttgctgtggaaggcaatctttttgaaataaagaaacttcgagaactggaaggctatgataagtacatggagaggttcacagccaccaagaagaagtttgcgtga

SEQ ID NO: 35618 - protein, 239 aa, Homo sapiens
MGNSALRAHVETAQKTGVFQLKDRGLTEFPADLQKLTSNLRTIDLSNNKIESLPPLLIGKFTLLKSLSLNSNKLTVLPDEICNLKKLETLSLNNNHLRELPSTFGQLSALKTLSLSGNQLGALPPQLCSLRHLDVMDLSKNQIRSIPDSVGELQVIELNLNQNQISQISVKISCCPRLKILRLEENCLELSMLPQSILSDSQICLLAVEGNLFEIKKLRELEGYDKYMERFTATKKKFA

SEQ ID NO: 35619 - DNA, 720 bp, Homo sapiens
  CDS (1)..(720)
atgggaaacagtgcgctccgcgctcatgtggaaacggcgcagaaaactggtgtctttcagcttaaggaccgagggctgaccgagttccccgcagacttgcagaagctgacgagcaatctcaggaccatcgacttgtccaacaacaagatcgaaagcctaccgcctttgctgataggaaagttcactctgctgaagagcctctccctgaacaacaacaaactgactgttctgcctgatgagatatgcaatctgaaaaaactagagacgctaagcctaaacaacaatcaccttagagagctgccgtctacctttgggcaactctctgccctcaagaccctgagcctctctgggaaccaactgggagcattacctccccaactttgtagcctacggcacctggatgtgatggatctctctaagaaccagattcgaagtatacctgactcagtgggagagctgcaagtcatcgaactcaacctcaaccagaatcagatatctcagatctcagtgaagatatcttgctgtccacgccttaaaattcttcgcctggaagagaattgtcttgagctcagcatgcttccccagagcatcctcagtgattcccagatctgtctgcttgctgtggaaggcaatctttttgaaataaagaaacttcgagaactggaaggctatgataagtacatggagaggttcacagccaccaagaagaagtttgcgtga

SEQ ID NO: 35620 - protein, 239 aa, Homo sapiens
MGNSALRAHVETAQKTGVFQLKDRGLTEFPADLQKLTSNLRTIDLSNNKIESLPPLLIGKFTLLKSLSLNNNKLTVLPDEICNLKKLETLSLNNNHLRELPSTFGQLSALKTLSLSGNQLGALPPQLCSLRHLDVMDLSKNQIRSIPDSVGELQVIELNLNQNQISQISVKISCCPRLKILRLEENCLELSMLPQSILSDSQICLLAVEGNLFEIKKLRELEGYDKYMERFTATKKKFA

SEQ ID NO: 35621 - DNA, 24 bp, Artificial sequence
  Primer sequence
atggtagcgacatcttcaaagagg

SEQ ID NO: 35622 - DNA, 23 bp, Artificial sequence
  Primer sequence
ttactccggagagttggcgctta

SEQ ID NO: 35623 - protein, 380 aa, Artificial sequence
  Consensus
  Variant (2)..(9): Xaa in position 2 to 9 is any amino acid
  Variant (10)..(11): Xaa in position 10 to 11 is any or no amino acid
  Variant (13)..(13): Xaa in position 13 is any amino acid
  Variant (15)..(18): Xaa in position 15 to 18 is any amino acid
  Variant (20)..(21): Xaa in position 20 to 21 is any amino acid
  Variant (24)..(24): Xaa in position 24 is any amino acid
  Variant (27)..(28): Xaa in position 27 to 28 is any amino acid
  Variant (30)..(31): Xaa in position 30 to 31 is any amino acid
  Variant (32)..(33): Xaa in position 32 to 33 is any or no amino acid
  Variant (35)..(36): Xaa in position 35 to 36 is any amino acid
  Variant (38)..(38): Xaa in position 38 is any amino acid
  Variant (40)..(41): Xaa in position 40 to 41 is any amino acid
  Variant (43)..(45): Xaa in position 43 to 45 is any or no amino acid
  Variant (47)..(52): Xaa in position 47 to 52 is any amino acid
  Variant (53)..(53): Xaa in position 53 is any or no amino acid
  Variant (55)..(59): Xaa in position 55 to 59 is any amino acid
  Variant (61)..(62): Xaa in position 61 to 62 is any amino acid
  Variant (64)..(64): Xaa in position 64 is any amino acid
  Variant (66)..(67): Xaa in position 66 to 67 is any amino acid
  Variant (69)..(75): Xaa in position 69 to 75 is any amino acid
  Variant (76)..(90): Xaa in position 76 to 90 is any or no amino acid
  Variant (93)..(94): Xaa in position 93 to 94 is any amino acid
  Variant (96)..(97): Xaa in position 96 to 97 is any amino acid
  Variant (99)..(105): Xaa in position 99 to 105 is any amino acid
  Variant (106)..(128): Xaa in position 106 to 128 is any or no amino acid
  Variant (130)..(137): Xaa in position 130 to 137 is any amino acid
  Variant (139)..(143): Xaa in position 139 to 143 is any amino acid
  Variant (145)..(151): Xaa in position 145 to 151 is any amino acid
  Variant (153)..(166): Xaa in position 153 to 166 is any amino acid
  Variant (167)..(214): Xaa in position 167 to 214 is any or no amino acid
  Variant (216)..(217): Xaa in position 216 to 217 is any amino acid
  Variant (219)..(219): Xaa in position 219 is any amino acid
  Variant (221)..(221): Xaa in position 221 is any amino acid
  Variant (222)..(222): Xaa in position 222 is any or no amino acid
  Variant (224)..(228): Xaa in position 224 to 228 is any amino acid
  Variant (229)..(265): Xaa in position 229 to 265 is any or no amino acid
  Variant (267)..(268): Xaa in position 267 to 268 is any amino acid
  Variant (270)..(271): Xaa in position 270 to 271 is any amino acid
  Variant (273)..(274): Xaa in position 273 to 274 is any amino acid
  Variant (276)..(296): Xaa in position 276 to 296 is any amino acid
  Variant (297)..(311): Xaa in position 297 to 311 is any or no amino acid
  Variant (313)..(314): Xaa in position 313 to 314 is any amino acid
  Variant (316)..(337): Xaa in position 316 to 337 is any amino acid
  Variant (338)..(364): Xaa in position 338 to 364 is any or no amino acid
  Variant (366)..(378): Xaa in position 366 to 378 is any amino acid
  Variant (379)..(379): Xaa in position 379 is any or no amino acid
IXXXXXXXXXXLXLXXXXLXXLPXEIXXLXXXXLXXLXLXXNXXXLXXXXXXXIXXXXXLXXLXLXXNXXXXXXXXXXXXXXXXXXXXXXEIXXLXXLXXXXXXXXXXXXXXXXXXXXXXXXXXXXXXNXXXXXXXXIXXXXXLXXXXXXXNXXXXXXXXXXXXXXXXXXXXXXXXXXXXXXXXXXXXXXXXXXXXXXXXXXXXXXXXXXXXXXLXXLXLXXNXXXXXXXXXXXXXXXXXXXXXXXXXXXXXXXXXXXXXXXXXXPXXIXXLXXLXXXXXXXXXXXXXXXXXXXXXXXXXXXXXXXXXXXXLXXLXXXXXXXXXXXXXXXXXXXXXXXXXXXXXXXXXXXXXXXXXXXXXXXXXLXXXXXXXXXXXXXXI

SEQ ID NO: 35624 - protein, 46 aa, Artificial sequence
  Consensus
  Variant (2)..(4): Xaa in position 2 to 4 is any or no amino acid
  Variant (6)..(13): Xaa in position 6 to 13 is any amino acid
  Variant (14)..(14): Xaa in position 14 is any or no amino acid
  Variant (16)..(17): Xaa in position 16 to 17 is any amino acid
  Variant (18)..(18): Xaa in position 18 is Phe, Ile, Leu or Val
  Variant (19)..(19): Xaa in position 19 is any amino acid
  Variant (20)..(20): Xaa in position 20 is Ile, Leu or Val
  Variant (21)..(22): Xaa in position 21 to 22 is any amino acid
  Variant (24)..(24): Xaa in position 24 is any amino acid
  Variant (25)..(25): Xaa in position 25 is Phe, Ile or Leu
  Variant (26)..(27): Xaa in position 26 to 27 is any amino acid
  Variant (28)..(28): Xaa in position 28 is Phe, Ile, Leu or Val
  Variant (29)..(29): Xaa in position 29 is Pro or Ser
  Variant (30)..(31): Xaa in position 30 to 31 is any amino acid
  Variant (32)..(32): Xaa in position 32 is Ile, Leu or Val
  Variant (33)..(37): Xaa in position 33 to 37 is any amino acid
  Variant (39)..(45): Xaa in position 39 to 45 is any amino acid
  Variant (46)..(46): Xaa in position 46 is Asn or Ser
LXXXPXXXXXXXXXLXXXXXXXNXXXXXXXXXXXXXXLXXXXXXXX

SEQ ID NO: 35625 - DNA, 1392 bp, Escherichia coli K12; identical to SEQ ID NO: 28298
  CDS (1)..(1392): transl_table=11

SEQ ID NO: 35626 - protein, 463 aa, Escherichia coli K12; identical to SEQ ID NO: 28299

SEQ ID NO: 35627 - DNA, 1428 bp, Aquifex aeolicus VF5; identical to SEQ ID NO: 28300
  CDS (1)..(1428): transl_table=11

SEQ ID NO: 35628 - protein, 475 aa, Aquifex aeolicus VF5; identical to SEQ ID NO: 28301

SEQ ID NO: 35629 - DNA, 1212 bp, Pseudomonas aeruginosa PAO1; identical to SEQ ID NO: 28302
  CDS (1)..(1212): transl_table=11

SEQ ID NO: 35630 - protein, 403 aa, Pseudomonas aeruginosa PAO1; identical to SEQ ID NO: 28303

SEQ ID NO: 35631 - DNA, 1407 bp, Pseudomonas aeruginosa PAO1; identical to SEQ ID NO: 28304
  CDS (1)..(1407): transl_table=11

SEQ ID NO: 35632 - protein, 468 aa, Pseudomonas aeruginosa PAO1; identical to SEQ ID NO: 28305

SEQ ID NO: 35633 - DNA, 1296 bp, Pseudomonas aeruginosa PAO1; identical to SEQ ID NO: 28306
  CDS (1)..(1296): transl_table=11

SEQ ID NO: 35634 - protein, 431 aa, Pseudomonas aeruginosa PAO1; identical to SEQ ID NO: 28307

SEQ ID NO: 35635 - DNA, 1554 bp, Mycobacterium leprae TN; identical to SEQ ID NO: 28308
  CDS (1)..(1554): transl_table=11

SEQ ID NO: 35636 - protein, 517 aa, Mycobacterium leprae TN; identical to SEQ ID NO: 28309

SEQ ID NO: 35637 - DNA, 1389 bp, Escherichia coli O157:H7; identical to SEQ ID NO: 28310
  CDS (1)..(1389): transl_table=11

SEQ ID NO: 35638 - protein, 462 aa, Escherichia coli O157:H7; identical to SEQ ID NO: 28311

SEQ ID NO: 35639 - DNA, 1410 bp, Mycobacterium tuberculosis CDC1551; identical to SEQ ID NO: 28312
  CDS (1)..(1410): transl_table=11

SEQ ID NO: 35640 - protein, 469 aa, Mycobacterium tuberculosis CDC1551; identical to SEQ ID NO: 28313

SEQ ID NO: 35641 - DNA, 1392 bp, Mycobacterium tuberculosis CDC1551; identical to SEQ ID NO: 28314
  CDS (1)..(1392): transl_table=11

SEQ ID NO: 35642 - protein, 463 aa, Mycobacterium tuberculosis CDC1551; identical to SEQ ID NO: 28315

SEQ ID NO: 35643 - DNA, 1188 bp, Mycobacterium tuberculosis CDC1551; identical to SEQ ID NO: 28316
  CDS (1)..(1188): transl_table=11

SEQ ID NO: 35644 - protein, 395 aa, Mycobacterium tuberculosis CDC1551; identical to SEQ ID NO: 28317

SEQ ID NO: 35645 - DNA, 1548 bp, Mycobacterium tuberculosis CDC1551; identical to SEQ ID NO: 28318
  CDS (1)..(1548): transl_table=11

SEQ ID NO: 35646 - protein, 515 aa, Mycobacterium tuberculosis CDC1551; identical to SEQ ID NO: 28319

SEQ ID NO: 35647 - DNA, 1170 bp, Staphylococcus aureus subsp. aureus Mu50; identical to SEQ ID NO: 28320
  CDS (1)..(1170): transl_table=11

SEQ ID NO: 35648 - protein, 389 aa, Staphylococcus aureus subsp. aureus Mu50; identical to SEQ ID NO: 28321

SEQ ID NO: 35649 - DNA, 1422 bp, Caulobacter crescentus CB15; identical to SEQ ID NO: 28322
  CDS (1)..(1422): transl_table=11

SEQ ID NO: 35650 - protein, 473 aa, Caulobacter crescentus CB15; identical to SEQ ID NO: 28323

SEQ ID NO: 35651 - DNA, 1275 bp, Sinorhizobium meliloti 1021; identical to SEQ ID NO: 28324
  CDS (1)..(1275): transl_table=11

SEQ ID NO: 35652 - protein, 424 aa, Sinorhizobium meliloti 1021; identical to SEQ ID NO: 28325

SEQ ID NO: 35653 - DNA, 1398 bp, Salmonella typhimurium LT2; identical to SEQ ID NO: 28326
  CDS (1)..(1398): transl_table=11

SEQ ID NO: 35654 - protein, 465 aa, Salmonella typhimurium LT2; identical to SEQ ID NO: 28327

SEQ ID NO: 35655 - DNA, 1314 bp, Ralstonia solanacearum GMI1000; identical to SEQ ID NO: 28328
  CDS (1)..(1314): transl_table=11

SEQ ID NO: 35656 - protein, 437 aa, Ralstonia solanacearum GMI1000; identical to SEQ ID NO: 28329

SEQ ID NO: 35657 - DNA, 1386 bp, Ralstonia solanacearum GMI1000; identical to SEQ ID NO: 28330
  CDS (1)..(1386): transl_table=11

SEQ ID NO: 35658 - protein, 461 aa, Ralstonia solanacearum GMI1000; identical to SEQ ID NO: 28331

SEQ ID NO: 35659 - DNA, 2856 bp, Brucella melitensis 16M; identical to SEQ ID NO: 28332
  CDS (1)..(2856): transl_table=11

SEQ ID NO: 35660 - protein, 951 aa, Brucella melitensis 16M; identical to SEQ ID NO: 28333

SEQ ID NO: 35661 - DNA, 1293 bp, Clostridium perfringens str. 13; identical to SEQ ID NO: 28334
  CDS (1)..(1293): transl_table=11

SEQ ID NO: 35662 - protein, 430 aa, Clostridium perfringens str. 13; identical to SEQ ID NO: 28335

SEQ ID NO: 35663 - DNA, 1338 bp, Corynebacterium glutamicum ATCC 13032; identical to SEQ ID NO: 28336
  CDS (1)..(1338): transl_table=11

SEQ ID NO: 35664 - protein, 445 aa, Corynebacterium glutamicum ATCC 13032; identical to SEQ ID NO: 28337

SEQ ID NO: 35665 - DNA, 1239 bp, Streptomyces coelicolor A3(2); identical to SEQ ID NO: 28338
  CDS (1)..(1239): transl_table=11

SEQ ID NO: 35666 - protein, 412 aa, Streptomyces coelicolor A3(2); identical to SEQ ID NO: 28339

SEQ ID NO: 35667 - DNA, 1359 bp, Streptomyces coelicolor A3(2); identical to SEQ ID NO: 28340
  CDS (1)..(1359): transl_table=11

SEQ ID NO: 35668 - protein, 452 aa, Streptomyces coelicolor A3(2); identical to SEQ ID NO: 28341

SEQ ID NO: 35669 - DNA, 1236 bp, Xanthomonas campestris pv. campestris str. ATCC 33913; identical to SEQ ID NO: 28342
  CDS (1)..(1236): transl_table=11

SEQ ID NO: 35670 - protein, 411 aa, Xanthomonas campestris pv. campestris str. ATCC 33913; identical to SEQ ID NO: 28343

SEQ ID NO: 35671 - DNA, 2688 bp, Brucella suis 1330; identical to SEQ ID NO: 28344
  CDS (1)..(2688): transl_table=11

SEQ ID NO: 35672 - protein, 895 aa, Brucella suis 1330; identical to SEQ ID NO: 28345

SEQ ID NO: 35673 - DNA, 1389 bp, Shigella flexneri 2a str. 301; identical to SEQ ID NO: 28346
  CDS (1)..(1389): transl_table=11

SEQ ID NO: 35674 - protein, 462 aa, Shigella flexneri 2a str. 301; identical to SEQ ID NO: 28347

SEQ ID NO: 35675 - DNA, 1434 bp, Corynebacterium efficiens YS-314; identical to SEQ ID NO: 28348
  CDS (1)..(1434): transl_table=11

SEQ ID NO: 35676 - protein, 477 aa, Corynebacterium efficiens YS-314; identical to SEQ ID NO: 28349

SEQ ID NO: 35677 - DNA, 1302 bp, Corynebacterium efficiens YS-314; identical to SEQ ID NO: 28350
  CDS (1)..(1302): transl_table=11

SEQ ID NO: 35678 - protein, 433 aa, Corynebacterium efficiens YS-314; identical to SEQ ID NO: 28351

SEQ ID NO: 35679 - DNA, 1236 bp, Pseudomonas putida KT2440; identical to SEQ ID NO: 28352
  CDS (1)..(1236): transl_table=11

SEQ ID NO: 35680 - protein, 411 aa, Pseudomonas putida KT2440; identical to SEQ ID NO: 28353

SEQ ID NO: 35681 - DNA, 1164 bp, Staphylococcus epidermidis ATCC 12228; identical to SEQ ID NO: 28354
  CDS (1)..(1164): transl_table=11

SEQ ID NO: 35682 - protein, 387 aa, Staphylococcus epidermidis ATCC 12228; identical to SEQ ID NO: 28355

SEQ ID NO: 35683 - DNA, 1380 bp, Bradyrhizobium japonicum USDA 110; identical to SEQ ID NO: 28356
  CDS (1)..(1380): transl_table=11

SEQ ID NO: 35684 - protein, 459 aa, Bradyrhizobium japonicum USDA 110; identical to SEQ ID NO: 28357

SEQ ID NO: 35685 - DNA, 1191 bp, Lactobacillus plantarum WCFS1; identical to SEQ ID NO: 28358
  CDS (1)..(1191): transl_table=11

SEQ ID NO: 35686 - protein, 396 aa, Lactobacillus plantarum WCFS1; identical to SEQ ID NO: 28359

SEQ ID NO: 35687 - DNA, 1212 bp, Pseudomonas syringae pv. tomato str. DC3000; identical to SEQ ID NO: 28360
  CDS (1)..(1212): transl_table=11

SEQ ID NO: 35688 - protein, 403 aa, Pseudomonas syringae pv. tomato str. DC3000; identical to SEQ ID NO: 28361

SEQ ID NO: 35689 - DNA, 1389 bp, Salmonella enterica subsp. enterica serovar Typhi Ty2; identical to SEQ ID NO: 28362
  CDS (1)..(1389): transl_table=11

SEQ ID NO: 35690 - protein, 462 aa, Salmonella enterica subsp. enterica serovar Typhi Ty2; identical to SEQ ID NO: 28363

SEQ ID NO: 35691 - DNA, 1392 bp, Streptomyces avermitilis MA-4680; identical to SEQ ID NO: 28364
  CDS (1)..(1392): transl_table=11

SEQ ID NO: 35692 - protein, 463 aa, Streptomyces avermitilis MA-4680; identical to SEQ ID NO: 28365

SEQ ID NO: 35693 - DNA, 1170 bp, Bacillus cereus ATCC 14579; identical to SEQ ID NO: 28366
  CDS (1)..(1170): transl_table=11

SEQ ID NO: 35694 - protein, 389 aa, Bacillus cereus ATCC 14579; identical to SEQ ID NO: 28367

SEQ ID NO: 35695 - DNA, 1389 bp, Shigella flexneri 2a str. 2457T; identical to SEQ ID NO: 28368
  CDS (1)..(1389): transl_table=11

SEQ ID NO: 35696 - protein, 462 aa, Shigella flexneri 2a str. 2457T; identical to SEQ ID NO: 28369

SEQ ID NO: 35697 - DNA, 1203 bp, Chromobacterium violaceum ATCC 12472; identical to SEQ ID NO: 28370
  CDS (1)..(1203): transl_table=11

SEQ ID NO: 35698 - protein, 400 aa, Chromobacterium violaceum ATCC 12472; identical to SEQ ID NO: 28371

SEQ ID NO: 35699 - DNA, 1380 bp, Chromobacterium violaceum ATCC 12472; identical to SEQ ID NO: 28372
  CDS (1)..(1380): transl_table=11

SEQ ID NO: 35700 - protein, 459 aa, Chromobacterium violaceum ATCC 12472; identical to SEQ ID NO: 28373

SEQ ID NO: 35701 - DNA, 1284 bp, Chromobacterium violaceum ATCC 12472; identical to SEQ ID NO: 28374
  CDS (1)..(1284): transl_table=11

SEQ ID NO: 35702 - protein, 427 aa, Chromobacterium violaceum ATCC 12472; identical to SEQ ID NO: 28375

SEQ ID NO: 35703 - DNA, 1380 bp, Chromobacterium violaceum ATCC 12472; identical to SEQ ID NO: 28376
  CDS (1)..(1380): transl_table=11

SEQ ID NO: 35704 - protein, 459 aa, Chromobacterium violaceum ATCC 12472; identical to SEQ ID NO: 28377

SEQ ID NO: 35705 - DNA, 1332 bp, Corynebacterium diphtheriae NCTC 13129; identical to SEQ ID NO: 28378
  CDS (1)..(1332): transl_table=11

SEQ ID NO: 35706 - protein, 443 aa, Corynebacterium diphtheriae NCTC 13129; identical to SEQ ID NO: 28379

SEQ ID NO: 35707 - DNA, 1299 bp, Corynebacterium diphtheriae NCTC 13129; identical to SEQ ID NO: 28380
  CDS (1)..(1299): transl_table=11

SEQ ID NO: 35708 - protein, 432 aa, Corynebacterium diphtheriae NCTC 13129; identical to SEQ ID NO: 28381

SEQ ID NO: 35709 - DNA, 1281 bp, Cupriavidus necator; identical to SEQ ID NO: 28382
  CDS (1)..(1281): transl_table=11

SEQ ID NO: 35710 - protein, 426 aa, Cupriavidus necator; identical to SEQ ID NO: 28383

SEQ ID NO: 35711 - DNA, 1395 bp, Cupriavidus necator; identical to SEQ ID NO: 28384
  CDS (1)..(1395): transl_table=11

SEQ ID NO: 35712 - protein, 464 aa, Cupriavidus necator; identical to SEQ ID NO: 28385

SEQ ID NO: 35713 - DNA, 1458 bp, Mycobacterium avium subsp. paratuberculosis K-10; identical to SEQ ID NO: 28386
  CDS (1)..(1458): transl_table=11

SEQ ID NO: 35714 - protein, 485 aa, Mycobacterium avium subsp. paratuberculosis K-10; identical to SEQ ID NO: 28387

SEQ ID NO: 35715 - DNA, 1392 bp, Mycobacterium avium subsp. paratuberculosis K-10; identical to SEQ ID NO: 28388
  CDS (1)..(1392): transl_table=11

SEQ ID NO: 35716 - protein, 463 aa, Mycobacterium avium subsp. paratuberculosis K-10; identical to SEQ ID NO: 28389

SEQ ID NO: 35717 - DNA, 1392 bp, Mycobacterium avium subsp. paratuberculosis K-10; identical to SEQ ID NO: 28390
  CDS (1)..(1392): transl_table=11

SEQ ID NO: 35718 - protein, 463 aa, Mycobacterium avium subsp. paratuberculosis K-10; identical to SEQ ID NO: 28391

SEQ ID NO: 35719 - DNA, 1170 bp, Bacillus anthracis str. Sterne; identical to SEQ ID NO: 28392
  CDS (1)..(1170): transl_table=11

SEQ ID NO: 35720 - protein, 389 aa, Bacillus anthracis str. Sterne; identical to SEQ ID NO: 28393

SEQ ID NO: 35721 - DNA, 1170 bp, Bacillus thuringiensis serovar konkukian str. 97-27; identical to SEQ ID NO: 28394
  CDS (1)..(1170): transl_table=11

SEQ ID NO: 35722 - protein, 389 aa, Bacillus thuringiensis serovar konkukian str. 97-27; identical to SEQ ID NO: 28395

SEQ ID NO: 35723 - DNA, 1170 bp, Staphylococcus aureus subsp. aureus MRSA252; identical to SEQ ID NO: 28396
  CDS (1)..(1170): transl_table=11

SEQ ID NO: 35724 - protein, 389 aa, Staphylococcus aureus subsp. aureus MRSA252; identical to SEQ ID NO: 28397

SEQ ID NO: 35725 - DNA, 1170 bp, Staphylococcus aureus subsp. aureus MSSA476; identical to SEQ ID NO: 28398
  CDS (1)..(1170): transl_table=11

SEQ ID NO: 35726 - protein, 389 aa, Staphylococcus aureus subsp. aureus MSSA476; identical to SEQ ID NO: 28399

SEQ ID NO: 35727 - DNA, 1389 bp, Erwinia carotovora subsp. atroseptica SCRI1043; identical to SEQ ID NO: 28400
  CDS (1)..(1389): transl_table=11

SEQ ID NO: 35728 - protein, 462 aa, Erwinia carotovora subsp. atroseptica SCRI1043; identical to SEQ ID NO: 28401

SEQ ID NO: 35729 - DNA, 1317 bp, Propionibacterium acnes KPA171202; identical to SEQ ID NO: 28402
  CDS (1)..(1317): transl_table=11

SEQ ID NO: 35730 - protein, 438 aa, Propionibacterium acnes KPA171202; identical to SEQ ID NO: 28403

SEQ ID NO: 35731 - DNA, 1206 bp, Bacillus licheniformis ATCC 14580; identical to SEQ ID NO: 28404
  CDS (1)..(1206): transl_table=11

SEQ ID NO: 35732 - protein, 401 aa, Bacillus licheniformis ATCC 14580; identical to SEQ ID NO: 28405

SEQ ID NO: 35733 - DNA, 1185 bp, Bacillus licheniformis ATCC 14580; identical to SEQ ID NO: 28406
  CDS (1)..(1185): transl_table=11

SEQ ID NO: 35734 - protein, 394 aa, Bacillus licheniformis ATCC 14580; identical to SEQ ID NO: 28407

SEQ ID NO: 35735 - DNA, 1230 bp, Burkholderia mallei ATCC 23344; identical to SEQ ID NO: 28408
  CDS (1)..(1230): transl_table=11

SEQ ID NO: 35736 - protein, 409 aa, Burkholderia mallei ATCC 23344; identical to SEQ ID NO: 28409

SEQ ID NO: 35737 - DNA, 1404 bp, Burkholderia mallei ATCC 23344; identical to SEQ ID NO: 28410
  CDS (1)..(1404): transl_table=11

SEQ ID NO: 35738 - protein, 467 aa, Burkholderia mallei ATCC 23344; identical to SEQ ID NO: 28411

SEQ ID NO: 35739 - DNA, 1281 bp, Burkholderia pseudomallei K96243; identical to SEQ ID NO: 28412
  CDS (1)..(1281): transl_table=11

SEQ ID NO: 35740 - protein, 426 aa, Burkholderia pseudomallei K96243; identical to SEQ ID NO: 28413

SEQ ID NO: 35741 - DNA, 1386 bp, Burkholderia pseudomallei K96243; identical to SEQ ID NO: 28414
  CDS (1)..(1386): transl_table=11

SEQ ID NO: 35742 - protein, 461 aa, Burkholderia pseudomallei K96243; identical to SEQ ID NO: 28415

SEQ ID NO: 35743 - DNA, 1458 bp, Burkholderia pseudomallei K96243; identical to SEQ ID NO: 28416
  CDS (1)..(1458): transl_table=11

SEQ ID NO: 35744 - protein, 485 aa, Burkholderia pseudomallei K96243; identical to SEQ ID NO: 28417

SEQ ID NO: 35745 - DNA, 1275 bp, Burkholderia pseudomallei K96243; identical to SEQ ID NO: 28418
  CDS (1)..(1275): transl_table=11

SEQ ID NO: 35746 - protein, 424 aa, Burkholderia pseudomallei K96243; identical to SEQ ID NO: 28419

SEQ ID NO: 35747 - DNA, 1275 bp, Methylococcus capsulatus str. Bath; identical to SEQ ID NO: 28420
  CDS (1)..(1275): transl_table=11

SEQ ID NO: 35748 - protein, 424 aa, Methylococcus capsulatus str. Bath; identical to SEQ ID NO: 28421

SEQ ID NO: 35749 - DNA, 1470 bp, Nocardia farcinica IFM 10152; identical to SEQ ID NO: 28422
  CDS (1)..(1470): transl_table=11

SEQ ID NO: 35750 - protein, 489 aa, Nocardia farcinica IFM 10152; identical to SEQ ID NO: 28423

SEQ ID NO: 35751 - DNA, 1485 bp, Nocardia farcinica IFM 10152; identical to SEQ ID NO: 28424
  CDS (1)..(1485): transl_table=11

SEQ ID NO: 35752 - protein, 494 aa, Nocardia farcinica IFM 10152; identical to SEQ ID NO: 28425

SEQ ID NO: 35753 - DNA, 1323 bp, Haloarcula marismortui ATCC 43049; identical to SEQ ID NO: 28426
  CDS (1)..(1323): transl_table=11

SEQ ID NO: 35754 - protein, 440 aa, Haloarcula marismortui ATCC 43049; identical to SEQ ID NO: 28427

SEQ ID NO: 35755 - DNA, 1200 bp, Geobacillus kaustophilus HTA426; identical to SEQ ID NO: 28428
  CDS (1)..(1200): transl_table=11

SEQ ID NO: 35756 - protein, 399 aa, Geobacillus kaustophilus HTA426; identical to SEQ ID NO: 28429

SEQ ID NO: 35757 - DNA, 1203 bp, Geobacillus kaustophilus HTA426; identical to SEQ ID NO: 28430
  CDS (1)..(1203): transl_table=11

SEQ ID NO: 35758 - protein, 400 aa, Geobacillus kaustophilus HTA426; identical to SEQ ID NO: 28431

SEQ ID NO: 35759 - DNA, 1389 bp, Salmonella enterica subsp. enterica serovar Paratyphi A str. ATCC; identical to SEQ ID NO: 28432
  CDS (1)..(1389): transl_table=11

SEQ ID NO: 35760 - protein, 462 aa, Salmonella enterica subsp. enterica serovar Paratyphi A str. ATCC; identical to SEQ ID NO: 28433

SEQ ID NO: 35761 - DNA, 1332 bp, Idiomarina loihiensis L2TR; identical to SEQ ID NO: 28434
  CDS (1)..(1332): transl_table=11

SEQ ID NO: 35762 - protein, 443 aa, Idiomarina loihiensis L2TR; identical to SEQ ID NO: 28435

SEQ ID NO: 35763 - DNA, 1692 bp, Azoarcus sp. EbN1; identical to SEQ ID NO: 28436
  CDS (1)..(1692): transl_table=11

SEQ ID NO: 35764 - protein, 563 aa, Azoarcus sp. EbN1; identical to SEQ ID NO: 28437

SEQ ID NO: 35765 - DNA, 1377 bp, Azoarcus sp. EbN1; identical to SEQ ID NO: 28438
  CDS (1)..(1377): transl_table=11

SEQ ID NO: 35766 - protein, 458 aa, Azoarcus sp. EbN1; identical to SEQ ID NO: 28439

SEQ ID NO: 35767 - DNA, 1509 bp, Bacillus clausii KSM-K16; identical to SEQ ID NO: 28440
  CDS (1)..(1509): transl_table=11

SEQ ID NO: 35768 - protein, 502 aa, Bacillus clausii KSM-K16; identical to SEQ ID NO: 28441

SEQ ID NO: 35769 - DNA, 1206 bp, Bacillus clausii KSM-K16; identical to SEQ ID NO: 28442
  CDS (1)..(1206): transl_table=11

SEQ ID NO: 35770 - protein, 401 aa, Bacillus clausii KSM-K16; identical to SEQ ID NO: 28443

SEQ ID NO: 35771 - DNA, 1164 bp, Staphylococcus epidermidis RP62A; identical to SEQ ID NO: 28444
  CDS (1)..(1164): transl_table=11

SEQ ID NO: 35772 - protein, 387 aa, Staphylococcus epidermidis RP62A; identical to SEQ ID NO: 28445

SEQ ID NO: 35773 - DNA, 1389 bp, Salmonella enterica subsp. enterica serovar Choleraesuis str; identical to SEQ ID NO: 28446
  CDS (1)..(1389): transl_table=11

SEQ ID NO: 35774 - protein, 462 aa, Salmonella enterica subsp. enterica serovar Choleraesuis str; identical to SEQ ID NO: 28447

SEQ ID NO: 35775 - DNA, 1212 bp, Pseudomonas syringae pv. syringae B728a; identical to SEQ ID NO: 28448
  CDS (1)..(1212): transl_table=11

SEQ ID NO: 35776 - protein, 403 aa, Pseudomonas syringae pv. syringae B728a; identical to SEQ ID NO: 28449

SEQ ID NO: 35777 - DNA, 1158 bp, Staphylococcus haemolyticus JCSC1435; identical to SEQ ID NO: 28450
  CDS (1)..(1158): transl_table=11

SEQ ID NO: 35778 - protein, 385 aa, Staphylococcus haemolyticus JCSC1435; identical to SEQ ID NO: 28451

SEQ ID NO: 35779 - DNA, 1380 bp, Psychrobacter arcticum 273-4; identical to SEQ ID NO: 28452
  CDS (1)..(1380): transl_table=11

SEQ ID NO: 35780 - protein, 459 aa, Psychrobacter arcticum 273-4; identical to SEQ ID NO: 28453

SEQ ID NO: 35781 - DNA, 1212 bp, Pseudomonas syringae pv. phaseolicola 1448A; identical to SEQ ID NO: 28454
  CDS (1)..(1212): transl_table=11

SEQ ID NO: 35782 - protein, 403 aa, Pseudomonas syringae pv. phaseolicola 1448A; identical to SEQ ID NO: 28455

SEQ ID NO: 35783 - DNA, 1215 bp, Dechloromonas aromatica RCB; identical to SEQ ID NO: 28456
  CDS (1)..(1215): transl_table=11

SEQ ID NO: 35784 - protein, 404 aa, Dechloromonas aromatica RCB; identical to SEQ ID NO: 28457

SEQ ID NO: 35785 - DNA, 1290 bp, Ralstonia eutropha JMP134; identical to SEQ ID NO: 28458
  CDS (1)..(1290): transl_table=11

SEQ ID NO: 35786 - protein, 429 aa, Ralstonia eutropha JMP134; identical to SEQ ID NO: 28459

SEQ ID NO: 35787 - DNA, 1386 bp, Ralstonia eutropha JMP134; identical to SEQ ID NO: 28460
  CDS (1)..(1386): transl_table=11

SEQ ID NO: 35788 - protein, 461 aa, Ralstonia eutropha JMP134; identical to SEQ ID NO: 28461

SEQ ID NO: 35789 - DNA, 1362 bp, Shigella sonnei Ss046; identical to SEQ ID NO: 28462
  CDS (1)..(1362): transl_table=11

SEQ ID NO: 35790 - protein, 453 aa, Shigella sonnei Ss046; identical to SEQ ID NO: 28463

SEQ ID NO: 35791 - DNA, 1269 bp, Thiobacillus denitrificans ATCC 25259; identical to SEQ ID NO: 28464
  CDS (1)..(1269): transl_table=11

SEQ ID NO: 35792 - protein, 422 aa, Thiobacillus denitrificans ATCC 25259; identical to SEQ ID NO: 28465

SEQ ID NO: 35793 - DNA, 1677 bp, Thiobacillus denitrificans ATCC 25259; identical to SEQ ID NO: 28466
  CDS (1)..(1677): transl_table=11

SEQ ID NO: 35794 - protein, 558 aa, Thiobacillus denitrificans ATCC 25259; identical to SEQ ID NO: 28467

SEQ ID NO: 35795 - DNA, 1263 bp, Magnetospirillum magnetotacticum MS-1; identical to SEQ ID NO: 28468
  CDS (1)..(1263)

SEQ ID NO: 35796 - protein, 420 aa, Magnetospirillum magnetotacticum MS-1; identical to SEQ ID NO: 28469

SEQ ID NO: 35797 - DNA, 1407 bp, Pseudomonas aeruginosa UCBPP-PA14; identical to SEQ ID NO: 28470
  CDS (1)..(1407)

SEQ ID NO: 35798 - protein, 468 aa, Pseudomonas aeruginosa UCBPP-PA14; identical to SEQ ID NO: 28471

SEQ ID NO: 35799 - DNA, 1326 bp, Burkholderia cepacia R18194; identical to SEQ ID NO: 28472
  CDS (1)..(1326)

SEQ ID NO: 35800 - protein, 441 aa, Burkholderia cepacia R18194; identical to SEQ ID NO: 28473

SEQ ID NO: 35801 - DNA, 1326 bp, Burkholderia cenocepacia AU 1054; identical to SEQ ID NO: 28474
  CDS (1)..(1326): transl_table=11

SEQ ID NO: 35802 - protein, 441 aa, Burkholderia cenocepacia AU 1054; identical to SEQ ID NO: 28475

SEQ ID NO: 35803 - DNA, 1407 bp, Burkholderia pseudomallei S13; identical to SEQ ID NO: 28476
  CDS (1)..(1407)

SEQ ID NO: 35804 - protein, 468 aa, Burkholderia pseudomallei S13; identical to SEQ ID NO: 28477

SEQ ID NO: 35805 - DNA, 1212 bp, Polaromonas sp. JS666; identical to SEQ ID NO: 28478
  CDS (1)..(1212): transl_table=11

SEQ ID NO: 35806 - protein, 403 aa, Polaromonas sp. JS666; identical to SEQ ID NO: 28479

SEQ ID NO: 35807 - DNA, 1320 bp, Geobacter metallireducens GS-15; identical to SEQ ID NO: 28480
  CDS (1)..(1320): transl_table=11

SEQ ID NO: 35808 - protein, 439 aa, Geobacter metallireducens GS-15; identical to SEQ ID NO: 28481

SEQ ID NO: 35809 - DNA, 1230 bp, Nitrobacter hamburgensis X14; identical to SEQ ID NO: 28482
  CDS (1)..(1230): transl_table=11

SEQ ID NO: 35810 - protein, 409 aa, Nitrobacter hamburgensis X14; identical to SEQ ID NO: 28483

SEQ ID NO: 35811 - DNA, 1209 bp, Paracoccus denitrificans PD1222; identical to SEQ ID NO: 28484
  CDS (1)..(1209): transl_table=11

SEQ ID NO: 35812 - protein, 402 aa, Paracoccus denitrificans PD1222; identical to SEQ ID NO: 28485

SEQ ID NO: 35813 - DNA, 1401 bp, Pseudomonas aeruginosa; identical to SEQ ID NO: 28486
  CDS (1)..(1401): transl_table=11

SEQ ID NO: 35814 - protein, 466 aa, Pseudomonas aeruginosa; identical to SEQ ID NO: 28487

SEQ ID NO: 35815 - DNA, 1416 bp, Mycobacterium fortuitum; identical to SEQ ID NO: 28488
  CDS (1)..(1416): transl_table=11

SEQ ID NO: 35816 - protein, 471 aa, Mycobacterium fortuitum; identical to SEQ ID NO: 28489

SEQ ID NO: 35817 - DNA, 1527 bp, Populus tremula x Populus tremuloides; identical to SEQ ID NO: 28490
  CDS (1)..(1527)

SEQ ID NO: 35818 - protein, 508 aa, Populus tremula x Populus tremuloides; identical to SEQ ID NO: 28491

SEQ ID NO: 35819 - DNA, 1602 bp, Pseudomonas sp; identical to SEQ ID NO: 28492
  CDS (1)..(1602): transl_table=11

SEQ ID NO: 35820 - protein, 533 aa, Pseudomonas sp; identical to SEQ ID NO: 28493

SEQ ID NO: 35821 - DNA, 1302 bp, Halomonas maura; identical to SEQ ID NO: 28494
  CDS (1)..(1302): transl_table=11

SEQ ID NO: 35822 - protein, 433 aa, Halomonas maura; identical to SEQ ID NO: 28495

SEQ ID NO: 35823 - DNA, 1254 bp, Rhizobium sp; identical to SEQ ID NO: 28496
  CDS (1)..(1254): transl_table=11

SEQ ID NO: 35824 - protein, 417 aa, Rhizobium sp; identical to SEQ ID NO: 28497

SEQ ID NO: 35825 - DNA, 1311 bp, Halobacterium mediterranei; identical to SEQ ID NO: 28498
  CDS (1)..(1311): transl_table=11

SEQ ID NO: 35826 - protein, 436 aa, Halobacterium mediterranei; identical to SEQ ID NO: 28499

SEQ ID NO: 35827 - DNA, 1650 bp, Physcomitrella patens; identical to SEQ ID NO: 28500
  CDS (1)..(1650)

SEQ ID NO: 35828 - protein, 549 aa, Physcomitrella patens; identical to SEQ ID NO: 28501

SEQ ID NO: 35829 - DNA, 1353 bp, Corynebacterium glutamicum; identical to SEQ ID NO: 28502
  CDS (1)..(1353): transl_table=11

SEQ ID NO: 35830 - protein, 450 aa, Corynebacterium glutamicum; identical to SEQ ID NO: 28503

SEQ ID NO: 35831 - DNA, 1284 bp, Paracoccus halodenitrificans; identical to SEQ ID NO: 28504
  CDS (1)..(1284): transl_table=11

SEQ ID NO: 35832 - protein, 427 aa, Paracoccus halodenitrificans; identical to SEQ ID NO: 28505

SEQ ID NO: 35833 - DNA, 1593 bp, Paracoccus halodenitrificans; identical to SEQ ID NO: 28506
  CDS (1)..(1593): transl_table=11

SEQ ID NO: 35834 - protein, 530 aa, Paracoccus halodenitrificans; identical to SEQ ID NO: 28507

SEQ ID NO: 35835 - DNA, 2718 bp, Paracoccus pantotrophus; identical to SEQ ID NO: 28508
  CDS (1)..(2718): transl_table=11

SEQ ID NO: 35836 - protein, 905 aa, Paracoccus pantotrophus; identical to SEQ ID NO: 28509

SEQ ID NO: 35837 - DNA, 1266 bp, Pseudomonas fluorescens; identical to SEQ ID NO: 28510
  CDS (1)..(1266): transl_table=11

SEQ ID NO: 35838 - protein, 421 aa, Pseudomonas fluorescens; identical to SEQ ID NO: 28511

SEQ ID NO: 35839 - DNA, 1332 bp, Thermus thermophilus; identical to SEQ ID NO: 28512
  CDS (1)..(1332): transl_table=11

SEQ ID NO: 35840 - protein, 443 aa, Thermus thermophilus; identical to SEQ ID NO: 28513

SEQ ID NO: 35841 - DNA, 1308 bp, Thermus thermophilus; identical to SEQ ID NO: 28514
  CDS (1)..(1308): transl_table=11

SEQ ID NO: 35842 - protein, 435 aa, Thermus thermophilus; identical to SEQ ID NO: 28515

SEQ ID NO: 35843 - DNA, 1449 bp, Cylindrotheca fusiformis; identical to SEQ ID NO: 28516
  CDS (1)..(1449)

SEQ ID NO: 35844 - protein, 482 aa, Cylindrotheca fusiformis; identical to SEQ ID NO: 28517

SEQ ID NO: 35845 - DNA, 1449 bp, Cylindrotheca fusiformis; identical to SEQ ID NO: 28518
  CDS (1)..(1449)

SEQ ID NO: 35846 - protein, 482 aa, Cylindrotheca fusiformis; identical to SEQ ID NO: 28519

SEQ ID NO: 35847 - DNA, 1449 bp, Cylindrotheca fusiformis; identical to SEQ ID NO: 28520
  CDS (1)..(1449)

SEQ ID NO: 35848 - protein, 482 aa, Cylindrotheca fusiformis; identical to SEQ ID NO: 28521

SEQ ID NO: 35849 - DNA, 1212 bp, Pseudomonas aeruginosa; identical to SEQ ID NO: 28522
  CDS (1)..(1212): transl_table=11

SEQ ID NO: 35850 - protein, 403 aa, Pseudomonas aeruginosa; identical to SEQ ID NO: 28523

SEQ ID NO: 35851 - DNA, 1389 bp, Escherichia coli; identical to SEQ ID NO: 28524
  CDS (1)..(1389): transl_table=11

SEQ ID NO: 35852 - protein, 462 aa, Escherichia coli; identical to SEQ ID NO: 28525

SEQ ID NO: 35853 - DNA, 1389 bp, Salmonella typhimurium; identical to SEQ ID NO: 28526
  CDS (1)..(1389): transl_table=11

SEQ ID NO: 35854 - protein, 462 aa, Salmonella typhimurium; identical to SEQ ID NO: 28527

SEQ ID NO: 35855 - DNA, 1266 bp, Bacillus subtilis; identical to SEQ ID NO: 28528
  CDS (1)..(1266): transl_table=11

SEQ ID NO: 35856 - protein, 421 aa, Bacillus subtilis; identical to SEQ ID NO: 28529

SEQ ID NO: 35857 - DNA, 21 bp, Artificial sequence
  Primer sequence
atgagtcactcatccgccccc

SEQ ID NO: 35858 - DNA, 27 bp, Artificial sequence
  Primer sequence
ttattttttagaatgccgaccatatac

SEQ ID NO: 35859 - protein, 512 aa, Artificial sequence; identical to SEQ ID NO: 28532
  Consensus
  Variant (2)..(9): Xaa in position 2 to 9 is any amino acid
  Variant (11)..(11): Xaa in position 11 is any amino acid
  Variant (13)..(13): Xaa in position 13 is any amino acid
  Variant (16)..(16): Xaa in position 16 is any amino acid
  Variant (18)..(22): Xaa in position 18 to 22 is any amino acid
  Variant (23)..(24): Xaa in position 23 to 24 is any or no amino acid
  Variant (26)..(38): Xaa in position 26 to 38 is any amino acid
  Variant (39)..(49): Xaa in position 39 to 49 is any or no amino acid
  Variant (51)..(51): Xaa in position 51 is any amino acid
  Variant (53)..(54): Xaa in position 53 to 54 is any amino acid
  Variant (55)..(55): Xaa in position 55 is any or no amino acid
  Variant (57)..(57): Xaa in position 57 is any amino acid
  Variant (60)..(60): Xaa in position 60 is any amino acid
  Variant (64)..(72): Xaa in position 64 to 72 is any amino acid
  Variant (74)..(74): Xaa in position 74 is any amino acid
  Variant (76)..(86): Xaa in position 76 to 86 is any amino acid
  Variant (88)..(101): Xaa in position 88 to 101 is any amino acid
  Variant (102)..(110): Xaa in position 102 to 110 is any or no amino acid
  Variant (112)..(112): Xaa in position 112 is any amino acid
  Variant (113)..(113): Xaa in position 113 is any or no amino acid
  Variant (115)..(117): Xaa in position 115 to 117 is any amino acid
  Variant (119)..(119): Xaa in position 119 is any amino acid
  Variant (123)..(123): Xaa in position 123 is any amino acid
  Variant (126)..(127): Xaa in position 126 to 127 is any amino acid
  Variant (129)..(133): Xaa in position 129 to 133 is any amino acid
  Variant (137)..(140): Xaa in position 137 to 140 is any amino acid
  Variant (142)..(142): Xaa in position 142 is any amino acid
  Variant (144)..(144): Xaa in position 144 is any amino acid
  Variant (147)..(147): Xaa in position 147 is any amino acid
  Variant (150)..(150): Xaa in position 150 is any amino acid
  Variant (151)..(151): Xaa in position 151 is any or no amino acid
  Variant (153)..(153): Xaa in position 153 is any amino acid
  Variant (155)..(156): Xaa in position 155 to 156 is any amino acid
  Variant (158)..(162): Xaa in position 158 to 162 is any amino acid
  Variant (164)..(164): Xaa in position 164 is any or no amino acid
  Variant (166)..(181): Xaa in position 166 to 181 is any amino acid
  Variant (182)..(210): Xaa in position 182 to 210 is any or no amino acid
  Variant (212)..(212): Xaa in position 212 is any amino acid
  Variant (214)..(215): Xaa in position 214 to 215 is any amino acid
  Variant (217)..(243): Xaa in position 217 to 243 is any amino acid
  Variant (244)..(314): Xaa in position 244 to 314 is any or no amino acid
  Variant (316)..(320): Xaa in position 316 to 320 is any amino acid
  Variant (322)..(324): Xaa in position 322 to 324 is any amino acid
  Variant (327)..(327): Xaa in position 327 is any amino acid
  Variant (331)..(342): Xaa in position 331 to 342 is any amino acid
  Variant (344)..(357): Xaa in position 344 to 357 is any amino acid
  Variant (358)..(377): Xaa in position 358 to 377 is any or no amino acid
  Variant (379)..(381): Xaa in position 379 to 381 is any amino acid
  Variant (383)..(384): Xaa in position 383 to 384 is any amino acid
  Variant (387)..(387): Xaa in position 387 is any amino acid
  Variant (392)..(392): Xaa in position 392 is any amino acid
  Variant (395)..(432): Xaa in position 395 to 432 is any amino acid
  Variant (433)..(455): Xaa in position 433 to 455 is any or no amino acid
  Variant (457)..(457): Xaa in position 457 is any amino acid
  Variant (459)..(459): Xaa in position 459 is any amino acid
  Variant (462)..(462): Xaa in position 462 is any amino acid
  Variant (464)..(465): Xaa in position 464 to 465 is any amino acid
  Variant (467)..(469): Xaa in position 467 to 469 is any amino acid
  Variant (471)..(474): Xaa in position 471 to 474 is any amino acid
  Variant (475)..(497): Xaa in position 475 to 497 is any or no amino acid
  Variant (499)..(501): Xaa in position 499 to 501 is any amino acid
  Variant (503)..(507): Xaa in position 503 to 507 is any amino acid
  Variant (510)..(510): Xaa in position 510 is any amino acid

SEQ ID NO: 35860 - protein, 19 aa, Artificial sequence
  Consensus
  Variant (2)..(10): Xaa in position 2 to 10 is any amino acid
  Variant (11)..(11): Xaa in position 11 is any or no amino acid
  Variant (13)..(13): Xaa in position 13 is any amino acid
  Variant (14)..(14): Xaa in position 14 is Ala, Ile or Val
  Variant (16)..(16): Xaa in position 16 is any amino acid
  Variant (17)..(17): Xaa in position 17 is Ile, Leu, Met or Val
  Variant (18)..(18): Xaa in position 18 is any amino acid
  Variant (19)..(19): Xaa in position 19 is Ala, Gly or Ser
LXXXXXXXXXXFXXWXXXX
